United States Patent Application Publication US 2014/0259212 A1 - sequence listing, part 3

SEQ ID NO: 4670 - DNA, 1362 bp, Arabidopsis thaliana
  CDS (1)..(1362)
atgatgattctccataaacctccatcttctgaaatcttacattttgacaatctgacttcctcgaacagtaagaacctaaaacaatcaaaaagaaccattcttgagaaaccattcgttgacatcggaaaggtttacatcctcggggatgaattgggtcaaggccaattcggtataactcgaaaatgcgttgagaagacttcaggtaagacttacgcctgcaagaccattctcaagacgaatctaaagagtagagaagatgaagaagccgtgaagagagagattcgtatcatgaagcatttgtctggagaaccgaacattgttgagttcaagaaagcttacgaggacagagattctgtacatattgttatggaatattgtggtggtggagagttattcaaaaagatcgaagctttgtccaaagatggaaagtcttactccgagaaagaagctgttgaaatcattaggccgattgtgaatgttgtcaagaattgtcattacatgggtgtgatgcttcgtgatctaaagcctgagaatttcttgctctccagtaccgataagaatgctacggtcaaagctatcgacttcgggtgttctgttttcattgaagaagaacctgaggcacagatgttctctgagataaagagtgccaaaatcgacgttgacagcgaatcatggaagtttatagatgtgaaggcaaaacatcttgtcaataggatgcttaacagaaaccccaaggaacgaatctctgctgcagaggttcttggacatccttggatgaaagacggagaagcttcagataagcctattgatggcgttgttttatctcgattgaagcaatttcgagatatgaacaagctaaagaaagtagctctaaaggttattgcagcaaatctatcggaagaggaaatcaaaggtcttaaaacactgttcaccaacattgataccgacaaaagtggcacaatcactcttgaagaactcaaaacaggtcttactagacttggatctaacctctctaaaaccgaagtggagcaactcatggaagctgctgatgtggatggtaatggaacaatcgacatagacgagtttatctctgccacgatgcatagatatagattggatagagatgatcatgtgtaccaagcattccaacactttgacaaagacaatgacgggcacataaccaaggaagagttggagatggcaatgaaagagcatggtgtgggagatgaagttagcatcaaacaaatcataaccgaagttgataccgataatgatgggaaaataaactttgaggaattccgcacaatgatgagaagtggcagcagcttgcagccacaaagggagcttcttccgatcaagtga

SEQ ID NO: 4671 - protein, 453 aa, Arabidopsis thaliana
MMILHKPPSSEILHFDNLTSSNSKNLKQSKRTILEKPFVDIGKVYILGDELGQGQFGITRKCVEKTSGKTYACKTILKTNLKSREDEEAVKREIRIMKHLSGEPNIVEFKKAYEDRDSVHIVMEYCGGGELFKKIEALSKDGKSYSEKEAVEIIRPIVNVVKNCHYMGVMLRDLKPENFLLSSTDKNATVKAIDFGCSVFIEEEPEAQMFSEIKSAKIDVDSESWKFIDVKAKHLVNRMLNRNPKERISAAEVLGHPWMKDGEASDKPIDGVVLSRLKQFRDMNKLKKVALKVIAANLSEEEIKGLKTLFTNIDTDKSGTITLEELKTGLTRLGSNLSKTEVEQLMEAADVDGNGTIDIDEFISATMHRYRLDRDDHVYQAFQHFDKDNDGHITKEELEMAMKEHGVGDEVSIKQIITEVDTDNDGKINFEEFRTMMRSGSSLQPQRELLPIK

SEQ ID NO: 4672 - DNA, 1683 bp, Arabidopsis thaliana
  CDS (1)..(1683)
atgggtaattgttgcggaacagcaggatcattggctcaaaacgataacaaacccaaaaaaggaaggaagaagcaaaaccctttctcgattgattacggtcttcaccacggtggtggagatggaggtggaagacctcttaagcttatcgttttgaatgatccaacaggtcgtgagatcgagtctaaatacacgttggggagagagctaggtcgtggagaattcggtgttacgtatctatgtactgataaggagacagacgacgtttttgcttgtaaatcgattttgaagaagaagctgaggacagctgttgatattgaagatgttaggagagaggttgagattatgaggcatatgcctgagcatcctaatgttgttactttgaaggagacttatgaggatgagcatgctgttcatttggttatggagctttgtgaaggtggtgaattgtttgataggattgttgctagagggcattatactgagagagctgctgctgctgtcactaagaccatcatggaagttgttcaggtgtgtcataagcatggggtaatgcacagggacctgaaacctgagaacttcttgtttggaaacaagaaggagactgcacctcttaaggcgattgattttggtctctctgttttctttaaaccaggcgagaggtttaacgaaatcgttggtagtccgtactacatggctcccgaggtgctaaaacggaattatggtccagaagttgatatttggagtgcaggtgtaattctttacatactgctatgtggtgtcccgcctttctgggcagaaactgaacaaggagttgcacaagcaattattcgatctgtactagacttcagaagggacccatggcccaaggtttctgaaaacgcaaaagaccttatcaggaaaatgcttgatcctgaccaaaagcgtcgtcttacagctcaacaagtcctagatcacccgtggttacagaatgcaaagacagcccccaatgtatcattgggtgaaacagtgagggcaaggttgaagcagttcaccgtcatgaacaagctcaagaaacgagcactcagggttattgctgagcatttatcagatgaagaagcttcaggtataagagaagggttccaaataatggacacaagccaaagagggaagattaacatcgacgagcttaaaatcgggttgcagaaacttggtcatgccattccgcaagatgatttacaaattttgatggatgctggagacatcgatagagatggatatttggactgtgacgagtttattgccatatcggtacacctaaggaaaatgggcaatgacgagcatctcaagaaagcgtttgcgttctttgatcaaaacaataacggatatatcgaaatagaggagttaagggaagccttgtctgacgaacttggtacaagtgaagaagttgttgatgccattatccgtgatgttgacaccgacaaggatggaagaataagttacgaagagtttgtaacgatgatgaaaacaggaacagattggagaaaagcttcgagacagtactcgagagaacggtttaacagtatcagtctcaaactgatgcaagatgcgtcgttgcagagttgtgtgtttgatatcctggctaatgagcgagctgagtatggggatcaagagagaaaaaccgtgttggcctttggctgtgtgtag

SEQ ID NO: 4673 - protein, 560 aa, Arabidopsis thaliana
MGNCCGTAGSLAQNDNKPKKGRKKQNPFSIDYGLHHGGGDGGGRPLKLIVLNDPTGREIESKYTLGRELGRGEFGVTYLCTDKETDDVFACKSILKKKLRTAVDIEDVRREVEIMRHMPEHPNVVTLKETYEDEHAVHLVMELCEGGELFDRIVARGHYTERAAAAVTKTIMEVVQVCHKHGVMHRDLKPENFLFGNKKETAPLKAIDFGLSVFFKPGERFNEIVGSPYYMAPEVLKRNYGPEVDIWSAGVILYILLCGVPPFWAETEQGVAQAIIRSVLDFRRDPWPKVSENAKDLIRKMLDPDQKRRLTAQQVLDHPWLQNAKTAPNVSLGETVRARLKQFTVMNKLKKRALRVIAEHLSDEEASGIREGFQIMDTSQRGKINIDELKIGLQKLGHAIPQDDLQILMDAGDIDRDGYLDCDEFIAISVHLRKMGNDEHLKKAFAFFDQNNNGYIEIEELREALSDELGTSEEVVDAIIRDVDTDKDGRISYEEFVTMMKTGTDWRKASRQYSRERFNSISLKLMQDASLQSCVFDILANERAEYGDQERKTVLAFGCV

SEQ ID NO: 4674 - DNA, 1788 bp, Dunaliella tertiolecta
  CDS (1)..(1788)
atggcgagcgtggactgcacgttggtctctgcgaggggcattaaagacgtggagatagttggcaagcagagcccctatgccgtgctgactgtgggccccaagacattcaaaagcgggacggcaaacggaggtggtagcgacccggtttggaaccagactttctcattcacaaacgtcacccccgattcatccgtcaagttggagatattcaactccaacgtagtgctgagggatgtcgctattggtggatgtaaggctcccatggacaaggcgttatcagctggcaaggacgagctcaccctccccatcatcaccaagaaaggcaagccccatggtgaagtcaagctgatactgaccctcaagcccgatgccacaaagcaaatggtgactagccacaagacaaggaaggcagctggggcctggatcctgcccacctacggcaataccgactgctggaaggattatgagcctggcacactccttgggaagggcacctttggcaccacctacctcgcgacagagaagaagacggggcagaagtgcgctgtcaaggtcatctcaaagcgcaagctgaccacaccagatgaggtagatgatgtaaagaaagaggtgcagatcatgcaccacctggctggccaccccaacgtggtcggcttaaaaggagtgtacgaggacaaaagcaatgtctgcttagcaatggaggttgccacaggtggcgagctgtttgactccatcgtcaagcgtggccactacagtgagcgcgatgcggcagagctgatacgtacgattgtgagcgttgttgcgcactgccacaacatgggcgtcatccatagggacctcaagcccgagaacttcctgctgtccgacaagtcccccagagctcagctaaaggcaacggacttcggtctcagctccttcttccaggagggccaagtattcactgacattgtgggttctgcgtattacgttgcccccgaagtcctgcgtcgctcctatggcaaggaagcggacatttggagctgcggcatcatcctgtacatcctgctgtgcgggttccccccattccatggcgacagtgagaagaagattttcgaggccatcatcagcaagtctgtggactttaacacgcagccgtggcccaggatctcagctcctgccaaggactgtgtgaagcgcatgttgcagcgcgacccgaagaagcgtgcgaccgccaacgagatcatgcagcacgactggatgcgtgagaatggtgtggccagtgatgagcctctggagatggaggtcgtgtcgcgcatcaagaacttcagtggcatgaacaagctcaagaaggaggccctcaaggtcatcgctgtaaacctgcccatcgatgaaatctctggtatgcgggagatgttcatggacatcgacaaagacaagagcggcaacatcacgattgacgaatttgcggcggcacttcacaagaagggccagattgtgacggagaaggagattgagaagatcatgaaggaggctgatgtggatggggacggcaccatcgactatgaggagttcctggctgccaccatcaacctgggcaaactgcaacgagaggaaaacctgaagactgcatttgagcactttgatttggacggcaacggtgaaatctcgcataacgagctcgtccagtgtctgtctaagctgggcatcaacgacgcgcacgttaaggatatcatcaaggaggtagatgcagatggcaacggccagatcgactacaacgagttttgcatcatgatgcgcaacctggattaa

SEQ ID NO: 4675 - protein, 595 aa, Dunaliella tertiolecta
MASVDCTLVSARGIKDVEIVGKQSPYAVLTVGPKTFKSGTANGGGSDPVWNQTFSFTNVTPDSSVKLEIFNSNVVLRDVAIGGCKAPMDKALSAGKDELTLPIITKKGKPHGEVKLILTLKPDATKQMVTSHKTRKAAGAWILPTYGNTDCWKDYEPGTLLGKGTFGTTYLATEKKTGQKCAVKVISKRKLTTPDEVDDVKKEVQIMHHLAGHPNVVGLKGVYEDKSNVCLAMEVATGGELFDSIVKRGHYSERDAAELIRTIVSVVAHCHNMGVIHRDLKPENFLLSDKSPRAQLKATDFGLSSFFQEGQVFTDIVGSAYYVAPEVLRRSYGKEADIWSCGIILYILLCGFPPFHGDSEKKIFEAIISKSVDFNTQPWPRISAPAKDCVKRMLQRDPKKRATANEIMQHDWMRENGVASDEPLEMEVVSRIKNFSGMNKLKKEALKVIAVNLPIDEISGMREMFMDIDKDKSGNITIDEFAAALHKKGQIVTEKEIEKIMKEADVDGDGTIDYEEFLAATINLGKLQREENLKTAFEHFDLDGNGEISHNELVQCLSKLGINDAHVKDIIKEVDADGNGQIDYNEFCIMMRNLD

SEQ ID NO: 4676 - DNA, 1572 bp, Oryza sativa
  CDS (1)..(1572)
atgggcgcgtgcttctcatcccacactgcgaccgccgccgccgatggcgggagcgggaagcggcagcagcggaagggggatcacaaggggaagctccccgatggcggcggcggcgagaaggagaaggaggcggcgcgggtggagttcgggtaccagagggacttcgaggggaggtaccaggtcgggaggctgctcggccacggccagttcggctacaccttcgccgccaccgaccgggcctccggtgaccgcgtcgccgtcaagcgcatcgacaaggccaagatggttcgccctgttgctgtggaggatgtaaagagagaagtgaagattcttaaagaacttaaaggccatgagaatattgttcacttctacaatgcgtttgaagatgactcatatgtatatattgtgatggaactatgtgagggtggtgaactattggaccggattttggcaaaaaagaacagccgttatagtgagaaagatgctgcagtggtggtgcggcagatgctcaaagtggcagctgagtgccatctgcatgggctagttcaccgagatatgaagcccgagaacttccttttcaaatcaaccaaggaggactcacctttaaaggcaacagattttggtctgtcagacttcataaaaccagggaaaaagtttcacgatatagttggcagtgcctattatgtagccccagaagttttaaaacgacggtctggccctgagtcagatgtttggagcataggagtcataacttatattttgctctgtgggagacgccctttttggaataagacagaggatggcatattcagagaggtactaagaaacaagcctgattttcgtaagaagccttggccaggcatcagttcaggtgctaaagatttcgttaaaaagttacttgtaaagaacccaagggcaagattaaccgctgctcaagctctctcgcatccatgggtaagagaaggaggagaagcatctgagatccctgttgatatatctgtattgtccaacatgcgtcagtttgtcaagtacagccgttttaagcaatttgctctgagggctttagcaagtacactaaaagaggaagaactagcagatctgaaggaccagttcgatgcaattgatgttgataaaagtggatcaattagtattgaggaaatgcggcatgcccttgcaaaggatcttccttggagattgaagggcccccgtgttctcgagattatccaagcaatcgacagcaacactgatggtcttgtggactttgaagagtttgtagcagcaaccctccatatacatcaaatggctgagcttgactctgaaagggggggcctacgctgccaggctgctttcagcaaatttgatctggatggggacggatacatcactccagatgaactcagaatgcacactggcttgaagggttccatcgagccattgctggaggaggccgacatcgacaaagacgggagaataagcttgtcggagttccgcaagctcctgcggacagcgagcatgagcaaccttccagtccaagaggacctccaaatccacaacccctgtgaacgtcggtaa

SEQ ID NO: 4677 - protein, 523 aa, Oryza sativa
MGACFSSHTATAAADGGSGKRQQRKGDHKGKLPDGGGGEKEKEAARVEFGYQRDFEGRYQVGRLLGHGQFGYTFAATDRASGDRVAVKRIDKAKMVRPVAVEDVKREVKILKELKGHENIVHFYNAFEDDSYVYIVMELCEGGELLDRILAKKNSRYSEKDAAVVVRQMLKVAAECHLHGLVHRDMKPENFLFKSTKEDSPLKATDFGLSDFIKPGKKFHDIVGSAYYVAPEVLKRRSGPESDVWSIGVITYILLCGRRPFWNKTEDGIFREVLRNKPDFRKKPWPGISSGAKDFVKKLLVKNPRARLTAAQALSHPWVREGGEASEIPVDISVLSNMRQFVKYSRFKQFALRALASTLKEEELADLKDQFDAIDVDKSGSISIEEMRHALAKDLPWRLKGPRVLEIIQAIDSNTDGLVDFEEFVAATLHIHQMAELDSERGGLRCQAAFSKFDLDGDGYITPDELRMHTGLKGSIEPLLEEADIDKDGRISLSEFRKLLRTASMSNLPVQEDLQIHNPCERR

SEQ ID NO: 4678 - DNA, 1455 bp, Arabidopsis thaliana
  CDS (1)..(1455)
atgaagcacagcggtgggaaccaagcctgctatgttcttggtcaaaagaccccaagcatccgagatctctactcgttgggacacaaactaggtcaaggacagtttgggacgacttacatgtgcaaagagatctcaacagggcgtgaatacgcatgcaagtctataacaaaacgaaagttgatatcaaaggaagatgtggaagacgtacgcagggaaattcaaatcatgcaccatctggctggctacaagaacattgtcaccattaaaggtgcttacgaggatccattgtatgttcacatcgtgatggagctttgctcaggtggggaattgtttgacagaattatccagagaggacattacagcgagagaaaagcagctgagctgataaagatcatcgttggtgttgttgaggcttgccattcgcttggtgtcatgcatagagatctaaagcccgaaaatttcttgttggttaacaaggacgacgacttctctctcaaagccattgattttgggctttccgtgttcttcaaaccaggtcaaatattcgaggatgtggttggaagtccgtattatgttgctcctgaggttctgctcaagcactacggacccgaggctgatgtgtggaccgcaggggtcatactgtacatattggtgagcggagtccctccgttctgggcagaaacacagcaagggatatttgatgcagtgctgaagggacatattgactttgactccgacccttggcccctaatatccgactctgcaaaaaacttgatccgtggcatgctatgttcccggccctctgagcgactgacagctcatcaagtattgcgccatccttggatctgtgaaaatggagttgcgccagacagagcactagatcctgctgtgctttctcgtcttaaacagttctctgcgatgaataaactaaagcagatggctttacgggtaatagctgagagtctctcggaggaagaaattgctggactgaaggaaatgttcaaagcaatggacacggataacagtggagcgattacgtttgacgagctgaaagccgggttgcgaagatatggttcaaccctcaaggatactgagattcgtgaccttatggaggctgcagatattgacaagagtgggaccatagattatggtgaattcattgctgcaacaatccatctgaacaaattagagcgtgaagaacatcttctgtcagccttcaggtactttgacaaagatgggagcggttacatcactatcgatgagctacagcacgcatgtgctgaacagggaatgagtgatgtctttctagaagatgtgatcaaggaagtcgaccaagacaatgatggaaggattgactacggggagtttgtagctatgatgcagaaaggcattgttggaagaacaatgaggaaaagcataaacatgagcatcaggaacaatgccgtctcgcagtga

SEQ ID NO: 4679 - protein, 484 aa, Arabidopsis thaliana
MKHSGGNQACYVLGQKTPSIRDLYSLGHKLGQGQFGTTYMCKEISTGREYACKSITKRKLISKEDVEDVRREIQIMHHLAGYKNIVTIKGAYEDPLYVHIVMELCSGGELFDRIIQRGHYSERKAAELIKIIVGVVEACHSLGVMHRDLKPENFLLVNKDDDFSLKAIDFGLSVFFKPGQIFEDVVGSPYYVAPEVLLKHYGPEADVWTAGVILYILVSGVPPFWAETQQGIFDAVLKGHIDFDSDPWPLISDSAKNLIRGMLCSRPSERLTAHQVLRHPWICENGVAPDRALDPAVLSRLKQFSAMNKLKQMALRVIAESLSEEEIAGLKEMFKAMDTDNSGAITFDELKAGLRRYGSTLKDTEIRDLMEAADIDKSGTIDYGEFIAATIHLNKLEREEHLLSAFRYFDKDGSGYITIDELQHACAEQGMSDVFLEDVIKEVDQDNDGRIDYGEFVAMMQKGIVGRTMRKSINMSIRNNAVSQ

SEQ ID NO: 4680 - DNA, 1599 bp, Solanum tuberosum
  CDS (1)..(1599)
atgggtgtttgtttgagcaaaagtaaaccagcagagtctaagtctgatgggcattatagatcaggtgggagtgatgggggtggagttgggggtaaagggcataatcatggaacccatcaagctcaaattcagtatactaaatctccaggcccagaaactcaattacccttgaggcctcaagcaagtcctaaaccagttttcaagcaagaaaccattttgggtaaggcatttgaggatgttaaggcacactatacactaggtaaagaattgggtagaggtcaatatggggttacatttctttgtactgaaatagcaactggtcatcaatatgcttgtaagtcaatatcaaagaagaaacttgttactaaatctgataaagctgatatgagaagagagattcagattatgcagcatttaagtggacaaccaaatattgttgaatttaaaggtgcttatgaggataagaattcagtgtgtcttgttatggagttgtgtgctggtggagagttatttgataggatcatagctaaggggcattatactgaaagagctgctgcatcaatgtgtagagctattgttaatgttgtacatgtttgccattttatgggtgttatgcatcgtgatcttaagcctgagaactttctcttgtcagacaagagtgaaaatgctgctttgaaggcaacagattttgggctgtccgtgttcattgaagaaggtaaggtgtacaaggatatagttgggagtgcttactatgttgcccctgaagtcttacggaagagttatggcaaggaaatagatgtttggagtgcaggtgttatgttgtatatactactcagtggtgtgcctcccttttgggcagaaaccgagagaggtatatttgatgccatattaaaagaagacattgactttgaaagtcaaccttggccttctatcacaagtagtgccaaggacctggtccgaaagatgctcaataaagacccaaagcaacgtatttctgctgctcaagttcttgagcatccttggctcaaggtaggtggagtagcatcagataaaccattagataatgctgtcctctcaagaatgaagcaattcagagctatgaacaaactcaagagacttgctttaaaggtcattgctgagaatctctcagcagatgaaattcaggggctcaaatcaatgttccataacatagacaccgataatagtggaacgatcacgtatgaagaattgaagagcggattggccagacttggatcaaagctcacagaggcggaagtaaagcaattgatggaagctgctgatgtggatggaaatggctcgatcgactatattgagttcatcactgctaccatgcataaacatagacttgaaagagatgaaaatctatacaaagcatttcagtatttcgataaagatgggagcgggttcatcacaagagatgaactcgaaacatctatggaagagcatggaataggcgatccagctagtataagggagataatagctgaagtagacgctgataatgatggaagaatcaactatgaggaattttgtacaatgatgagaagtggagctaaacaaccaggcaagctcttctaa

SEQ ID NO: 4681 - protein, 532 aa, Solanum tuberosum
MGVCLSKSKPAESKSDGHYRSGGSDGGGVGGKGHNHGTHQAQIQYTKSPGPETQLPLRPQASPKPVFKQETILGKAFEDVKAHYTLGKELGRGQYGVTFLCTEIATGHQYACKSISKKKLVTKSDKADMRREIQIMQHLSGQPNIVEFKGAYEDKNSVCLVMELCAGGELFDRIIAKGHYTERAAASMCRAIVNVVHVCHFMGVMHRDLKPENFLLSDKSENAALKATDFGLSVFIEEGKVYKDIVGSAYYVAPEVLRKSYGKEIDVWSAGVMLYILLSGVPPFWAETERGIFDAILKEDIDFESQPWPSITSSAKDLVRKMLNKDPKQRISAAQVLEHPWLKVGGVASDKPLDNAVLSRMKQFRAMNKLKRLALKVIAENLSADEIQGLKSMFHNIDTDNSGTITYEELKSGLARLGSKLTEAEVKQLMEAADVDGNGSIDYIEFITATMHKHRLERDENLYKAFQYFDKDGSGFITRDELETSMEEHGIGDPASIREIIAEVDADNDGRINYEEFCTMMRSGAKQPGKLF

SEQ ID NO: 4682 - DNA, 1605 bp, Mesembryanthemum crystallinum
  CDS (1)..(1605)
atggggatttgtgctagcaaaaacaaggctacacagccagaggacaatggatacacaccagcaaatggggttggttcaaacaaccaatcaaagccaccagcccagcaaaactaccaccagcagccaccacagcaaccggtggcgccgccacaaccagcttctcacccaccagttaggatgcccagcccaaaaccagccccaaaagttgagccaaatacaattttgggtaaaccctttgaggatgtgaaggtgtactacacattggggagagaactgggtaggggtcaatttggggttacctatctgtgcactgacaaaaagactggccaacaatatgcttgcaagtcaatctctaagaagaagcttgtgaccaaggctgataaggatgatatgaggagagagattcagatcatgcagcatatgagtggtcaacctaacattgtggaatttaagggtgcttatgaggataaaacatctgtgaatcttgtgatggagctttgtgctggtggggagttgtttgataggattattgctaaggggcattatagtgaaaaggctgctgccactatgttgaggcagattgttaatgttgttcatgtgtgtcactttatgggtgtgatgcatagggatctgaagcctgagaacttcttgctctctagcaaggatgagaattctctcttgaaggccactgattttgggttgtctgtgtttattgaagaaggtaaagtctaccgggatatagtaggcagtgcttactatgtcgctcctgaggtattgcgtcgtaggtatgggaaggagattgatgtttggagtgctggagtcatgttgtacatcttactcagtggtgtgccccccttttgggcagaaacggagaaagggatctttgatgctattttgcaaggccatattgatttcgaaagcaaaccatggccatcaatttcaaatggtgccaaggacctagtgagaaaaatgttgacacaggatcccaagaaacggattactgctgctcaagttcttgagcacccatggctaagagatggtgaagcatcagacaagccaatagacagtgctgttctcctcaggatgaagcaattcagagtcatgaacaagctcaagaagctcgctctaaaggtcattgctgaaaatcttcctgatgaagagatccaagggctgaaacaaatgttcgcgaatatggacactgatggtagtgggtcaattacctatgaagaactgagggagggattggctcgacttggatcaaagcttactgaaactgaagtgaaggcgctcatggaagctgctgatcaagatggaagtggatcaatagactactatgagttcattacagccacaatgcataggtacaggttagagagagatgagcatctttacaaggcattccaatatttcgacaaagacaatagtgggtttatcacaacagatgaactagaaacagcaatgaaagagtatgggattgctgatgagaattgcattgcagagatattgttggaagtagacactgataatgatggaagaataaactatgatgagttcagcgcaatgatgagaagtgggactcaaaacccggttaccaaactcatttag

SEQ ID NO: 4683 - protein, 534 aa, Mesembryanthemum crystallinum
MGICASKNKATQPEDNGYTPANGVGSNNQSKPPAQQNYHQQPPQQPVAPPQPASHPPVRMPSPKPAPKVEPNTILGKPFEDVKVYYTLGRELGRGQFGVTYLCTDKKTGQQYACKSISKKKLVTKADKDDMRREIQIMQHMSGQPNIVEFKGAYEDKTSVNLVMELCAGGELFDRIIAKGHYSEKAAATMLRQIVNVVHVCHFMGVMHRDLKPENFLLSSKDENSLLKATDFGLSVFIEEGKVYRDIVGSAYYVAPEVLRRRYGKEIDVWSAGVMLYILLSGVPPFWAETEKGIFDAILQGHIDFESKPWPSISNGAKDLVRKMLTQDPKKRITAAQVLEHPWLRDGEASDKPIDSAVLLRMKQFRVMNKLKKLALKVIAENLPDEEIQGLKQMFANMDTDGSGSITYEELREGLARLGSKLTETEVKALMEAADQDGSGSIDYYEFITATMHRYRLERDEHLYKAFQYFDKDNSGFITTDELETAMKEYGIADENCIAEILLEVDTDNDGRINYDEFSAMMRSGTQNPVTKLI

SEQ ID NO: 4684 - DNA, 1485 bp, Arabidopsis thaliana
  CDS (1)..(1485)
atgggttgcttcagcagtaaggagctacaacaatcgaaaagaaccattcttgagaaacctttagttgacatcacaaagatttatatcctcggggaggaattgggtagaggtaatttcggtctaacccgaaagtgcgttgagaaatctacaggtaagacattcgcctgcaaaaccattctcaagacaaagctaaaggacgaagaatgtgaagaagacgtgaagagagagattcggattatgaagcaattgtctggagaaccaaacattgtcgagttcaagaatgcttacgaggacaaagattctgtacatattgttatggaatattgtggtggtggagagttatacgacaagatcctagctttgtacgatgttgggaagtcttactcggagaaagaagctgctggaatcattaggtcgattgtgaatgttgtgaagaattgccattacatgggtgtgatgcatcgtgatctaaagcctgagaatttcttgcttacgagtaacgatgacaatgctacggtcaaagttattgactttgggtgttctgtgttcattgaagaaggaaaagtataccaggatttagctgggagtgattactacattgctcctgaagtgttacagggaaattacggtaaagaagcggacatttggagtgcagggattatattatacatcctactctgtggcaaatctccctttgtgaaagaacctgagggacagatgttcaatgagattaagagtttggaaatcgactacagcgaggaaccatggcctcttagagattcaagggcaatacatcttgtcaagaggatgcttgatagaaaccccaaggaacgaatctctgctgcagaggttcttggacatccttggatgaaagaaggagaagcttcggataagcctattgatggcgttgttttatcccgtttgaagagatttcgagatgcgaacaagtttaagaaggtagttctaaagtttattgcagcaaatctatcagaagaggaaatcaaaggtcttaagacactgttcaccaacatagatactgacaaaagtggaaatattactcttgaagaactcaaaacaggtcttactagacttggatctaacctctctaaaaccgaagtggagcaactcatggaagctgctgatatggatggtaatggaacaatcgacatagacgagtttatttctgcaacgatgcatagatacaaattggatagagatgaacatgtgtacaaagcattccaacactttgacaaagacaacgacgggcacataacgaaggaagagttggagatggcgatgaaggaggatggtgcgggagatgaaggtagcatcaaacaaatcatagccgatgctgataccgataatgtaacgacgatgcatagacacagattggaacgagatgaacattttcagaaagcattgttgataaagacaacaacggtttgcagccacaagggaaacttcttcgtatccattgatcattaa

SEQ ID NO: 4685 - protein, 494 aa, Arabidopsis thaliana
MGCFSSKELQQSKRTILEKPLVDITKIYILGEELGRGNFGLTRKCVEKSTGKTFACKTILKTKLKDEECEEDVKREIRIMKQLSGEPNIVEFKNAYEDKDSVHIVMEYCGGGELYDKILALYDVGKSYSEKEAAGIIRSIVNVVKNCHYMGVMHRDLKPENFLLTSNDDNATVKVIDFGCSVFIEEGKVYQDLAGSDYYIAPEVLQGNYGKEADIWSAGIILYILLCGKSPFVKEPEGQMFNEIKSLEIDYSEEPWPLRDSRAIHLVKRMLDRNPKERISAAEVLGHPWMKEGEASDKPIDGVVLSRLKRFRDANKFKKVVLKFIAANLSEEEIKGLKTLFTNIDTDKSGNITLEELKTGLTRLGSNLSKTEVEQLMEAADMDGNGTIDIDEFISATMHRYKLDRDEHVYKAFQHFDKDNDGHITKEELEMAMKEDGAGDEGSIKQIIADADTDNVTTMHRHRLERDEHFQKALLIKTTTVCSHKGNFFVSIDH

SEQ ID NO: 4686 - DNA, 1695 bp, Solanum tuberosum
  CDS (1)..(1695)
atgggtagttgtttttcaagctccaaagttagtggctcaaatagcaataccccttcaaccaacaataccgccacaaacacaaacacaacggtaaatgttcatccaaaccgcagggaaacctcaaaagcaccttcaacaacggttgttaattcaagaaatcaagaagggtcgaattataatcgaggtaaaggtaatattaaccagaaaaaccaacaaaaacaacctaggaattcacagcagaatgttaagccaagttcaagaagacaaggtggggttattccttgtgggaaaagaacagattttgggtatgataaagattttgaaaagagatatacaattgggaaattgttgggtcatggtcaatttggttatacatatgttgctacagataaatcttcaggagatcgtgtggctgtcaaaagaattgagaaaaacaagatggttcttcccattgcggttgaggatgtgaaacgagaagtcaagatattgaaggccttaggtcgtcatgagaatgtggttcaattctataattcattcgaggatcataattatgtctacatcgtaatggagttatgtgaaggtggagaactattggacgattgtcaaaagacagtcggtatacgagaagatgcagcaatagtcgtaccccagatgctaaaagtggcagctgagtgtcatttacatggtttggtgcatcgtgatatgaaacctgagaattttctctttaagtctacaaaggaggattcaccattaaaagccacagattttggatcttcagacttcatcagaccaggaaaagtccaagacattgtcggtagtgcatattatgtagctccagaggtattaaagcgtagatcaggacctgaatcagatgtgtggagtattggcgtaattacatacattttgctatgtggtcgtcggcctttctgggacaaaactgaggatggtatattcaaggaggtcctacggaacaaacctgattttcgtcgcaagccatggtctaacataagcaacagtgctaaagattttgtaaagaaattactggtgaaggatcctcgcgctagacttactgctgctcaggccctatcacatccttgggtccgagagggaggggatgcatctgagattccactggacatttctgttttatccaacatgcggcaatttgtcagatacagtcatctaaaacagtttgctttacgggcgttacgtagcacacttgatgaggaggagatcgctgatctgcgggatcaattttctgcaattgatgtggataagaatggtgtcatcagtctcgaagaaatgagacaggcccttgcgaaggatctcccatggaaaatgaaagaatcacgagttcttgagattcttcaagcgattgacagtaacacagatgggcttgttgattttccggagtttgtggctgccactctacatgtccatcagttggaggagcataattctgcaaagtggcagcaaagatcacaagctgcttttgagaaatttgatgttgatagagatggattcattactccagaagaacttaaaatgcacacgggcttgagaggctccatagatccacttctagaggaagcagatattgacaaagacggaaagataagcatatcagaatttcgtagacttttaagaactgctagtatgacttcaccaacggtgagagattcacggggtatgtag

SEQ ID NO: 4687 - protein, 564 aa, Solanum tuberosum
MGSCFSSSKVSGSNSNTPSTNNTATNTNTTVNVHPNRRETSKAPSTTVVNSRNQEGSNYNRGKGNINQKNQQKQPRNSQQNVKPSSRRQGGVIPCGKRTDFGYDKDFEKRYTIGKLLGHGQFGYTYVATDKSSGDRVAVKRIEKNKMVLPIAVEDVKREVKILKALGRHENVVQFYNSFEDHNYVYIVMELCEGGELLDDCQKTVGIREDAAIVVPQMLKVAAECHLHGLVHRDMKPENFLFKSTKEDSPLKATDFGSSDFIRPGKVQDIVGSAYYVAPEVLKRRSGPESDVWSIGVITYILLCGRRPFWDKTEDGIFKEVLRNKPDFRRKPWSNISNSAKDFVKKLLVKDPRARLTAAQALSHPWVREGGDASEIPLDISVLSNMRQFVRYSHLKQFALRALRSTLDEEEIADLRDQFSAIDVDKNGVISLEEMRQALAKDLPWKMKESRVLEILQAIDSNTDGLVDFPEFVAATLHVHQLEEHNSAKWQQRSQAAFEKFDVDRDGFITPEELKMHTGLRGSIDPLLEEADIDKDGKISISEFRRLLRTASMTSPTVRDSRGM

SEQ ID NO: 4688 - DNA, 1833 bp, Arabidopsis thaliana
  CDS (1)..(1833)
atgggtaatacttgtgttggaccaagcagaaatggcttcttgcaatctgtttcagctgcaatgtggcggccaagagatggagatgattcggcttccatgagtaatggagatattgcaagtgaagctgtttcgggagagcttcgatctcgattatctgatgaagtccagaataaacctcctgaacaggtcacaatgccgaagccagggactgacgtcgagaccaaggacagagagattcgaactgaaagcaagcctgaaacgctagaggagataagccttgagtccaaaccagagactaagcaggagaccaagtcagagaccaagccggagtcaaaacctgatcctccagctaaacctaagaagcctaaacacatgaagagagtgtcaagtgcagggcttaggactgagtcagtgttgcagaggaagactgaaaacttcaaggaattctattccttgggaaggaaactcggacaagggcaatttgggacgacttttttatgtgtcgagaagactacggggaaggagtttgcctgcaagtcgattgctaagaggaagctattgactgatgaggacgttgaggatgtgagaagagaaattcagataatgcatcacttggctggtcaccctaatgtcatctccatcaaaggagcttatgaggatgttgtggcagtgcaccttgtaatggagtgttgtgcaggcggcgagctttttgacaggatcattcaacgcggtcactacacagagaggaaagcggctgagctcactagaaccattgttggggttgtagaggcttgccattctcttggtgttatgcatcgagacctcaagcccgagaattttctgtttgtcagtaaacacgaagattccctcttgaagacgattgattttggactctccatgttctttaaaccagacgatgtttttacagatgttgttggtagcccatattatgttgccccagaagttcttcgaaagcgttatggccctgaagctgatgtctggagtgctggagtgattgtgtacattttattaagcggagttcctccattctgggctgaaaccgaacaaggtattttcgaacaggtactccacggtgatcttgacttttcgtccgatccatggccaagtatatctgaaagtgcaaaggatttagtgaggaaaatgcttgtcagggatcccaagaaaaggttaactgcccaccaagtattatgtcatccatgggttcaagtcgacggtgtggctccagacaagcctttggattctgctgttctgagccgtatgaagcagttttctgcaatgaacaagttcaagaaaatggctcttagagtcattgctgagagcttatctgaagaagaaatcgccggcttgaaagaaatgtttaatatgatagatgcggacaagagtggtcagataactttcgaagaactgaaagcaggactaaaacgagtaggggcgaatctcaaagagtctgaaattctcgacttgatgcaagctgctgatgtggacaacagcggaacaatagattacaaagagttcatagctgcaacattacatctaaacaaaatagagagagaggaccatttgtttgcagcctttacatactttgacaaagatgggagcggctatatcaccccagacgagcttcaacaagcttgtgaggagtttggtgttgaggatgtccgcatagaagaactgatgcgcgatgttgatcaagacaatgacgggcgaatagactacaacgagtttgtggcgatgatgcagaaaggaagcatcacaggaggacctgtgaaaatgggtctagagaaaagctttagcattgctcttaaactctag

SEQ ID NO: 4689 - protein, 610 aa, Arabidopsis thaliana
MGNTCVGPSRNGFLQSVSAAMWRPRDGDDSASMSNGDIASEAVSGELRSRLSDEVQNKPPEQVTMPKPGTDVETKDREIRTESKPETLEEISLESKPETKQETKSETKPESKPDPPAKPKKPKHMKRVSSAGLRTESVLQRKTENFKEFYSLGRKLGQGQFGTTFLCVEKTTGKEFACKSIAKRKLLTDEDVEDVRREIQIMHHLAGHPNVISIKGAYEDVVAVHLVMECCAGGELFDRIIQRGHYTERKAAELTRTIVGVVEACHSLGVMHRDLKPENFLFVSKHEDSLLKTIDFGLSMFFKPDDVFTDVVGSPYYVAPEVLRKRYGPEADVWSAGVIVYILLSGVPPFWAETEQGIFEQVLHGDLDFSSDPWPSISESAKDLVRKMLVRDPKKRLTAHQVLCHPWVQVDGVAPDKPLDSAVLSRMKQFSAMNKFKKMALRVIAESLSEEEIAGLKEMFNMIDADKSGQITFEELKAGLKRVGANLKESEILDLMQAADVDNSGTIDYKEFIAATLHLNKIEREDHLFAAFTYFDKDGSGYITPDELQQACEEFGVEDVRIEELMRDVDQDNDGRIDYNEFVAMMQKGSITGGPVKMGLEKSFSIALKL

SEQ ID NO: 4690 - DNA, 1542 bp, Zea mays
  CDS (1)..(1542)
atggttatggctattctaaccaggcaaagccggcgcaagcacctccgagtttacaaccctcctcagcaggcggccgaggtgaggtacacaccatcggcgacgaactcttcggcagtcccacccgtggctgtgccgccgaagccaacggcggacacgattcttggcaagcagtacgaggacgtgcgctctgtctactccttcgggaaggagcttggccggggccagttcggggtgacatacctctgcacagagattgcctctgggaggcagtacgcctgcaagtccatctccaagcgcaagctcgtcagcaaggcagacagggaggacattcgaagggagatccagatcatgcagcacctgtctgggcagccaaacattgtcgagttccggggagcatacgaggacaagagcaatgtccatgtggtgatggagctctgcgcaggtggggagctcttcgatcgcatcattgcaaaggggcactacacagaacgtgcggctgctacaatctgcagagcagttgtgaatgttgtcaacatttgccacttcatgggtgtgatgcatcgtgatctgaaacccgagaacttcttgcttgcgaccatggaggagaatgcaatgctcaaggccactgattttgggctttctgtcttcattgaagaaggaaagatgtacagggacattgttggaagtgcttactatgttgctcctgaagtccttaggcggagctatggaaaagagatagatgtttggagtgcaggtgttattttgtacattcttctcagtggcgtgcctccattttgggctgaaattgaaaaggggatatttgatgctattctgcatgaggagattgactttgaaagtcaaccttggccatcaatttctgagagtgctaaagacttggtgagaaagatgttgacacgagatccaaagaaaagactgacttcagcccaagttcttcaacatcagtggctcagagaaggtggggaggcatctgataagcctatcgacagtgctgttctatctagaatgaagcaattcagagcaatgaataagctgaaaaagatggccctaaaggttattgcttcaaaccttaacgaggaagagatcaaggggctaaagcaaatgttcatgaacatggacacagacaatagtggcacaatcacatacgaagaactcaaagcaggattagccaaacttggatcaaagctgtcagaagctgaagtaaagcagttgatggaggctgctgatgttgatgggaatggatctattgactatgtggagttcatcactgccacaatgcatagacacaagctcgaaagggacgagcatttgttcaaggcattccagtactttgacaaagataacagcggcttcatcacaagggatgaactggaatctgctttgattgagcatgagatgggcgacacgagtacaataagggagatcatatcagaagttgacacagataatgatgggaggattaactatgaggagttttgtgcaatgatgagaggagggatgcagcagccaatgaggctcaagtag

SEQ ID NO: 4691 - protein, 513 aa, Zea mays
MVMAILTRQSRRKHLRVYNPPQQAAEVRYTPSATNSSAVPPVAVPPKPTADTILGKQYEDVRSVYSFGKELGRGQFGVTYLCTEIASGRQYACKSISKRKLVSKADREDIRREIQIMQHLSGQPNIVEFRGAYEDKSNVHVVMELCAGGELFDRIIAKGHYTERAAATICRAVVNVVNICHFMGVMHRDLKPENFLLATMEENAMLKATDFGLSVFIEEGKMYRDIVGSAYYVAPEVLRRSYGKEIDVWSAGVILYILLSGVPPFWAEIEKGIFDAILHEEIDFESQPWPSISESAKDLVRKMLTRDPKKRLTSAQVLQHQWLREGGEASDKPIDSAVLSRMKQFRAMNKLKKMALKVIASNLNEEEIKGLKQMFMNMDTDNSGTITYEELKAGLAKLGSKLSEAEVKQLMEAADVDGNGSIDYVEFITATMHRHKLERDEHLFKAFQYFDKDNSGFITRDELESALIEHEMGDTSTIREIISEVDTDNDGRINYEEFCAMMRGGMQQPMRLK

SEQ ID NO: 4692 - DNA, 1599 bp, Daucus carota; identical to SEQ ID NO: 2077
  CDS (1)..(1599)

SEQ ID NO: 4693 - protein, 532 aa, Daucus carota; identical to SEQ ID NO: 2078

SEQ ID NO: 4694 - DNA, 1527 bp, Glycine max
  CDS (1)..(1527)
atggctgcgaaatctagttcgagttcgacaacaacaaacgtggtgactctgaaggcggcgtgggttctcccgcagcgcacgcagaacatccgtgaggtgtacgaggttgggcggaagctcgggcagggccaattcgggaccaccttcgagtgcacgcgccgtgcgagtggtgggaagttcgcgtgcaagtcgattccgaagcggaagctgctgtgcaaggaggactacgaggacgtgtggcgggagattcagataatgcaccacttgtcggaacacgccaacgttgtccgcatcgaagggacgtacgaggattccacggccgtgcacctggtcatggagttgtgcgagggtggagagttgtttgacaggatcgtgcagaagggacactacagcgagagacaggcggcgaggttgataaagacgattgttgaggttgttgaggcgtgtcactcgctaggggtcatgcatagggaccttaagcctgagaatttcttgtttgataccattgatgaggatgctaagcttaaggccaccgatttcggcttgtctgttttttacaagcctggtgaatccttttgtgatgttgtcgggagcccatactatgtcgcaccagaggtcttgcgcaagctctatggacctgaatcagatgtttggagtgcaggggttattctgtacatcttattaagtggggtgccaccattttgggccgaatctgaaccggggatcttccgacagattttactaggaaaacttgattttcattctgagccttggcctagcatttcagacagtgccaaggatctaattcggaaaatgcttgatcaaaatccaaaaacaaggcttacagcacatgaagtactccgccacccatggattgttgatgacaacattgcacctgataaacctcttgattctgcagttttatcacgtctgaaacaattctctgccatgaataaattgaaaaagatggcattgcgtgttattgctgagaggctatctgaagaagaaattggtggactgaaagagttattcaagatgattgacacagacaacagtggaaccataacgtttgatgagttaaaagatggtttgaagcgagtaggatctgaacttatggagtctgaaatcaaggatcttatggatgctgcggatattgataaaagtgggacaattgattatggtgaattcattgctgccactgttcatttaaataagctggagagagaggaaaacctagtgtcggccttctcctattttgacaaagatggcagtggttacataacccttgatgagatacaacaagcttgtaaggactttggtttagatgatatccatattgacgacatgatcaaggaaattgatcaagataacgatgggcaaatagattatggggaatttgctgccatgatgagaaagggcaatggaggaattggaaggcgaactatgagaaaaacactaaatttaagagatgctcttggattagtagacaatgggtccaatcaagttattgagggctactttaagtaa

SEQ ID NO: 4695 - protein, 508 aa, Glycine max; identical to SEQ ID NO: 2258

SEQ ID NO: 4696 - DNA, 1809 bp, Daucus carota
  CDS (1)..(1809)
atggggatttgtgtttccaaaccctcccctgaacctgatttacacaatcaccacacctctattccggtcaacgacacttctcttccaccccaggataactcaattccccccaaggatattgctattccagctcaggataataacaaaccgcctgggaagaaatctccatttttaccgttttacagtcccagtccggcgcattttctgttctcgaagaagtcgccggcggttggatctccggcggccggaagctccaattcgacgccgaagcggctgtttccgtttccgccgccgtcgccggcgaagcacattaaggctgcttgggcgaggcggcatggctcggtgaagcctaatgaggcggcgataccggagaacaatgaggtggatggcggtgccggattggataagagtttcgggttttcgaagaagtttgggagtaagtttgaggttggggaggaagttgggagagggcattttgggtatacttgtagagctaagtttaagaaaggggagtttaaggggcaggatgttgctgttaaggtcattccgaaagctaagatgaccacggccatagccattgaagatgtcagaagggaagtgaaaattttaagagctttgacaggacataacaatcttgtacagttttatgatgcattcgaagatcatactaatgtctacgttgtgatggagttatgtgaaggaggtgagcttttggatagaattctttcaagaggtggaaaatacacagaagatgatgccaaggccgttatgatacaaatattaaatgtcgttgcattttgccatctacagggtgtggtgcaccgagatcttaagccagagaatttcttgtttaaatcaaaggatgaggactcacaactgaaggctattgattttggattatcagattatgtgaagccagatgaaaggctaaatgatattgttggcagcgcatactatgtggctccagaagttttacatagatcttacagtactgaggctgatgtctggagtatcggtgtgatatcatatatcctattatgtggcagccgtccattttgggctcgaactgagtctgggatctttcgagctgttctaaaagctaatcttagttttgatgaaccaccctggccttctgtatcttctgaggctaaagattttgtcaagcgtctattaaataaagatccaagaaaaagaatgaccgctgctcaagccctgtgccattcatggatcaagaatagtaatgatataaagtttccactggacatactggtatttaaactcatgaaagtttatatgcgttcatctcctcttcgaaaagcggctttacgggctttatctaagacattgacagttgatgagctcttctatttgaaggagcaatttgtgttgttggaaccaactaagaacggaactataagcttggaaaacatcaaacaggccttgatgagaaattcaacggatgccatgaaggattctcgtgtgcttgatcttttagtgtcgctcaatgcacttcaatatagaaggatggattttgaggaattctgtgcagcagctttgagtgttcatcagctggaggcacttgaccgatgggagcaacatgctcgttgcgcctatgatctatttgagaaagatggcaatagggcgattatgattgaggagctggcttctgagctcggccttggcccatctatccctgttcatgcagtactgcatgactggatcaggcacacagatggaaagctaagttttcttggttatgtgaaactgttgcacggcgtgtctactcgagccatagccaaagctcaataa

SEQ ID NO: 4697 - protein, 602 aa, Daucus carota
MGICVSKPSPEPDLHNHHTSIPVNDTSLPPQDNSIPPKDIAIPAQDNNKPPGKKSPFLPFYSPSPAHFLFSKKSPAVGSPAAGSSNSTPKRLFPFPPPSPAKHIKAAWARRHGSVKPNEAAIPENNEVDGGAGLDKSFGFSKKFGSKFEVGEEVGRGHFGYTCRAKFKKGEFKGQDVAVKVIPKAKMTTAIAIEDVRREVKILRALTGHNNLVQFYDAFEDHTNVYVVMELCEGGELLDRILSRGGKYTEDDAKAVMIQILNVVAFCHLQGVVHRDLKPENFLFKSKDEDSQLKAIDFGLSDYVKPDERLNDIVGSAYYVAPEVLHRSYSTEADVWSIGVISYILLCGSRPFWARTESGIFRAVLKANLSFDEPPWPSVSSEAKDFVKRLLNKDPRKRMTAAQALCHSWIKNSNDIKFPLDILVFKLMKVYMRSSPLRKAALRALSKTLTVDELFYLKEQFVLLEPTKNGTISLENIKQALMRNSTDAMKDSRVLDLLVSLNALQYRRMDFEEFCAAALSVHQLEALDRWEQHARCAYDLFEKDGNRAIMIEELASELGLGPSIPVHAVLHDWIRHTDGKLSFLGYVKLLHGVSTRAIAKAQ

SEQ ID NO: 4698 - DNA, 1557 bp, Oryza sativa
  CDS (1)..(1557)
atgggcaaccgcacgtcgcgccaccaccgcgccgctcccgagcagccgccgccccagcccaagccgaagcctcagccgcagcagcagcagcagcagtggccgaggccgcagcagccgaccccgccgccggcggcggcgccggacgcggcgatggggagggtgctggggcggccgatggaggacgtccgcgcgacctacaccttcgggcgcgagctcgggcggggccagttcggggtcacctacctcgtcacccacaaggccacggggaagcgcttcgcctgcaagtccatcgccacgcggaagctcgcccaccgcgacgacatcgaggacgtgcgccgggaggtgcagatcatgcaccacctcacgggccaccgcaacatcgtcgagctccggggcgcctacgaggaccgccactcggtcaacctcatcatggagctctgcgagggcggggagctcttcgaccgcatcatcgccagggggcactactccgagcgcgccgccgccgcgctctgccgcgagatcgtcgccgtcgtgcacagctgccactccatgggggtcttccaccgggatctcaagccggagaactttttgttcctcagtaaaagcgaggactcgccgctcaaggccactgacttcggtctttccgttttcttcaagcctggggagcattttaaggaccttgttggaagtgcgtattatgttgcacctgaggtgctgaaacgaaactatggagcagaggctgacatatggagtgctggcgttattctttacatccttctttctggtgttccacctttttgggcagagagtgaagatggtatatttgatgccgtattacgtggtcacattgatttctcgtctgaaccttggccttcgatatccaatggtgcaaaagatttggttaagaagatgttgcggcaagacccaaaagagcgccttacttctgctgaaattttgaaccacccatggattagagaggatggagaagccccagacaagccacttgacattacagttatcagcaggatgaagcagttcagggcaatgaacaagcttaagaaagttgcattgaaggttgttgcagagaacttgtcagatgaagagattacaggcttaaaagaaatgttcagatccttggatactgataacagtgggacaataactcttgaggagctaagatctggtttaccaaaacttggcaccaaaatttctgaatcagaaattagacagctgatggaggcggctgatgttgatggaaatggaaccattgactatgctgagttcatatcagcgacaatgcacatgaacagattggagaaggaagaccacatacttaaagcatttgagtattttgataaggaccacagcggatacataacagtagatgagttggaagaagctctgaagaagtatgatatgggggacgataaaacgattaaggaaatcatcgctgaagtagatactgatcatgatggaagaattaactaccaggagtttgtcgccatgatgaggaacaacaaccctgagattgctcccaaccggcggcgcatgttctaa

SEQ ID NO: 4699 - protein, 518 aa, Oryza sativa
MGNRTSRHHRAAPEQPPPQPKPKPQPQQQQQQWPRPQQPTPPPAAAPDAAMGRVLGRPMEDVRATYTFGRELGRGQFGVTYLVTHKATGKRFACKSIATRKLAHRDDIEDVRREVQIMHHLTGHRNIVELRGAYEDRHSVNLIMELCEGGELFDRIIARGHYSERAAAALCREIVAVVHSCHSMGVFHRDLKPENFLFLSKSEDSPLKATDFGLSVFFKPGEHFKDLVGSAYYVAPEVLKRNYGAEADIWSAGVILYILLSGVPPFWAESEDGIFDAVLRGHIDFSSEPWPSISNGAKDLVKKMLRQDPKERLTSAEILNHPWIREDGEAPDKPLDITVISRMKQFRAMNKLKKVALKVVAENLSDEEITGLKEMFRSLDTDNSGTITLEELRSGLPKLGTKISESEIRQLMEAADVDGNGTIDYAEFISATMHMNRLEKEDHILKAFEYFDKDHSGYITVDELEEALKKYDMGDDKTIKEIIAEVDTDHDGRINYQEFVAMMRNNNPEIAPNRRRMF

SEQ ID NO: 4700 - DNA, 1548 bp, Oryza sativa
  CDS (1)..(1548)
atgggcaactgctgtcctggctctggggatgcggagcccgcctcctccgacgcctccaccggcaacggctcgtcctccttcaaggccggcgcgtcgccgtcgtcggcgcccgcgcagaacaagccgccggcgcccatcgggcccgtgctcggccgccccatggaggacgtccggagcatctacaccatcggcaaggagctcgggcgcgggcagttcggcgtcacctccctgtgcacccacaaggcgacggggcagaagttcgcgtgcaagaccatcgccaagcggaagctgtccaccaaggaggacgtggaggacgtgcggcgggaggtgcagatcatgtaccacctcgccgggcagcccaacgtggtggagctcaagggcgcctacgaggacaagcagtccgtccacctcgtcatggagctctgcgccggcggcgagctcttcgaccggatcatcgccaagggccactacaccgagcgcgccgccgcctcgctcctccgcaccatcgtcgagatcatccacacctgccactccctcggcgtcatccaccgcgacctcaagcccgagaacttcctcctcctcagcaaggacgaggacgcccctctcaaggccaccgacttcggcctctccgtcttcttcaagcaaggagaggtgttcaaggacatcgtcggcagcgcgtactacatcgcgccggaggtgctgaagcggagctacggccccgaggcggacatctggagcgtcggcgtcatcctctacatcctcctctgcggtgttcctccattctgggctgaatcggagcatggcatcttcaattccatcctgagagggcaggtggacttcaccagtgacccatggccacgcatttcagctagcgccaaggaccttgtcaggaagatgctcaactccgaccccaagaagagaatttcagcctacgaagtcctcaatcacccgtggatcaaggaagatggagaagcacctgacacgccgcttgacaacgctgtcatgaacaggctcaagcagttcagggctatgaaccaattcaagaaagcagcgctaagggtcattgctggatgcttgtcggaggaagagatcagagggctgaaggagatgttcaagagcatggactctgacaacagcggcaccattaccgtcgatgagctgcgcaaagggctgtccaagcaagggaccaagctcacggaggccgaagtgcagcagctaatggaggctgccgacgcggacgggaacggaaccatcgattacgacgagttcatcacagcgacgatgcacatgaacaggatggacagagaggagcatctttacaccgcgtttcagtatttcgacaaggacaacagcggctgcatttcgaaggaggagctcgagcaagcgctgagggagaaaggtcttctcgatggcagagacatcaaagacatcatatcagaagtcgacgccgataacgatggaaggatagactacagcgagttcgcggcgatgatgcggaagggaaacccggaggccaatcccaagaagcgacgggacgttgtgatatag

SEQ ID NO: 4701 - protein, 515 aa, Oryza sativa
MGNCCPGSGDAEPASSDASTGNGSSSFKAGASPSSAPAQNKPPAPIGPVLGRPMEDVRSIYTIGKELGRGQFGVTSLCTHKATGQKFACKTIAKRKLSTKEDVEDVRREVQIMYHLAGQPNVVELKGAYEDKQSVHLVMELCAGGELFDRIIAKGHYTERAAASLLRTIVEIIHTCHSLGVIHRDLKPENFLLLSKDEDAPLKATDFGLSVFFKQGEVFKDIVGSAYYIAPEVLKRSYGPEADIWSVGVILYILLCGVPPFWAESEHGIFNSILRGQVDFTSDPWPRISASAKDLVRKMLNSDPKKRISAYEVLNHPWIKEDGEAPDTPLDNAVMNRLKQFRAMNQFKKAALRVIAGCLSEEEIRGLKEMFKSMDSDNSGTITVDELRKGLSKQGTKLTEAEVQQLMEAADADGNGTIDYDEFITATMHMNRMDREEHLYTAFQYFDKDNSGCISKEELEQALREKGLLDGRDIKDIISEVDADNDGRIDYSEFAAMMRKGNPEANPKKRRDVVI

SEQ ID NO: 4702 - DNA, 1569 bp, Oryza sativa
  CDS (1)..(1569)
atgggcgcgtgcttctcatcccacactgcgaccgccgccgccgatggcgggagcgggaagcggcagcagcggaagggggatcacaaggggaagctccccgatggcggcggcggcgagaaggagaaggaggcggcgcgggtggagttcgggtacgagagggacttcgaggggaggtaccaggtcgggaggctgctcggccacggccagttcggctacaccttcgccgccaccgaccgggcctccggtgaccgcgtcgccgtcaagcgcatcgacaaggccaagatggttcgccctgttgctgtggaggatgtaaagagagaagtgaagattcttaaagaacttaaaggccatgagaatattgttcacttctacaatgcgtttgaagatgactcatatgtatatattgtgatggaactatgtgagggtggtgaactattggaccggattttggcaaaaaagaacagccgttatagtgagaaagatgctgcagtggtggtgcggcagatgctcaaagtggcagctgagtgccatctgcatgggctagttcaccgagatatgaagcccgagaacttccttttcaaatcaaccaaggaggactcacctttaaaggcaacagattttggtctgtcagacttcataaaaccagggaaaaagtttcacgatatagttggcagtgcctattatgtagcaccagaagttttaaaacgacggtctggccctgagtcagatgtttggagcataggagtcataacttatattttgctctgtgggagacgccctttttggaataagacagaggatggcatattcagagaggtactaagaaacaagcctgattttcgtaagaagccttggccaggcatcagttcaggtgctaaagatttcgttaaaaagttacttgtaaagaacccaagggcaagattaaccgctgctcaagctctctcgcatccatgggtaagagaaggaggagaagcatctgagatccctgttgatatatctgtattgtccaacatgcgtcagtttgtcaagtacagccgttttaagcaatttgctctgagggctttagcaagtacactaaaagaggaagaactagcagatctgaaggaccagttcgatgcaattgatgttgataaaagtggatcaattagtattgaggaaatgcggcatgcccttgcaaaggatcttccttggagattgaagggcccccgtgttctcgagattatccaagcaatcgacagcaacactgatggtcttgtggactttgaagagtttgtagcagcaaccctccatatacatcaaatggctgagcttgactctgaaaggtggggcctacgctgccaggctgctttcagcaaatttgatctggatggtgacggatacatcactccagatgaactcagaatggtgcagcacactggcttgaagggttccatcgagccattgctggaggaggccgacatcgacaaagacgggagaataagcttgtcggagttccgcaagctcctgcggacagcgagcatgagcaaccttcccagtccaagaggacctccaaatccacaacccctgtga

SEQ ID NO: 4703 - protein, 522 aa, Oryza sativa
MGACFSSHTATAAADGGSGKRQQRKGDHKGKLPDGGGGEKEKEAARVEFGYERDFEGRYQVGRLLGHGQFGYTFAATDRASGDRVAVKRIDKAKMVRPVAVEDVKREVKILKELKGHENIVHFYNAFEDDSYVYIVMELCEGGELLDRILAKKNSRYSEKDAAVVVRQMLKVAAECHLHGLVHRDMKPENFLFKSTKEDSPLKATDFGLSDFIKPGKKFHDIVGSAYYVAPEVLKRRSGPESDVWSIGVITYILLCGRRPFWNKTEDGIFREVLRNKPDFRKKPWPGISSGAKDFVKKLLVKNPRARLTAAQALSHPWVREGGEASEIPVDISVLSNMRQFVKYSRFKQFALRALASTLKEEELADLKDQFDAIDVDKSGSISIEEMRHALAKDLPWRLKGPRVLEIIQAIDSNTDGLVDFEEFVAATLHIHQMAELDSERWGLRCQAAFSKFDLDGDGYITPDELRMVQHTGLKGSIEPLLEEADIDKDGRISLSEFRKLLRTASMSNLPSPRGPPNPQPL

SEQ ID NO: 4704 - DNA, 1650 bp, Oryza sativa
  CDS (1)..(1650)
atggggaacacgtgcggcgtcacgcttagatccaagtacttcgccagcttccgcggcgcgtcgcagcggcatgatgaggcggggtacgcgcccgtcgccaccagcgccgccgccgccgccgccgccgatgagccggccgggaagaaggccccgcgcggttctgcggcggcggcggacgcgccgcacgccgcgtccatgaagcgcggggcgcccgcgcccgcggagctgacggccaacgtgctcgggcacccgaccccgagcctgagcgagcactacgcgctcgggcgcaagctcgggcaggggcagttcggcaccacctacctctgcaccgacctcgccaccggggtggactacgcctgcaagtccatagccaagcggaagctcatcaccaaggaggacgtcgaggacgtccgccgcgagatccagatcatgcaccacctcgcgggccaccggaacgtcgtcgccatcaagggcgcctacgaggacccgcagtacgttcacattgtgatggagctctgcgccgggggcgagctgttcgaccgcatcatcgagcgcgggcaattcagcgagcgcaaagcggccgagctcacgcgaatcatcgttggtgtcatcgaggcgtgccactcgctcggggttatccatagggatctcaagcccgagaacttcttgctggcgaataaagacgacgatttgtcgctcaaggccatcgatttcggcttgtctgtgttcttcaagcctggtcaagtttttactgatgttgttggaagcccatactacgtggccccagaagtgttgcgtaaatgctacggaccagaagctgatgtttggacagctggtgtgattctttacatactattaagtggtgtaccgccattttgggcagagacgcagcaagggatatttgatgcagtgttaaaaggtgtaattgattttgattccgatccctggcctgtgatttctgatagtgcaaaggatcttataagaagaatgttgaatcctcgccccaaggagcgcctaacagctcatgaagttttatgtcatccgtggatttgtgaccatggagtcgctcctgatcgacctcttgatcctgctgtactttctcgcattaagcagttttcagcaatgaataagttaaagaagatggctttgcgagtaattgctgaaagcctttcagaggaggagattgcaggattgaaggaaatgttcaaggcaatggacacagataatagtggtgcaattacatatgatgaactcaaagaaggcatgagaaaatatggctcaacactaaaggatactgagattcgtgatcttatggaggcggcggatgtggacaacagtggaaccattgattatatagaattcattgctgctactctgcatctcaataaactagagcgagaggaacatctagtggcagccttttcttatttcgacaaagatggcagtggttatattacggtggatgagcttcagcaagcttgcaaagagcataacatgccagatgcttttctcgatgacgtcattaaagaagctgatcaggataatgatggtcgcattgactacggggaattcgttgccatgatgacaaagggcaatatgggtgttgggaggagaacaatgagaaacagcttgaatataagcatgagatga

SEQ ID NO: 4705 - protein, 549 aa, Oryza sativa
MGNTCGVTLRSKYFASFRGASQRHDEAGYAPVATSAAAAAAADEPAGKKAPRGSAAAADAPHAASMKRGAPAPAELTANVLGHPTPSLSEHYALGRKLGQGQFGTTYLCTDLATGVDYACKSIAKRKLITKEDVEDVRREIQIMHHLAGHRNVVAIKGAYEDPQYVHIVMELCAGGELFDRIIERGQFSERKAAELTRIIVGVIEACHSLGVIHRDLKPENFLLANKDDDLSLKAIDFGLSVFFKPGQVFTDVVGSPYYVAPEVLRKCYGPEADVWTAGVILYILLSGVPPFWAETQQGIFDAVLKGVIDFDSDPWPVISDSAKDLIRRMLNPRPKERLTAHEVLCHPWICDHGVAPDRPLDPAVLSRIKQFSAMNKLKKMALRVIAESLSEEEIAGLKEMFKAMDTDNSGAITYDELKEGMRKYGSTLKDTEIRDLMEAADVDNSGTIDYIEFIAATLHLNKLEREEHLVAAFSYFDKDGSGYITVDELQQACKEHNMPDAFLDDVIKEADQDNDGRIDYGEFVAMMTKGNMGVGRRTMRNSLNISMR

SEQ ID NO: 4706 - DNA, 1638 bp, Oryza sativa
  CDS (1)..(1638)
atgggcaactactactcgtgcggcgcctcgtccacgtccagcccgacctcaccgtccttggtcgactactactactgctatcatcggtatccaagcagttgcagtagtacaagcacagcaacaagtagcggggggaggatgccgatccgcagccaccagcagaggctgtcgtccccgacggcggtgctggggcacgagacgccggcgctgcgggaggtgtacacggtggggcggaagctggggcaggggcagttcgggacgacgtacctgtgcacgcaggtgtcgacgggggcggagtacgcgtgcaagtcgatcgcgaagaggaagctgctgagcccggaggacgtggaggacgtgcggcgggagatacagataatgcaccacctggcggggcacgggagcgtggtgaccatccagggcgcgtacgaggacaacctgtacgtgcacatcgtgatggagctgtgcgagggcggggagctgttcgaccgcatcgtggagcgcggctacttctcggagcgcaaggccgcggagatcacgcgcgtcatcgtcggggtggtggaggcgtgccactccctgggcgtcatgcaccgcgacctcaagcccgagaacttcctcctcaaggaatcctcctcctcctcctcgctcaaggccatcgacttcggcctctccgtcttcttcaagcccgggcaggtgttcagcgacgtggtggggagcccctactacgtggcgccggaggtgctgtgcaagcactacggccccgaggcggacgtgtggacggcgggcgtcatcgtctacatcctcctcagcggggtgccccccttctgggcggagacgcagcagggcatcttcgacgccgtcctccggggatccctcgacttcgactccgacccatggcccaccatctccgacagcgccaaggacctcatccgccgcatgctccgctccccgcccagggaacgcctcaccgcccaccaggtgctttgccacccctgggtctgcgacgacggcgtcgcccccgaccgccccctcgcccccgccgtcctctcccgcctcaagcagttctccgccatgaacaggctcaagaagatggcgctgcgtgtcatcgcccggaacctctccgaggaggagctcgctggcctcaaggagatgttcaaggccatggacaccgacgccagcggcgccatcaccttcgacgagctcaaggaaggactccgcagatacggctccaacctcagggaggctgagatcagggatctcatggacgccgccgacgttgacaaaagcggcaccatcgactacgacgagttcatcgccgccaccgtccacctcaacaagctggagcgcgaggagcacctgctcgccgccttcgcctacttcgaccgcgacggcagcggctacatcaccgtcgacgagctcgagcacgcctgcagggaccacaacatggccgacgttggcatcgacgacatcatccgcgaagtcgaccaagacaacgacggccgcatcgactacggcgagttcgtcgcaatgatgaagaagggcgctatcgatatcatcggcaacggaaggctcaccattggaaggccaactacggctacttccgacgatccttctccaacaatctcttcttcctctagatga

SEQ ID NO: 4707 - protein, 545 aa, Oryza sativa
MGNYYSCGASSTSSPTSPSLVDYYYCYHRYPSSCSSTSTATSSGGRMPIRSHQQRLSSPTAVLGHETPALREVYTVGRKLGQGQFGTTYLCTQVSTGAEYACKSIAKRKLLSPEDVEDVRREIQIMHHLAGHGSVVTIQGAYEDNLYVHIVMELCEGGELFDRIVERGYFSERKAAEITRVIVGVVEACHSLGVMHRDLKPENFLLKESSSSSSLKAIDFGLSVFFKPGQVFSDVVGSPYYVAPEVLCKHYGPEADVWTAGVIVYILLSGVPPFWAETQQGIFDAVLRGSLDFDSDPWPTISDSAKDLIRRMLRSPPRERLTAHQVLCHPWVCDDGVAPDRPLAPAVLSRLKQFSAMNRLKKMALRVIARNLSEEELAGLKEMFKAMDTDASGAITFDELKEGLRRYGSNLREAEIRDLMDAADVDKSGTIDYDEFIAATVHLNKLEREEHLLAAFAYFDRDGSGYITVDELEHACRDHNMADVGIDDIIREVDQDNDGRIDYGEFVAMMKKGAIDIIGNGRLTIGRPTTATSDDPSPTISSSSR

SEQ ID NO: 4708 - DNA, 1695 bp, Oryza sativa
  CDS (1)..(1695)
atggggaatcagtgccagaacgggactcttgggagtgattaccacaatcggttcccaagggagcatgccgttgggtacgttcagggggatagctacttggacttgaagaagttcgatgatacttggcctgaggtgaacaacttcaagcctactgctgctagtattctcaggcgggggttggatcctacatctatcaatgtccttgggcggaagacagcggacctaagggagcattatatcattggtcggaagcttggtcagggccagtttggcacaacttacctctgtaccgagatcaatacagggtgtgagtatgcttgcaagaccatcccaaagcgcaagctcatcaccaaggaggatgtagaagatgtgcgccgtgagattcagataatgcaccatttgtcgggccacaagaatgttgttgcaatcaaggatgtctatgaggatgggcaagcggtgcacattgtgatggagctctgcgctggtggggagctctttgacaggattcaggagaaggggcattacagcgagcggaaggctgcagagcttataagaataattgtcagcattgtggctatgtgccattcgctcggggtgatgcaccgtgatcttaagccagaaaatttcctccttttggataaagatgatgatctgtcaataaaggcaatagattttggtctatccgtgttcttcaaaccaggtcaggttttcactgagctggttgggagtccatattatgttgctcctgaggtattgcacaaacgttatggaccagaatctgatgtgtggtcagctggagtgatactttacgttttgctgagtggagtgccaccattttgggcagagacacaacaaggaatatttgatgcagttctgaagggtcacattgattttcaatctgatccatggccaaagatatctgacagtgcaaaggatcttataagaaaaatgctctctcattgcccttcggagcgtttgaaggcccatgaagtgctaaggcatccttggatctgtgaaaatggagttgccactgatcaagctctggatcccagtgttatctctcggctcaaacaattctctgcaatgaacaagttaaagaagttggctctgagagtgatagctgagcgtctttcagaggaggagattgctgggttaagagaaatgttcaaggcagtggacacaaaaaatagaggtgtaatcactttcggtgagcttagagaaggtttaagaagatttggcgctgaatttaaggatacagagattggtgatataatggaagcggcacacaacgacaataatgtaacaatccattatgaagaatttattgctgcaactctacctcttaacaagatagaacgtgaggagcacctgctggcagcttttacatattttgacaaagatgggagtggttatatcacagttgacaagcttcaacgagcttgtggagaacataacatggaggattcactccttgaagagattatttcagaggttgatcaaaacaatgacggccaaattgactacgccgaatttgtagccatgatgcaaggcagcaacgttggactagggtggcaaacaatggaaagcagtttgaatgtgcattcgctttgttggttgttctttcaacgacctgtattacgcaatgaaagtcgtcatgtttgcgtaactctaatctcaatgcttgcgttcctataa

SEQ ID NO: 4709 - protein, 564 aa, Oryza sativa
MGNQCQNGTLGSDYHNRFPREHAVGYVQGDSYLDLKKFDDTWPEVNNFKPTAASILRRGLDPTSINVLGRKTADLREHYIIGRKLGQGQFGTTYLCTEINTGCEYACKTIPKRKLITKEDVEDVRREIQIMHHLSGHKNVVAIKDVYEDGQAVHIVMELCAGGELFDRIQEKGHYSERKAAELIRIIVSIVAMCHSLGVMHRDLKPENFLLLDKDDDLSIKAIDFGLSVFFKPGQVFTELVGSPYYVAPEVLHKRYGPESDVWSAGVILYVLLSGVPPFWAETQQGIFDAVLKGHIDFQSDPWPKISDSAKDLIRKMLSHCPSERLKAHEVLRHPWICENGVATDQALDPSVISRLKQFSAMNKLKKLALRVIAERLSEEEIAGLREMFKAVDTKNRGVITFGELREGLRRFGAEFKDTEIGDIMEAAHNDNNVTIHYEEFIAATLPLNKIEREEHLLAAFTYFDKDGSGYITVDKLQRACGEHNMEDSLLEEIISEVDQNNDGQIDYAEFVAMMQGSNVGLGWQTMESSLNVHSLCWLFFQRPVLRNESRHVCVTLISMLAFL

SEQ ID NO: 4710 - DNA, 1629 bp, Oryza sativa
  CDS (1)..(1629)
atggggaatcagtgccagaacgggactcttgggagtgattaccacaatcggttcccaagggagcatgccgttgggtacgttcagggggatagctacttggacttgaagaagttcgatgatacttggcctgaggtgaacaacttcaagcctactgctgctagtattctcaggcgggggttggatcctacatctatcaatgtccttgggcggaagacagcggacctaagggagcattatatcattggtcggaagcttggtcagggccagtttggcacaacttacctctgtaccgagatcaatacagggtgtgagtatgcttgcaagaccatcccaaagcgcaagctcatcaccaaggaggatgtagaagatgtgcgccgtgagattcagataatgcaccatttgtcgggccacaagaatgttgttgcaatcaaggatgtctatgaggatgggcaagcggtgcacattgtgatggagctctgcgctggtggggagctctttgacaggattcaggagaaggggcattacagcgagcggaaggctgcagagcttataagaataattgtcagcattgtggctatgtgccattcgctcggggtgatgcaccgtgatcttaagccagaaaatttcctccttttggataaagatgatgatctgtcaataaaggcaatagattttggtctatccgtgttcttcaaaccaggtcaggttttcactgagctggttgggagtccatattatgttgctcctgaggtattgcacaaacgttatggaccagaatctgatgtgtggtcagctggagtgatactttacgttttgctgagtggagtgccaccattttgggcagagacacaacaaggaatatttgatgcagttctgaagggtcacattgattttcaatctgatccatggccaaagatatctgacagtgcaaaggatcttataagaaaaatgctctctcattgcccttcggagcgtttgaaggcccatgaagtgctaaggcatccttggatctgtgaaaatggagttgccactgatcaagctctggatcccagtgttatctctcggctcaaacaattctctgcaatgaacaagttaaagaagttggctctgagagtgatagctgagcgtctttcagaggaggagattgctgggttaagagaaatgttcaaggcagtggacacaaaaaatagaggtgtaatcactttcggtgagcttagagaaggtttaagaagatttggcgctgaatttaaggatacagagattggtgatataatggaagcggcacacaacgacaataatgtaacaatccattatgaagaatttattgctgcaactctacctcttaacaagatagaacgtgaggagcacctgctggcagcttttacatattttgacaaagatgggagtggttatatcacagttgacaagcttcaacgagcttgtggagaacataacatggaggattcactccttgaagagattatttcagaggttgatcaaaacaatgacggccaaattgactacgccgaatttgtagccatgatgcaaggcagcaacgttggactagggtggcaaacaatggaaagcagtttgaatgtagcattaagagacgcacctcaagtacattga

SEQ ID NO: 4711 - protein, 542 aa, Oryza sativa
MGNQCQNGTLGSDYHNRFPREHAVGYVQGDSYLDLKKFDDTWPEVNNFKPTAASILRRGLDPTSINVLGRKTADLREHYIIGRKLGQGQFGTTYLCTEINTGCEYACKTIPKRKLITKEDVEDVRREIQIMHHLSGHKNVVAIKDVYEDGQAVHIVMELCAGGELFDRIQEKGHYSERKAAELIRIIVSIVAMCHSLGVMHRDLKPENFLLLDKDDDLSIKAIDFGLSVFFKPGQVFTELVGSPYYVAPEVLHKRYGPESDVWSAGVILYVLLSGVPPFWAETQQGIFDAVLKGHIDFQSDPWPKISDSAKDLIRKMLSHCPSERLKAHEVLRHPWICENGVATDQALDPSVISRLKQFSAMNKLKKLALRVIAERLSEEEIAGLREMFKAVDTKNRGVITFGELREGLRRFGAEFKDTEIGDIMEAAHNDNNVTIHYEEFIAATLPLNKIEREEHLLAAFTYFDKDGSGYITVDKLQRACGEHNMEDSLLEEIISEVDQNNDGQIDYAEFVAMMQGSNVGLGWQTMESSLNVALRDAPQVH

SEQ ID NO: 4712 - DNA, 1803 bp, Oryza sativa
  CDS (1)..(1803)
atgggtctctgccatggcaagtcggcggcggtgctggagccaacggtggaggaggaggaggagggggcgacgcgcgtagccgaggccgcggcggcgccggcgaagccagcgtcgcctgcgccttcggcggcggcggcggcggcggcgccggcgaagcccgggacgccgaagcagcacaagttcccgttctacctgccgagcccgctcccggcgtcgagctacaagggctcgccggcgaactcgagcgtggcgtcgacgcccgcgcgcggcgggttcaagcggccgttcccgccgccgtcgccggcgaagcacatccgcgcgctcctggcgcggcgccacggctcggtgaagccgaacgaggcgtccatcccggagtccggcgagcccggcgtggcgctggacaagggcttcggcttctccaggcacttcgccgccaagtacgagctcggccgcgaggttggccgcggccacttcggctacacctgcgccgccacctgcaagaagggcgagctcaagggcgacgacgtcgccgtcaaggtcatccccaaggccaagatgactactgctattgccattgaagatgtcaggagagaagtcagaatattgagttctttggcagggcacagcaacttagtgcagttttatgatgcttatgaggatgaagaaaatgtatatatagttatggagttatgcaaaggaggtgaactgctggacaggattttggctagaggtggaaaatattctgaggaagatgcaaaggttgttatgcgccaaatcctaagtgttgcttcattttgtcatcttcagggtgttgttcatcgggatctgaaaccagagaatttccttttctcgtcaaaggatgagaactctgccatgaaggtcatagacttcggtttgtctgactttgtaaagccagatgagaggcttaatgacattgtcggaagtgcatattatgttgctcctgaagtgctccatcgatcttatggcactgaggcagatatgtggagcattggagtaatagtgtatattttgctttgtggcagccgtcctttctgggcacgtactgagtcaggaatattccgagctgtgctgaaagcagaccctagttttgaggaagccccatggccaaccctctctgctgaagcaaaagactttgtaaggaggctgctcaataaagattaccgcaagaggatgactgctgcacaagccctctgtcatccatggattcgtggtactgaagaagtgaagcttcctttggacatgataatttataggcttatgagggcttacataagttcatcttctttacggagagctgcattgagggcccttgccaagacattgacaacagatcaaatctattacctaagagaacagtttgaattgataggcccaaacaagagcgatcttattactttgcaaaatttgaagacggccttgatgaagaactccacaaatgcaatgaaggattctagggtggttgactttgttaacacaatatccaatattcagtacagaaagttggattttgaggagttttctgctgctgccatcagtgtttaccagatggaaggtttggaaacctgggaacaacatgcccggcaagcgtacgagttctttgataaggagggtaaccgaccaattgtgatcgacgagctcgcatcggaacttggattgggtccttcggttcccctacatgttgttctccaagattggatcagacatcctgatggaaaactcagcttccttgggttcatgaaactattgcatggagtttcttcgcgtaccatcccaaaaacctga

SEQ ID NO: 4713 - protein, 600 aa, Oryza sativa
MGLCHGKSAAVLEPTVEEEEEGATRVAEAAAAPAKPASPAPSAAAAAAAPAKPGTPKQHKFPFYLPSPLPASSYKGSPANSSVASTPARGGFKRPFPPPSPAKHIRALLARRHGSVKPNEASIPESGEPGVALDKGFGFSRHFAAKYELGREVGRGHFGYTCAATCKKGELKGDDVAVKVIPKAKMTTAIAIEDVRREVRILSSLAGHSNLVQFYDAYEDEENVYIVMELCKGGELLDRILARGGKYSEEDAKVVMRQILSVASFCHLQGVVHRDLKPENFLFSSKDENSAMKVIDFGLSDFVKPDERLNDIVGSAYYVAPEVLHRSYGTEADMWSIGVIVYILLCGSRPFWARTESGIFRAVLKADPSFEEAPWPTLSAEAKDFVRRLLNKDYRKRMTAAQALCHPWIRGTEEVKLPLDMIIYRLMRAYISSSSLRRAALRALAKTLTTDQIYYLREQFELIGPNKSDLITLQNLKTALMKNSTNAMKDSRVVDFVNTISNIQYRKLDFEEFSAAAISVYQMEGLETWEQHARQAYEFFDKEGNRPIVIDELASELGLGPSVPLHVVLQDWIRHPDGKLSFLGFMKLLHGVSSRTIPKT

SEQ ID NO: 4714 - DNA, 1725 bp, Oryza sativa
  CDS (1)..(1725)
atgggcaacacgtgctgcgtcgctccggctaccaccgatgaggtgggcgcgccgccgcgagatcatcatcacgcggccaagaagtcgccggcgccgtcggcgacgacgacgacggcgacgaggcagaggcatggccaagaacccaagcccaagcccaagcccagggcgagggcgaagcccaacccgtacgactgggcgccgccgcgggtgctgccggcgaggggcggcgccgccgcgtccgcggtgcgcgtgctggagggcgtggtgccgcaccacccgcggctgcgcgtcacggacaagtaccagctcggccgcgagctggggcgcggcgagttcggggtgacgcacctcgccacggaccgcgcgacgcgggagcggctggcgtgcaagtccatcccgaagcgccgcctccgcaccgccgtggacgtcgccgacgtgcggcgcgaggtggccatcatggcgtcgctcccggaccacccggcgctggtgcgcctccgcgccgcctacgaggacgccgacgcggtgcacctggtgatggagctctgcgacggcggcgagctgttcgaccggatcgtggcgaggggccggtacacggagcgcgccgcggccgccgcggcgcggacggtggcggaggtggtgcgcgcgtgccacgcccacggcgtgatgcaccgcgacctcaagccggagaacttcctctacgccggcaaggccgaggacgcgcagctcaaggccatcgatttcggcctctccgtcttcttccgacctggggagaggttcagggagatcgtggggagcccgtactacatggcgccggaggtgctccggcgagactacggcccggaggtggacatctggtccgccggcgtcatcctctacatcctcctgtgcggcgtcccgccgttctgggccgagacggagcagggcgtggcgcgcgccatcctccgcggcgccgccgacttcgaccgggagccatggccgcgcatctcccgcgccgccaagtccctcgtccgccagatgctcgacgtggacccgcgccgccgccccacggcgcagcaggtgctcgaccacccctggctccaccacgccgcccgcgcccccaacgtccccctcggcgacgtcgtccgcgcccgcctcaagcagttctccctcatgaaccgcctcaagaagaaggccatgcgggtgatcgcggaacacctgtcggtagaggaggtggaggtgatcaaggacatgttcgcgctcatggacaccgacaacaacggcagggtcacgctccaggagctcaaggacggcctcaccaaggtcggctccaagctcgccgagcccgagatggagcttctcatggaggccgcggatgtggatggcaatgggtacctggactacggcgagttcgtggcggtgaccatccacctgcagcgcctctccaacgacaaccacctccgcacggccttcctcttcttcgacaaggacggcagcggctacatcgaccgcgccgagctcgccgacgccctcgccgacgactccggccacgccgacgacgccgtgctcgaccacatccttagagaagtcgacaccgacaaggatgggcggatcagctacgaggagttcgtggcgatgatgaaatccgggacggattggaggaaggcgtcgcggcaatactcgagggagcggttcaagacgctcagcaacagcctcatcaaggacggctcgatcaccatggcgcgctag

SEQ ID NO: 4715 - protein, 574 aa, Oryza sativa
MGNTCCVAPATTDEVGAPPRDHHHAAKKSPAPSATTTTATRQRHGQEPKPKPKPRARAKPNPYDWAPPRVLPARGGAAASAVRVLEGVVPHHPRLRVTDKYQLGRELGRGEFGVTHLATDRATRERLACKSIPKRRLRTAVDVADVRREVAIMASLPDHPALVRLRAAYEDADAVHLVMELCDGGELFDRIVARGRYTERAAAAAARTVAEVVRACHAHGVMHRDLKPENFLYAGKAEDAQLKAIDFGLSVFFRPGERFREIVGSPYYMAPEVLRRDYGPEVDIWSAGVILYILLCGVPPFWAETEQGVARAILRGAADFDREPWPRISRAAKSLVRQMLDVDPRRRPTAQQVLDHPWLHHAARAPNVPLGDVVRARLKQFSLMNRLKKKAMRVIAEHLSVEEVEVIKDMFALMDTDNNGRVTLQELKDGLTKVGSKLAEPEMELLMEAADVDGNGYLDYGEFVAVTIHLQRLSNDNHLRTAFLFFDKDGSGYIDRAELADALADDSGHADDAVLDHILREVDTDKDGRISYEEFVAMMKSGTDWRKASRQYSRERFKTLSNSLIKDGSITMAR

SEQ ID NO: 4716 - DNA, 1800 bp, Oryza sativa
  CDS (1)..(1800)
atggggaacacgtgcgtcggccccagcatcagcaagaacggcttcttccagtccgtctccacggtgctctggaaggcgcgccaggacggcgacgacgcgctgcccggcgccaatggcgcccctgacggcggcggccagggccggttgccggcgccgccgccgccgacttccgacgcgccgctcgccgtccaaaacaagccccccgagcacgtcaagatcgtctcgaccacggacaccgcctccgccgagcaggacgcctccaagtcgagcgccggctcggactccggcgaggccgccaggccgcggccgagggtgccgccggtgaagcgcgtctccagcgccgggctgctcgtcggctcggtgctgaagcgcaagacggagagtctcaaggacaagtacagcctggggcggaagctcgggcaggggcagttcgggacgacgtacctgtgcgtggagcgcgccaccggcaaggagttcgcctgcaagtccatcctgaagcggaagctggtcaccgacgacgacgtcgaggacgtccgccgcgagatccagataatgtaccacctcgccggccaccccaacgtgatctccatcaggggcgcctacgaggacgccgtcgccgtgcacctcgtcatggagctctgcgccggcggcgagctgttcgaccggatcgtccagaaggggcactacaccgagcggaaggcggcggagctcgccagggtcatcgtcggcgtcgtcgaggtgtgccactccatgggcgtgatgcaccgtgatctcaagcccgagaacttcctcttcgccgaccagacggaggaggccgctctcaagaccattgactttggtctctccattttctttcgcccaggtcaagtattcactgatgttgttggtagcccttactatgtcgcgccagaagttctgaaaaagaaatatggtcaagaggcagatgtctggagcgctggtgtgataatttacatcttgttgtgtggtgtgccgccattttgggcagagaacgagcagggtatatttgaagaggttttgcatggtagacttgactttcagtcagaaccatggcctagcatctctgaaggtgccaaagatctcgtaaggagaatgcttgttagggacccgaagaagagattgacagctcatgaagttttaaggcatccatgggtccaggttggtggtttggctcctgacaagcccctggattctgctgttctatctcgtatgaagcaattctcagctatgaataagctgaaaaagatggctcttagggtcattgcagagaacctatctgaagacgaaatcgccggcctgaaagaaatgttcaagatgatcgacacagacaacagtggacagatcaccttcgaagaactcaaggttggtctgaaaaaagtcggtgctaacctccaagaatccgagatctacgcactcatgcaagccgcagatgtagataacagcggcacgatagattacggtgagttcatcgctgcaactctgcatatgaacaagatcgagcgggaggatcacctgttcgcggcgttccaatacttcgacaaggacggcagcggctacatcacggccgatgagctgcagctcgcctgcgaggagttcggcttgggagacgttcagctcgaggagatgatcagagaagtcgacgaagacaacgatggtcgcatagattacaacgagttcgtggcgatgatgcagaagccgacgatggggctcccggcgaagaagtccggcgggctgcagaacagtttcagcatcggcttcagggaggccttgaggatgtcttga

SEQ ID NO: 4717 - protein, 599 aa, Oryza sativa
MGNTCVGPSISKNGFFQSVSTVLWKARQDGDDALPGANGAPDGGGQGRLPAPPPPTSDAPLAVQNKPPEHVKIVSTTDTASAEQDASKSSAGSDSGEAARPRPRVPPVKRVSSAGLLVGSVLKRKTESLKDKYSLGRKLGQGQFGTTYLCVERATGKEFACKSILKRKLVTDDDVEDVRREIQIMYHLAGHPNVISIRGAYEDAVAVHLVMELCAGGELFDRIVQKGHYTERKAAELARVIVGVVEVCHSMGVMHRDLKPENFLFADQTEEAALKTIDFGLSIFFRPGQVFTDVVGSPYYVAPEVLKKKYGQEADVWSAGVIIYILLCGVPPFWAENEQGIFEEVLHGRLDFQSEPWPSISEGAKDLVRRMLVRDPKKRLTAHEVLRHPWVQVGGLAPDKPLDSAVLSRMKQFSAMNKLKKMALRVIAENLSEDEIAGLKEMFKMIDTDNSGQITFEELKVGLKKVGANLQESEIYALMQAADVDNSGTIDYGEFIAATLHMNKIEREDHLFAAFQYFDKDGSGYITADELQLACEEFGLGDVQLEEMIREVDEDNDGRIDYNEFVAMMQKPTMGLPAKKSGGLQNSFSIGFREALRMS

SEQ ID NO: 4718 - DNA, 1731 bp, Oryza sativa
  CDS (1)..(1731)
atgggcaacaactgcgtcggccccagcgccgccggccagaacgggttcttcgccaacgtcgccctctggcgacccaggcccgccgacgcggctccccccgccctcccgccgccctcctccgcgccgtccgaccaggcgcccgagcccgtcacaatccccccatcggagcactcctcccaccactcctcccgctccaccgacccgtcgacccccacctccgccgcggagcagccggcgaacaaggcggcgcccaaggtcaagcgcgtccagagcgccgggctgctcgccgattccgtcctcaagcgcgacgtcaacaccgcccgcctcaaggatctatacacgatcgggaagaagctagggcaggggcagttcggcaccacctacctctgcgtcgagaaggccacaggtcgggagttcgcctgcaagtccatcgccaagaggaagctgctcacgcaggaggacgtcgaggacgtgcgccgcgagatccagatcatgcaccacctcgcgggccacgccaacgtcgtctccatcgtcggggcctacgaggacgccgtcgcggtgcagctcgtcatggagctctgcgccggcggggagctgttcgacaggatcatccagagggggcattactccgagaaggccgcggcgcagctcgcgcgggtgatcgtcggcgtcatcgaggcgtgccactccctcggcgtgatgcacagggatctcaagccggagaatttcctcttcatccaccagaaggaggattcgcctctcaaggccatcgatttcggcctctccatcttcttcaagccaggtgagacatttacggatgttgttggaagcccgtactatgttgcacctgaggttcttatgaaacattatggtcgtgaggttgacgtctggagtgctggtgtgataatctacattttgttgagtggggttcctccattttgggatgaaagtgagcaagggatatttgaacaagttttgaaaggtgatctggacttctcatctgagccttggcctaatatctcagagagcgcaaaggatttggtcagaaaaatgcttattcgtgatccaaaaaagagattgactgcccatgaagccctatgtcatccttgggtctgtgttgatggagttgctcctgacaagcctcttgattccgctgtcttgagtcggttaaaacaattttctgcaatgaacaaactaaagaaaatggcgcttagggttattgctgagagtttatcagaagaagaaattgcaggattaaaagagatgttcaaaatgctagacactgacaacagcggtcatattacactggaagaactaaaaacaggcttgcagagagttggtgctaatttgatggactcggaaattgatgctctaatggaggcagcagatattgacaacagcggaacaattgattatggagaattcattgctgcaactttgcatataaacaaagtagagaaggaggataagctgtttgcagctttctcatactttgataaagatggcagcggttacattactcaagatgagcttcaaaaggcatgtgaggaattcggtataggtgatacccgtattgaggatattattggagacattgatcaggacaatgatggacggatcgactacaatgagtttgtcgaaatgatgcagaagggaaataatgcaatgggtaaaatgggtcagcatagtaccggaaactttggcctcggggaagcgctaaaacttcggtaa

SEQ ID NO: 4719 - protein, 576 aa, Oryza sativa
MGNNCVGPSAAGQNGFFANVALWRPRPADAAPPALPPPSSAPSDQAPEPVTIPPSEHSSHHSSRSTDPSTPTSAAEQPANKAAPKVKRVQSAGLLADSVLKRDVNTARLKDLYTIGKKLGQGQFGTTYLCVEKATGREFACKSIAKRKLLTQEDVEDVRREIQIMHHLAGHANVVSIVGAYEDAVAVQLVMELCAGGELFDRIIQRGHYSEKAAAQLARVIVGVIEACHSLGVMHRDLKPENFLFIHQKEDSPLKAIDFGLSIFFKPGETFTDVVGSPYYVAPEVLMKHYGREVDVWSAGVIIYILLSGVPPFWDESEQGIFEQVLKGDLDFSSEPWPNISESAKDLVRKMLIRDPKKRLTAHEALCHPWVCVDGVAPDKPLDSAVLSRLKQFSAMNKLKKMALRVIAESLSEEEIAGLKEMFKMLDTDNSGHITLEELKTGLQRVGANLMDSEIDALMEAADIDNSGTIDYGEFIAATLHINKVEKEDKLFAAFSYFDKDGSGYITQDELQKACEEFGIGDTRIEDIIGDIDQDNDGRIDYNEFVEMMQKGNNAMGKMGQHSTGNFGLGEALKLR

SEQ ID NO: 4720 - DNA, 1617 bp, Oryza sativa
  CDS (1)..(1617)
atgggcaactgctgcggcacgccggcgacggcggaggagggcgggaagaggaggaggagggggaagcagaagaaggcgaaccccttcaccgtcgcgtacaaccgcgcgccgtcgtcggcgggggcggcggcggggaggcccgggctgatggtgctgcgggacccgacggggcgggacctcggcgcgcggtacgagctcggcggcgagctggggcgcggcgagttcgggatcacgtacctgtgcacggaggcggagacgggggacaggtacgcgtgcaagtcgatatcgaagcggaagctgcggacgccggtggacgtggaggacgtgcggcgcgaggtggagatcatgcgccacatgccgtcgcatccgaacatcgtcagcctccgcgccgcctacgaggacgaggacaacgtgcacctcgtcatggagctctgcgagggcggcgagctcttcgacaggatcgtcgcgcggggccactacaccgagcgcgccgccgccgccgtcacgcgcaccatcgtcgaggtggttcagatgtgccacaggcatggtgtcatgcaccgcgaccttaaaccagaaaacttcctatatgctaacaagaaggatagttctcctctgaaggcaattgattttgggctatctgtgttcttcaggcctggtgagcggttcactgaaattgtaggcagtccatattacatggctccagaggttttaaagcgacactatggccctgaagttgatgtctggagtgcaggagtgatactttacatacttctttgcggtgtaccaccattttgggcagaaaccgagcagggagtagcgcaggcaattatacgctctgtggtagatttcaaaagagaaccatggcccagggtatctgagccagctaaagatcttgttaagcggatgttggacccaaatcccatgacaaggcttactgcagaacaagtacttgaacatccatggttacatgattctaaaaagatgcctgacattcctcttggtgatgctgtccgagctagactgcagcaatttgctgcgatgaacaagttaaagaagaaagcccttaaggtcattgctgagcatttgtctgcagaggaagcagctgacataaaggacatgtttgataaaatggatgtgagcaagaatggccagctgacctttgaggatttcaaggctggcatacgtaaacttgggaatcagatgcctgattcagatcttaagatattgatggatgctgctgatattgacaaaaatgggatcctggactatcaagaatttgttgctgtgtctatccatgtgaggaaaataggcaatgatgaacatatccagaaggctttctcatattttgaccaaaataagagtggttacatagaaattgaagagcttagagaggccttggttgatgaaatagatggcaatgatgaagacattattaatagcatcatccgtgatgtagatacagacaaggatgggaaaataagctacgacgagtttgccgtcatgatgaaggccggcactgactggaggaaggcatctaggcagtactcaagacaaaggttcagtaacctcagtctgaagcttcaaaaggacggatccatcagtgacgacacgcaatag

SEQ ID NO: 4721 - protein, 538 aa, Oryza sativa
MGNCCGTPATAEEGGKRRRRGKQKKANPFTVAYNRAPSSAGAAAGRPGLMVLRDPTGRDLGARYELGGELGRGEFGITYLCTEAETGDRYACKSISKRKLRTPVDVEDVRREVEIMRHMPSHPNIVSLRAAYEDEDNVHLVMELCEGGELFDRIVARGHYTERAAAAVTRTIVEVVQMCHRHGVMHRDLKPENFLYANKKDSSPLKAIDFGLSVFFRPGERFTEIVGSPYYMAPEVLKRHYGPEVDVWSAGVILYILLCGVPPFWAETEQGVAQAIIRSVVDFKREPWPRVSEPAKDLVKRMLDPNPMTRLTAEQVLEHPWLHDSKKMPDIPLGDAVRARLQQFAAMNKLKKKALKVIAEHLSAEEAADIKDMFDKMDVSKNGQLTFEDFKAGIRKLGNQMPDSDLKILMDAADIDKNGILDYQEFVAVSIHVRKIGNDEHIQKAFSYFDQNKSGYIEIEELREALVDEIDGNDEDIINSIIRDVDTDKDGKISYDEFAVMMKAGTDWRKASRQYSRQRFSNLSLKLQKDGSISDDTQ

SEQ ID NO: 4722 - DNA, 1602 bp, Oryza sativa
  CDS (1)..(1602)
atgggcaactgcttcaccaagacgtacgagatacccatcacgtcgggcacgatgcggcggccggcgtcgaccgcggagcgcagcaaggcgcgtggcggcgatgagccggggacgtggcggcggccgagcttcccgaggcacggggccccgccgcaccggccgccgacgggctcgtcttcggcggcgggggcgctgtcccggagggcgtccggcggcggcggggagatgggccccgtgctgcagagggcgatggtgagcgtgcggtcgctgtaccagctggaccggaagctggggagcgggcagttcgggacgacgtacctgtgcacggagcgcgcgacggggaaccggtacgcgtgcaagtcggtgtcgaagcggaagctggtgcggcgcaccgacgtggacgacgtgcgccgggagatcaccatcctgcagcacctcagcgggcagcccaacatcgcggagttcaggggcgcgtacgaggacaacgaccacgtgcacctcgtcatggagttctgctccggcggcgagctgttcgaccgcatcacggccaaggggagctactccgagcggcaggccgctgccgtgtgccgggacatcctcaccgtcgttcacgtctgccacttcatgggggtcatacaccgcgacctcaagccggagaacttcctgctcgccagcgccgacgacgacgcgccgctcaaggccatcgacttcggactctccgtcttcatcgaagaaggtaaagtgtacaaggacattgtcggaagtgcttattatgtggcgccagaagtgttacaacgaaattatgggaaagaagccgacatctggagcgctggggtgatattgtatatccttctatgcgggacgcccccattctgggcagagacagagaaaggcatattcgatgctatactggtcaaccaagttgatttcagtaccagcccgtggccttcgatatctgaaagtgcaaaggatcttatcagacaaatgttacatagagatccccagaagaggattactgcatcgcaggccttagaacatcgatggctcaaagaaggcggtgcatctgacagacctatcgatagcgcagtcctatcaagaatgaagcaattcaaggcaatgaacaagttaaagcaattagctcttaaggtaattgcagagaacctatcaccagaggaaatcaagggcttgaaacagatgttcaataacatggatacagacagaagtggcacaatcacggttgaagaactgaaggttggtctgacaaagctaggatcaagaattagtgaagccgaggttcagaagcttatggaagcagttgacgtagacaagagtggcagcattgattactcggagttcctcacagctatgataaataagcataaactggaaaaggaggaggatttacttcgtgcatttcaacattttgacaaagataacagcgggtacataacaagagatgaactggaacaagccatggcagagtacggaatgggtgatgaagcaaacattaaacaagtactggatgaagttgacaaagacaaggacgggagaattgactatgaagagtttgtggaaatgatgaggaaaggaatacaaacctga

SEQ ID NO: 4723 - protein, 533 aa, Oryza sativa
MGNCFTKTYEIPITSGTMRRPASTAERSKARGGDEPGTWRRPSFPRHGAPPHRPPTGSSSAAGALSRRASGGGGEMGPVLQRAMVSVRSLYQLDRKLGSGQFGTTYLCTERATGNRYACKSVSKRKLVRRTDVDDVRREITILQHLSGQPNIAEFRGAYEDNDHVHLVMEFCSGGELFDRITAKGSYSERQAAAVCRDILTVVHVCHFMGVIHRDLKPENFLLASADDDAPLKAIDFGLSVFIEEGKVYKDIVGSAYYVAPEVLQRNYGKEADIWSAGVILYILLCGTPPFWAETEKGIFDAILVNQVDFSTSPWPSISESAKDLIRQMLHRDPQKRITASQALEHRWLKEGGASDRPIDSAVLSRMKQFKAMNKLKQLALKVIAENLSPEEIKGLKQMFNNMDTDRSGTITVEELKVGLTKLGSRISEAEVQKLMEAVDVDKSGSIDYSEFLTAMINKHKLEKEEDLLRAFQHFDKDNSGYITRDELEQAMAEYGMGDEANIKQVLDEVDKDKDGRIDYEEFVEMMRKGIQT

SEQ ID NO: 4724 - DNA, 1656 bp, Oryza sativa
  CDS (1)..(1656)
atgggcaacgcatgcggcggttcccttagatccaagtacctgagcttcaagcagaccgcgtcgcagcgccacgacaccgacgacaacaacaacgccgccgcggccgactcgccgaagaagccctcccgccctccagcagccgccaagacggacgaccacccagtctccgcgtcggcgccggccgccgccatgaggcgcggccaggcgcccgccgacctcggctcggtgctcggccaccccacccccaacctccgcgacctctacgccatgggcaggaagctcgggcaggggcagttcggcaccacctacctctgcaccgagctgtccactggggtggactacgcctgcaagtccatttccaagcgcaagctcatcaccaaggaggacatcgaagacgttcgccgcgagatccagatcatgcaccatctctcgggccacaagaacgtcgtcgccatcaagggcgcctacgaggaccagctatacgtgcacatcgtcatggagctctgcgccggcggcgagctcttcgatcgcatcatacagcgcggccactacagcgagcggaaggccgccgagctcacgcggatcatcgttggggtcgtcgaggcctgccactcgctcggggtcatgcaccgggacctcaagccagaaaacttcctgcttgccaacaaggacgatgacctctcgctcaaggccatagattttggtctctcagtcttcttcaagcccggtcaaacttttaccgatgttgtcggaagcccatattacgtagctccagaagtgttgttgaaacactatggaccagaagctgatgtatggactgcaggtgtcattctctacattttactaagtggtgtacccccattctgggcagagacacaacaaggaatatttgatgctgtactaaaaggtttcattgattttgattctgatccttggcctgtgatctctgagagcgcaaaggatcttataacaaaaatgctcaatcctcgcccaaaggaacgcttaacagcacatgaagttctatgccatccatggattcgtgatcacggagttgctccagatcggcctcttgatccagctgtcctatctcgcatcaagcagttctctgcaatgaataagttgaagaagatggctttgcgggtaatagctgagagtctctcagaggaggaaatcgctgggttgaaggaaatgtttcagactatggatgctgataacagtggtgcgatcacatatgatgagcttaaagaaggcttgagaaaatatggctcaacacttaaggacaccgagattcgtgatcttatggatgcagcagatatagacaacagcggaacaattgattatatcgaattcattgctgcaacattgcatctcaataaactggagcgagaggaacatcttgtggcagctttttcatattttgacaaagatggaagtggttacatcacagtggatgaactgcagcaagcttgcaaagagcataacatgcccgatgcttttcttgatgatgtcatcaatgaagctgatcaggacaatgatgggcgcattgactatggagaatttgttgccatgatgaccaagggcaatatgggagtcggacgaagaacaatgagaaacagcttgaatatcagcatgagggacgcacctggtgcactctag

SEQ ID NO: 4725 - protein, 551 aa, Oryza sativa
MGNACGGSLRSKYLSFKQTASQRHDTDDNNNAAAADSPKKPSRPPAAAKTDDHPVSASAPAAAMRRGQAPADLGSVLGHPTPNLRDLYAMGRKLGQGQFGTTYLCTELSTGVDYACKSISKRKLITKEDIEDVRREIQIMHHLSGHKNVVAIKGAYEDQLYVHIVMELCAGGELFDRIIQRGHYSERKAAELTRIIVGVVEACHSLGVMHRDLKPENFLLANKDDDLSLKAIDFGLSVFFKPGQTFTDVVGSPYYVAPEVLLKHYGPEADVWTAGVILYILLSGVPPFWAETQQGIFDAVLKGFIDFDSDPWPVISESAKDLITKMLNPRPKERLTAHEVLCHPWIRDHGVAPDRPLDPAVLSRIKQFSAMNKLKKMALRVIAESLSEEEIAGLKEMFQTMDADNSGAITYDELKEGLRKYGSTLKDTEIRDLMDAADIDNSGTIDYIEFIAATLHLNKLEREEHLVAAFSYFDKDGSGYITVDELQQACKEHNMPDAFLDDVINEADQDNDGRIDYGEFVAMMTKGNMGVGRRTMRNSLNISMRDAPGAL

SEQ ID NO: 4726 - DNA, 1644 bp, Oryza sativa
  CDS (1)..(1644)
atgggtaactgctgccggtcgccggcggccgccgcgagggaggatgtgaagacatcgcacttccccgcctctaccggaggcgggaagaagaagccgcaccaggcgcggaacgggggaggcggaggtggtggtggaggagggggaggctgggagaagaagcggctgtcggtgctcggggaggaagggagcgaggtgaacggcgggatcgaggagaagtacgcgctggacagggagctggggcgcggcgagttcggggtgacgtacctgtgcatggaccggtgctcgcgggagctcctcgcgtgcaagtcgatctcgaagcggaagctgcggacgcccgtggacgtggaggacgtgcggcgggaggtggccatcatgcggcacctgcccaggagcgccagcatcgtgtcgctgcgggaggcgtgcgaggacgacggcgccgtgcacctcgtcatggagctgtgcgagggaggggagctgttcgaccgcatcgtcgccaggggccactacacggagcgcgcggcggcggcggtcacgcgcaccatcgtcgaggtcgtgcagctctgccaccgccacggcgtgatccaccgggacctcaagcccgagaacttcctcttcgccaacaagaaggagaattccccactcaaggccatcgacttcggcctctccatcttcttcaagcctggtgaaaaattttctgaaattgtgggaagtccatattacatggctcctgaagtgctgaagagaaactatggacctgaaatagacatatggagtgctggtgtcatcttgtatattttgttatgtggagttcctcctttttgggctgagactgaacaaggagtggcacaagctatacttcgtggaaatatagattttaagcgagaaccatggcccaatgtttctgataatgctaaagatctagttcgtcagatgcttcagcctgacccaaaactcaggctaacagcaaagcaagttcttgagcatacctggcttcaaaatgctaagaaagctccaaatgttccacttggagatattgtaaagtcaaggctgaaacagttttcaaggatgaatagattcaaaagaagagctctaagggttattgctgatcacttatcagccgaagaggttgaggacataaaggacatgttcaaggtgatggatacagataatgatggtatagtctcttatgaagagttaaagagtggaatcgcaaaatttggttcccatcttgcagaatctgaagtgcaaatgcttattgaagctgtggatacaaatggtaggggagcactagattatggtgaatttttggccgtttcacttcacttacaaaggatggcaaatggcgagcacctccggcgggccttcctatttttcgacaaggatggcaatggctatattgagcccgaggagcttcaggaggctctggtggaggatggggcaactgatatcatggaagtggtgaaggacatattgcaagaggttgacactgacaaggatggcaaaattagctatgaagaattcgtagcaatgatgaagactggcacagattggagaaaggcgtcacggcattattcaagaggacgtttcaacagccttagcataaggcttataaaggatggatctgtaaaattgggcaacgagtga

SEQ ID NO: 4727 - protein, 547 aa, Oryza sativa
MGNCCRSPAAAAREDVKTSHFPASTGGGKKKPHQARNGGGGGGGGGGGGWEKKRLSVLGEEGSEVNGGIEEKYALDRELGRGEFGVTYLCMDRCSRELLACKSISKRKLRTPVDVEDVRREVAIMRHLPRSASIVSLREACEDDGAVHLVMELCEGGELFDRIVARGHYTERAAAAVTRTIVEVVQLCHRHGVIHRDLKPENFLFANKKENSPLKAIDFGLSIFFKPGEKFSEIVGSPYYMAPEVLKRNYGPEIDIWSAGVILYILLCGVPPFWAETEQGVAQAILRGNIDFKREPWPNVSDNAKDLVRQMLQPDPKLRLTAKQVLEHTWLQNAKKAPNVPLGDIVKSRLKQFSRMNRFKRRALRVIADHLSAEEVEDIKDMFKVMDTDNDGIVSYEELKSGIAKFGSHLAESEVQMLIEAVDTNGRGALDYGEFLAVSLHLQRMANGEHLRRAFLFFDKDGNGYIEPEELQEALVEDGATDIMEVVKDILQEVDTDKDGKISYEEFVAMMKTGTDWRKASRHYSRGRFNSLSIRLIKDGSVKLGNE

SEQ ID NO: 4728 - DNA, 1569 bp, Oryza sativa
  CDS (1)..(1569)
atgggcaactgctgcccgccggggtcatcctccgagcccgacccgccgccggcgtcctccggctcctcccgccccgccggcagcgccggcgccgcggcctcgccggcgacaatatccccctccgccgcgccggcgcccgccaagccgcccgcgcccatcggccccgtcctcgggcgccccatggaggacgtcaagtcgatctacaccgtgggcaaggagctcgggcgcgggcagttcggcgtcacgtcgctgtgcacccacaaggcgacggggcagcggttcgcgtgcaagacgatcagcaagcggaagctgtcgaccaaggaggacgtcgaggacgtccgccgcgaggtgcagatcatgtaccacctcgccggccagcccggggtggtggagctcaagggcgcgtacgaggacaagcacgccgtccacctcgtcatggagctctgtgccggcggcgagctgttcgaccggatcatcgccaagggccactacaccgagcacgccgcctcctcgctcctccgcaccatcgtcgagatcatccacacctgccactccatgggcgtcatccaccgcgacctcaagcccgagaacttcctcctcctcagcaaggacgagcacgcccctctcaaggccaccgacttcggcctctccgtcttcttcaaagaaggtgaggtgttcagggacatcgtcgggagcgcctactacatcgcgccggaggtgctcaagcggagctacggcccggaggcggacatctggagcatcggcgtcatgctctacatccttctctgcggagttcctcccttctgggcagaatcggagcacggcatcttcaactccatcttgagagggcatgtcgacttcagcagcgagccatggtcgcgcatctcgcatggcgccaaggaccttgtcaggcggatgctccattctgaccccaagcagaggatttctgcatatgacgtgctcaatcatccatggataaaggaagacggcgaggcgcccgatacgccgctcgacaatgctgttcttggcaggctcaagcagttcagagctatgaaccagttcaagaaggctgctctaagggttatcgccggatgcttgtcggaggaggagatcagggggctcaaggagatgttcaagagcatggattccgacaacagcggcacgatcaccgtcgacgagctgaggaaagggctggccaagaagggtaccaagctcaccgaagctgaagttcagcagctaatggaagctgctgatgcagacggcaacgggacaatcgattacgaggagttcatcactgcgacgatgcacatgaacaggatggacagggaggagcacctctacaccgcgttccagtacttcgacaaggacaacagcgggtacatcacgatcgaagagctcgagcaagcgctgagagagaaagggttgatggacggcagggagatcaaggacatcatatccgaagtcgacgccgacaacgacgggaggatcaactacacggagttcgtggccatgatgaggaaaggcgacccggaggcgaacccgaagaagcggcgcgacgtcgtgctgtag

SEQ ID NO: 4729 - protein, 522 aa, Oryza sativa
MGNCCPPGSSSEPDPPPASSGSSRPAGSAGAAASPATISPSAAPAPAKPPAPIGPVLGRPMEDVKSIYTVGKELGRGQFGVTSLCTHKATGQRFACKTISKRKLSTKEDVEDVRREVQIMYHLAGQPGVVELKGAYEDKHAVHLVMELCAGGELFDRIIAKGHYTEHAASSLLRTIVEIIHTCHSMGVIHRDLKPENFLLLSKDEHAPLKATDFGLSVFFKEGEVFRDIVGSAYYIAPEVLKRSYGPEADIWSIGVMLYILLCGVPPFWAESEHGIFNSILRGHVDFSSEPWSRISHGAKDLVRRMLHSDPKQRISAYDVLNHPWIKEDGEAPDTPLDNAVLGRLKQFRAMNQFKKAALRVIAGCLSEEEIRGLKEMFKSMDSDNSGTITVDELRKGLAKKGTKLTEAEVQQLMEAADADGNGTIDYEEFITATMHMNRMDREEHLYTAFQYFDKDNSGYITIEELEQALREKGLMDGREIKDIISEVDADNDGRINYTEFVAMMRKGDPEANPKKRRDVVL

SEQ ID NO: 4730 - DNA, 1629 bp, Oryza sativa
  CDS (1)..(1629)
atgggcgcccgcgcctctcgccaccgccaatcccccgaccaatcccaatcccaatccccatccccacaccacaagcaccaccaccaccaccaaaccacccgggcccccaagcccaagcccaagccccagccaccgccgccgcagcagccgcgatctcagcctccgccgccgccgcggcaccagccccagcaggcgccccagcaggcggcggcggaggatggggtggggcgggtgctggggcggcccatggaggacgtccgtgcgacctacaccttcgggcgggagctggggcgggggcagttcggggtgacctacctcgccacccacaagcccaccggccgacgctacgcctgcaagtccatcgccgcccgcaagctcgcccgccccgacgacctcgacgacgtccgccgcgaggtccacatcatgcaccacctcaccggccaccgcaacatcgtcgagctgcgcggcgcctacgaggaccgccactccgtcaacctcgtcatggagctctgcgagggcggcgagctcttcgaccgcatcatcgccaggggccactactccgagcgcgccgccgccgccctctgcagggagatcgtctccgtcgtccacagctgccactccatgggggtcatgcacagggacctcaagcccgagaacttcctcttcctcaacaagcgcgaggactccccgctcaaagccaccgattttggcctctccgtcttcttcaagcccggtgagcagttcagagatcttgttggaagtgcatattatgtggctcctgaggtcctaaaacgactatatggagctgaggcagacatatggagtgctggagttatcctttacatccttctatcaggggttcctccattctgggcagaaaacgaggacggtatatttgatgctgttctgcaaggtcatatcgacttctcatctgaaccatggccttctatatctagtggtgcaaaagacttggtcaagcggatgcttcggcaggacccaaaggagcggttaactgctgctgaaattttgaaccacccatggattagagaggatggagaggccccagataaaccacttgatattacagtgatcagtagaatgaagcagttcagagcaatgaacaaacttaagaaggttgccttgaaggtcgttgcagagaacttgtcagaggaagagattgtgggtttaaaggaaatgttcaaatctttagatactgataacagtgggacgataactcttgaagaactaagagctggtctaccaaagcttggcactaaaatttcggaatcagaattaaggcagttgatggaagcggctgatgttgatggaaatgggtccattgattatgttgaatttatatcagcaacgatgcacatgaatagattagagaaggaagatcacatatataaagcatttgaatattttgacaaggaccacagcgggttcataacagtcgatgaattggaagaagctctgacaaagtacgacatgggtgatgaagcgacaattaaagaaataattgctgaagtggatacagaccatgatggaagaattaactaccaggagtttgttgccatgatgaagaacaacagccctgagattgttccaaatcgacggcggatgttttaa

SEQ ID NO: 4731 - protein, 542 aa, Oryza sativa
MGARASRHRQSPDQSQSQSPSPHHKHHHHHQTTRAPKPKPKPQPPPPQQPRSQPPPPPRHQPQQAPQQAAAEDGVGRVLGRPMEDVRATYTFGRELGRGQFGVTYLATHKPTGRRYACKSIAARKLARPDDLDDVRREVHIMHHLTGHRNIVELRGAYEDRHSVNLVMELCEGGELFDRIIARGHYSERAAAALCREIVSVVHSCHSMGVMHRDLKPENFLFLNKREDSPLKATDFGLSVFFKPGEQFRDLVGSAYYVAPEVLKRLYGAEADIWSAGVILYILLSGVPPFWAENEDGIFDAVLQGHIDFSSEPWPSISSGAKDLVKRMLRQDPKERLTAAEILNHPWIREDGEAPDKPLDITVISRMKQFRAMNKLKKVALKVVAENLSEEEIVGLKEMFKSLDTDNSGTITLEELRAGLPKLGTKISESELRQLMEAADVDGNGSIDYVEFISATMHMNRLEKEDHIYKAFEYFDKDHSGFITVDELEEALTKYDMGDEATIKEIIAEVDTDHDGRINYQEFVAMMKNNSPEIVPNRRRMF

SEQ ID NO: 4732 - DNA, 1707 bp, Oryza sativa
  CDS (1)..(1707)
atggggaacacctgcgtcggccccagctccgcggcggaccgccacggcttcttccactccgtctccctcgccgtgctctggcgccccggtggccgcgccgagccgtcgcagccgccgggttacccgcctcgggagtcgagccactcctccgtcacctcgtccacggcgcccgagcgcgtcaccatcgccgactccgacctctcctcctccacccccaacaagggcgggaataagcccaaggtgaggcgcgtccagagcgcggggctcctcgccgactccgtcctcaagcgcgactccgagcggctcaaggacctctacaccctggggaagaagctcgggcaggggcagttcgggaccacgtaccagtgcgtggagaaggccacggggaaggtgctcgcctgcaagtccatcgccaagcggaagctggtcagcgaggaggacgtggaggacgtgcgccgggagatccagatcatgcaccacctcgccggccacccgagcgtggtctccatcgtcggcgcgtacgaggacgccgtcgccgtgcacctcgtcatggagctctgcgctggcggggagctgtttgataggatcgtgcagcgcgggcactactccgagaaggcggccgcgcagctggcgcgggtgatcatcggtgtcgtcgaggcgtgccattcgctcggggtgatgcacagagacctcaagccggagaacttcttgtttgtcaaccataaggaggactcgccactcaagacgatcgattttgggctttccattttcttcaagccaggcgaaaattattcggatgttgttggaagtccttactatgttgcacctgaggttctgatgaagcattatggccgcgaggtggatgtatggagtgctggtgtaatcatttatatcttgcttagtggagttcctccattttgggatgaatctgaacaagggatatttgaaaaagttttgaaaggagatcttgatttttcatctgatccctggcctgctatctcagacagtgcaaaggatttggtgaggaaaatgttaaaccgtgatcccagaaagagattgactgcacatgaagctctatgtcatccttgggtttgtgttgatggagttgctcctgataaacctcttgattctgctgtcttaactagattgaagcaattttcagcaatgaacaagctaaagaagatggcccttagggtcattgctgaaaatttatcggaagatgaaattgcgggattgagagaaatgttcaaaatgttggacactgataatagtggtcagatcacattggaggaactaaaaactggcttgcggagagttggtgctaatttgaaggattcggaaattacaaccctaatggaagcggctgatattgataatagtggttcaatagattatggggagttcattgctgcaactatgcatctgaacaaagttgagagagaagataatctttttgcagcgttttcatactttgataaagacagcagtggttacattactcaagatgagctacaaaaagcctgtgaggaatttggcataggagatgcacatctggaggatatcatcaaagatattgatcaggacaatgatggccggatcgactacaatgaatttgtaacaatgatgcagaaagggaataatccactagggaaaaaggggcaaggccagctaagttttggtctaagggaagcattgaagcttggttaa

SEQ ID NO: 4733 - protein, 568 aa, Oryza sativa
MGNTCVGPSSAADRHGFFHSVSLAVLWRPGGRAEPSQPPGYPPRESSHSSVTSSTAPERVTIADSDLSSSTPNKGGNKPKVRRVQSAGLLADSVLKRDSERLKDLYTLGKKLGQGQFGTTYQCVEKATGKVLACKSIAKRKLVSEEDVEDVRREIQIMHHLAGHPSVVSIVGAYEDAVAVHLVMELCAGGELFDRIVQRGHYSEKAAAQLARVIIGVVEACHSLGVMHRDLKPENFLFVNHKEDSPLKTIDFGLSIFFKPGENYSDVVGSPYYVAPEVLMKHYGREVDVWSAGVIIYILLSGVPPFWDESEQGIFEKVLKGDLDFSSDPWPAISDSAKDLVRKMLNRDPRKRLTAHEALCHPWVCVDGVAPDKPLDSAVLTRLKQFSAMNKLKKMALRVIAENLSEDEIAGLREMFKMLDTDNSGQITLEELKTGLRRVGANLKDSEITTLMEAADIDNSGSIDYGEFIAATMHLNKVEREDNLFAAFSYFDKDSSGYITQDELQKACEEFGIGDAHLEDIIKDIDQDNDGRIDYNEFVTMMQKGNNPLGKKGQGQLSFGLREALKLG

SEQ ID NO: 4734 - DNA, 1602 bp, Oryza sativa
  CDS (1)..(1602)
atggggtcgtgttgcagcagagctacgtctccagattctggtcgaggaggagcaaacggttatggctattctcaccagacaaaacctgctcagacaactcctagctataaccatcctcagccgccgccgccagctgaggtgaggtacacaccatcagcaatgaaccctccggtagtcccacctgtggttgccccaccgaagcccaccccagacacaattcttggaaagccgtatgacgatgtgcgctcggtttactcccttggaaaggaactcggaaggggacagtttggggtgacatacctgtgcacggagatcgctagtggtaagcagtatgcttgcaaatccatctctaagcgcaagcttgtgagcaaggccgacaaggaggacattcgccgggagattcagatcatgcagcacctatctggacaacaaaacattgtcgagttccggggagcatatgaggacaagagcaatgtccatgttgtcatggagctctgcgctggtggggagctgtttgatcggatcattgccaaggggcactactcagagcgtgcggctgctaccatctgcagggcagtggtgaatgttgtcaacatttgccattttatgggagtgatgcatcgtgatttaaaaccggagaacttcttacttgcaaccaaagaagagaatgcaatgctcaaagccactgattttggtctctcagttttcattgaagaaggaaaaatgtatagagacattgttggaagtgcttattatgttgctcctgaagtccttcggcggaattatggtaaagagattgatgtatggagtgcaggcgttattttgtacattcttctcagtggtgttcctccattttgggctgaaactgaaaagggaatatttgatgctattcttcaaggggagattgactttgagagtcaaccatggccatcaatatccgagagtgctaaagaccttgttagaaagatgttgacacaagatccaaagaaaagaattacttcggcccaagttctccaacatccctggctcagagatggagaagcatctgacaaacctattgacagcgctgttctttctaggatgaagcaattcagagcaatgaacaagctgaaaaagatggctctgaaggttattgcttcaaaccttaatgaggaggagatcaagggcctgaagcaaatgttcacaaacatggacacagacaacagcgggaccatcacatatgaagaactcaaagcaggattagccaaacttggatcaaagctttcagaagctgaagtaaagcagttgatggaagctgctgatgtagacggcaatggatccatcgactatgttgaatttatcactgccacaatgcatagacacaagctcgaaagagatgagcatttgtttaaggcattccagtattttgacaaagacaacagtggcttcatcacaagagatgaactggaatccgctttaatcgagcatgaaatgggcgatacaagtaccataaaggatattatatcagaagtcgacacggataatgatgggaggattaactacgaggaattttgcgctatgatgagaggaggggggatgcagcagcctatgaggctcaaatag

SEQ ID NO: 4735 - protein, 533 aa, Oryza sativa
MGSCCSRATSPDSGRGGANGYGYSHQTKPAQTTPSYNHPQPPPPAEVRYTPSAMNPPVVPPVVAPPKPTPDTILGKPYDDVRSVYSLGKELGRGQFGVTYLCTEIASGKQYACKSISKRKLVSKADKEDIRREIQIMQHLSGQQNIVEFRGAYEDKSNVHVVMELCAGGELFDRIIAKGHYSERAAATICRAVVNVVNICHFMGVMHRDLKPENFLLATKEENAMLKATDFGLSVFIEEGKMYRDIVGSAYYVAPEVLRRNYGKEIDVWSAGVILYILLSGVPPFWAETEKGIFDAILQGEIDFESQPWPSISESAKDLVRKMLTQDPKKRITSAQVLQHPWLRDGEASDKPIDSAVLSRMKQFRAMNKLKKMALKVIASNLNEEEIKGLKQMFTNMDTDNSGTITYEELKAGLAKLGSKLSEAEVKQLMEAADVDGNGSIDYVEFITATMHRHKLERDEHLFKAFQYFDKDNSGFITRDELESALIEHEMGDTSTIKDIISEVDTDNDGRINYEEFCAMMRGGGMQQPMRLK

SEQ ID NO: 4736 - DNA, 1734 bp, Oryza sativa
  CDS (1)..(1734)
atgggtggctgctcctccgccttcgcggtttccaccaggatgatccgcttcagccgcggccgcgtgccggcggccatcctccccgtcaccagcaacgacgagccctgctgcagctgctcccctgaaaacaacaacaaaaacaacgacggcggcggaggcggatgcgacggcggcgagcaccagaaggggaagtcgtggaggaggtggcagtacaggagatgcggcggcggtggcggtggcgggggcgggaggaagaacgccatcctcggggacgcggccgacgtgaagacggcggcggggttcgcggagaggtacaggctgggggcggagctggggcgcggggagttcggggtgacgcggcggtgctccgacgcggccaccggggaggccctggcctgcaagacgatccgccggaagcggctgcgccggtgccgcggcgacgccgaggacgtgcggcgggaggtggagatcctccgccgcatctccgccctcggcgccggcgccgactccgtggtgcgactccgcgacgcctgcgaggactccgacggcgtccacctcgtcatggagctctgcgagggcggcgagctcttcgaccgcatcttcgcccgcggccactacaccgagcgcgccgccgccaagctcgcccgcaccatcgtcggcgtcgtccagctgtgccacgagaacggggtgatgcacagagacctgaagccggagaacttcctgttcgccaacaagtcggaggactcacctctcaaggccatcgatttcggcctctcggtgttcttcaagccaggagaaagattcacccaggtggttgggagcacatactacatggcaccagaggttctcaacagaagctatggcccagaagcagatgtctggagcgccggcgtcatcctctacatcctgctctgcggagttcctcctttctggggagacaatgatgagaaaacggtgacggcgatactccagggtgggatcaacttccagagggagccatggcccaaggtgtccccgcatgcaaaggaccttgtcagcaagatgcttgaccccgatccttctacccggttgacagcaaaggaagtccttgagcatccttggctcaagaatgccgatagggctccaaacgtttcgctcggagagattgttcgatccagactgatgcaattctcagccatgaataagttcaaaaagaaggcacttggagtcgttgccaagaatttaccggtggaggagatggataaatatactcagatgttccacaagatggacaaagacaacagcggtaatttgacgcttgaggatctgaagttgggcctccagataaatggtcatcctgttccagagacagagatcgaaatgctgttagaagctggtgacatagatggaaatggaacattagattgcgaggagtttgtaacggtattacttcacataaagaagatgagtaatgaggagtacctacctaaagctttcaagttcttcgacaaagatggtaatggtttcattgaaatggaggagttgatggatgctttaggtgatgaactgggccctactgagcaagtggttaaagatattattcgagacattgacactgataaggatggtcgcattagctatcaggagtttgaatcaatgatgatatctggatcagactggagaaatgcttcccgacgatactcaaaagcaaatttcagctccctcagtcgtaagctgtgcaaaggaaattcatga

SEQ ID NO: 4737 - protein, 577 aa, Oryza sativa
MGGCSSAFAVSTRMIRFSRGRVPAAILPVTSNDEPCCSCSPENNNKNNDGGGGGCDGGEHQKGKSWRRWQYRRCGGGGGGGGGRKNAILGDAADVKTAAGFAERYRLGAELGRGEFGVTRRCSDAATGEALACKTIRRKRLRRCRGDAEDVRREVEILRRISALGAGADSVVRLRDACEDSDGVHLVMELCEGGELFDRIFARGHYTERAAAKLARTIVGVVQLCHENGVMHRDLKPENFLFANKSEDSPLKAIDFGLSVFFKPGERFTQVVGSTYYMAPEVLNRSYGPEADVWSAGVILYILLCGVPPFWGDNDEKTVTAILQGGINFQREPWPKVSPHAKDLVSKMLDPDPSTRLTAKEVLEHPWLKNADRAPNVSLGEIVRSRLMQFSAMNKFKKKALGVVAKNLPVEEMDKYTQMFHKMDKDNSGNLTLEDLKLGLQINGHPVPETEIEMLLEAGDIDGNGTLDCEEFVTVLLHIKKMSNEEYLPKAFKFFDKDGNGFIEMEELMDALGDELGPTEQVVKDIIRDIDTDKDGRISYQEFESMMISGSDWRNASRRYSKANFSSLSRKLCKGNS

SEQ ID NO: 4738 - DNA, 1899 bp, Oryza sativa
  CDS (1)..(1899)
atggggcagtgttacgcgaggaacgtgccggtggatggggaggggggaggaggggtggtgacgacgacgacgacgacgaccatctcggtgagcgcgtcggcggcgggggaggaggtggaggtggggagagggggaggagggggaggagggaggaggagcgggaggccgtcgccggcggggacgccgaggaggaggggggcgacgccggcgaggtcgtcggtggcggggagcccgtgggcggggagcccgctccccgagggcatcgcaccgtcgcctgcgccgtcggcgaccacgccgaggcggttcttcaggcggccgttcccgccgccgtcgccggcgaagcacatcaaggcgtccctcgcgcgccgcctcgggcagcggtcgccggccacggcccaggcgcagcaggccgcgaagccgcccgccgaggtcccgatcccggagcacgggggcgggggcggcgccgccgccggggaggtggagcgggagctcgacaagagcttcggctatgaccgccacttcgccgccaagtacgagctggggaaggaggtgggtcgcggccacttcggccacacctgcctcgcgcgtgcccgcaagggcgacatgagaggccaactcctcgctgtcaaggtcatctccaaagccaagatgacaacagcaatatcaattgaggatgtgcgtagagaggtgaaaattctgaaggctttatctgggcattcgaatcttgtcaaattttatgatgcatgtgaggatgcccttaatgtctacataatcatggagttatgtgaaggtggggagttattggacagaattttgtccagaggtgggagatacactgaggaagatgctaaagttatcgttgaacaaatattaaatgttgtttctttctgccatcttcaaggcgttgttcaccgtgatttgaagccagagaatttcctattcagcactagagatgaccattcacctatgaagatcatcgactttggactttctgattttatacggccagatgaaagattaaatgatattgttggtagtgcatactatgttgctccagaagtcctacataggtcatatagcacggaagcagacatgtggagtattggtgttatcacttatatcttgctgtgcggtagcagaccattctgggcacgaactgaatcaggcattttccgctcagtgctgagagctgatcctaattttgatgatgcaccgtggtcttcaatatctcctgaagccaaagattttgtcaaaagacttcttaacaaggattacagaaaaagaatgactgctgcccaggcactctctcacccctggttgcgagatgagtgccgaccgatccctttggatatgctagtttttaagttgattaaggcatatcttcgctctacacctttcaagcgagcggcattgaaggctctgtccagagcaataacagaagatgagcttatctacatcagagcacagtacaacttgctagaaccaagtagtacagatggtcgactatgcattgaaaacttcaggatggctcttttacaaaactctacagatgctatgaaggaatccagagcccttgatatcttgaatgcgttggagccacttgcctacagaagaatggactttgaggagttccgggcggcgacaatcagtccttaccaacttgaggctttatcacggtgggaagaaatagctggcactgcgtttgagtactttgagcaggaaggcaaccgtcccatcacaattgaggagctggcacaggagatgaatctttcttccgcggcgtattctatcgtccgtgactggattagaccggctgatggcaagcttagctttctaggttataccaaatttttgcatggattgacgatgcgaagtagcaacgcgaggcggcaccattaa

SEQ ID NO: 4739 - protein, 632 aa, Oryza sativa
MGQCYARNVPVDGEGGGGVVTTTTTTTISVSASAAGEEVEVGRGGGGGGGRRSGRPSPAGTPRRRGATPARSSVAGSPWAGSPLPEGIAPSPAPSATTPRRFFRRPFPPPSPAKHIKASLARRLGQRSPATAQAQQAAKPPAEVPIPEHGGGGGAAAGEVERELDKSFGYDRHFAAKYELGKEVGRGHFGHTCLARARKGDMRGQLLAVKVISKAKMTTAISIEDVRREVKILKALSGHSNLVKFYDACEDALNVYIIMELCEGGELLDRILSRGGRYTEEDAKVIVEQILNVVSFCHLQGVVHRDLKPENFLFSTRDDHSPMKIIDFGLSDFIRPDERLNDIVGSAYYVAPEVLHRSYSTEADMWSIGVITYILLCGSRPFWARTESGIFRSVLRADPNFDDAPWSSISPEAKDFVKRLLNKDYRKRMTAAQALSHPWLRDECRPIPLDMLVFKLIKAYLRSTPFKRAALKALSRAITEDELIYIRAQYNLLEPSSTDGRLCIENFRMALLQNSTDAMKESRALDILNALEPLAYRRMDFEEFRAATISPYQLEALSRWEEIAGTAFEYFEQEGNRPITIEELAQEMNLSSAAYSIVRDWIRPADGKLSFLGYTKFLHGLTMRSSNARRHH

SEQ ID NO: 4740 - DNA, 1605 bp, Oryza sativa
  CDS (1)..(1605)
atggggaattcttgccaaaatggaacctatgggaacaattaccagaacagcaaccggtttcagaatgaccgttttgcttctcggtacgttgatgggaatgatactgaggattgctactcgggctcgtcaagggccagcttagcgggtgctctgcggcaagggctgaacctaaagtcccctgtccttggatacaagactccaaatgtaagggagctctatactcttggccgggagcttggacagggacagttcgggaaaacatacctctgcactgagattagcacagggtgtcaatatgcatgcaagactatcttaaagagtaatctccgatgtgtgtcagatatcgaggacgtgcgccgtgaaatccagataatgcaccatctttcgggccagaagaatatagtgacaatcaaggacacatatgaggatgagcaggccgtgcacatcgtcatggagctctgtgcaggtggtgagctcttcagcaagattcagaagcgaggtcattacagtgaacggaaggctgcagagcttataaaaattatagttggcatcatagaaacatgccattcacatggagtgatgcaccgggatctcaagccagaaaatttcctcttactggacgcagacgatgaattctcggttaaagcaattgactttggtctatctgtgttcttcagaccaggtcaggttttcagagaggtagtgggaagtccatattatattgctccagaggtattggagaagcgttatggaccagaggctgatatatggactgctggagtgattctctatgtattgctgactggtgttcctccattttgggcagatacacaaagcgggatatatgaaaaagtactggatggacgtattgattttaaatcaaaccggtggcccaggatatctgacagtgcaaaggatcttataaaaaagatgctctgcccttatccatcagagcgtttgaaagcccatgaagtgctaaagcatccatggatatgtgataatggagtggctactaatcgagctctggatccaagtgtacttcctcgtctcaagcaattttctgcaatgaataggttaaagaaattgtctctccagattattgctgagcgtctttcagaagaggagattgttgggttaagagaaatgttcaaggctatggacaccaaaaacagaagtgtggttacatttggtgagcttaagggactgaaaagatacagctcagtgttcaaggatactgaaattaacgacttaatggaagcagctgatgacaccacctccaccatcaactgggaagagtttattgctgcagcagtgtctcttaataaaatagaacgtgagaaacacttgatggcagcctttacatactttgacaaagatggaagtggttttatcacagttgacaagcttcaaaaggcttgcatggaacgtaacatggaagatactttccttgaagagatgattctggaggttgatcaaaacaatgatggtcaaatcgattatgctgaatttgtcacaatgatgcaaagcaacaactttggacttgggtggcaaacggtggaaagcagcctgaatgtagccctgagggaggcaccccaagtatactga

SEQ ID NO: 4741 - protein, 534 aa, Oryza sativa
MGNSCQNGTYGNNYQNSNRFQNDRFASRYVDGNDTEDCYSGSSRASLAGALRQGLNLKSPVLGYKTPNVRELYTLGRELGQGQFGKTYLCTEISTGCQYACKTILKSNLRCVSDIEDVRREIQIMHHLSGQKNIVTIKDTYEDEQAVHIVMELCAGGELFSKIQKRGHYSERKAAELIKIIVGIIETCHSHGVMHRDLKPENFLLLDADDEFSVKAIDFGLSVFFRPGQVFREVVGSPYYIAPEVLEKRYGPEADIWTAGVILYVLLTGVPPFWADTQSGIYEKVLDGRIDFKSNRWPRISDSAKDLIKKMLCPYPSERLKAHEVLKHPWICDNGVATNRALDPSVLPRLKQFSAMNRLKKLSLQIIAERLSEEEIVGLREMFKAMDTKNRSVVTFGELKGLKRYSSVFKDTEINDLMEAADDTTSTINWEEFIAAAVSLNKIEREKHLMAAFTYFDKDGSGFITVDKLQKACMERNMEDTFLEEMILEVDQNNDGQIDYAEFVTMMQSNNFGLGWQTVESSLNVALREAPQVY

SEQ ID NO: 4742 - DNA, 1626 bp, Oryza sativa
  CDS (1)..(1626)
atgggccagtgctgcacgggtggcgggaaggccgtcgccggcgacgaggcagagccggggacctccaaggcggcgccgccgagccgcggcacctcctccaaaaatgggtccgccaagcagcagccgtgctcgccggcggccaaggcggcggcgacggaagcggcggcggcggcgtcgtcgtccaagaagccggcaggccccatcggcgaggtgctggagcggccgatggaggaggttcgcacgacgtactccatcggcaaggagctcgggcgcgggcagttcggcgtgacccacctgtgcacccacaaggccaccggcgagaagctggcgtgcaagacgatcgcgaagcggaagctggcgaacaaggaggacgtcgacgacgtccgccgcgaggtgcagatcatgcaccacctctccggccagccaaacatcgtcgacctccgcggcgcctacgaggacaagcacaacgtccacctcgtgatggagctctgcgccggcggcgagctcttcgaccgcatcatcgcgcggggccactacacggagcgcgccgcggcggcgctcctccgcgccatcgtcgggatcgtgcacacctgccactccatgggggtgatccaccgggacctcaagccggagaacttcctgctgctgagcaagggggacgacgcgccgctcaaggccaccgacttcggcctctccgtcttcttcaaggaaggcgaggtgttccgcgacatcgtcggcagcgcctactacatcgcgccggaggtgctcaagaggaagtacggccccgaggccgacatctggagcatcggcgtcatgctctacatcttcctcgccggcgtgccgcccttctgggccgagtcggagaacgccatcttcaccgccatccttcgcggacagatcgacctcgccagtgagccatggccgaagatctcctctggagccaaggacctcgtcaggaagatgctcaacatcaaccccaaggagaggcttacagcattccaagtgctcaatcacccgtggatcaaagaagatggggatgctcctgatgtaccacttgacaatgttgttctcaacaggctcaagcagttcagggccatgaaccagttcaagaaagctgcactgaggattatagccggatgcctgtcagaggaggagatcaaggggctgaaggagatgttcaagaacatcgacaaggacaatagtgggaccattacgcttgaggagctcaaaaatgggttagcaaagcagggcaccaagttttcagacaacgaaattgagcaactgatggaagcagctgatgctgatggcaatggaattatcgactatgaggagttcgtcaccgcgacagtgcacatgaacaaaatggatcgagaagagcacctttacacggcattccagtactttgacaaggataatagtgggtacatcacaaaggaagagctcgagcaagccttgaaggaacaagggttatacgacgccaacgagatcaaggatgtcatcacagatgcagactctaataatgatgggcggatagattattcagagtttgtggccatgatgaggaaaggatcaggctgtgcagaagcaacaaacccaaagaagaagaggcgagatctagttctatag

SEQ ID NO: 4743 - protein, 541 aa, Oryza sativa
MGQCCTGGGKAVAGDEAEPGTSKAAPPSRGTSSKNGSAKQQPCSPAAKAAATEAAAAASSSKKPAGPIGEVLERPMEEVRTTYSIGKELGRGQFGVTHLCTHKATGEKLACKTIAKRKLANKEDVDDVRREVQIMHHLSGQPNIVDLRGAYEDKHNVHLVMELCAGGELFDRIIARGHYTERAAAALLRAIVGIVHTCHSMGVIHRDLKPENFLLLSKGDDAPLKATDFGLSVFFKEGEVFRDIVGSAYYIAPEVLKRKYGPEADIWSIGVMLYIFLAGVPPFWAESENAIFTAILRGQIDLASEPWPKISSGAKDLVRKMLNINPKERLTAFQVLNHPWIKEDGDAPDVPLDNVVLNRLKQFRAMNQFKKAALRIIAGCLSEEEIKGLKEMFKNIDKDNSGTITLEELKNGLAKQGTKFSDNEIEQLMEAADADGNGIIDYEEFVTATVHMNKMDREEHLYTAFQYFDKDNSGYITKEELEQALKEQGLYDANEIKDVITDADSNNDGRIDYSEFVAMMRKGSGCAEATNPKKKRRDLVL

SEQ ID NO: 4744 - DNA, 1542 bp, Oryza sativa
  CDS (1)..(1542)
atgcagccggacccgagcgggagcggcggcgacggcaacgccaatgcgaaggcgaagctggcgccgccgccggtgacggcggcgggaggtcggccggtgtcggtgctgccgcacaagacggcgaacgtgcgcgaccactaccgcatcgggaagaagctcgggcaggggcagttcgggacgacgtacctgtgcgtggacaaggcgagcggcggcgagttcgcgtgcaagtccatccccaagcggaagctgctgtgccgggaggactacgaggacgtgtggcgcgagatccagatcatgcaccacctctccgagcaccccaacgtcgtccgcatccgcggcgcctacgaggacgcgctgttcgtccacatcgtcatggagctctgcgccggcggcgagctcttcgaccgcatcgtcgccaagggccactacaccgagcgcgccgccgcgcagctcatccgcaccatcgtcgccgtcgtcgagggatgccactcgctcggcgtcatgcaccgggacctcaagcccgagaacttcctcttcgccagcgccgccgaggacgcccccctcaaggccactgatttcggcctctccatgttctacaagcctggtgataagttctctgatgttgttgggagcccctattatgttgcacctgaggtacttcagaaatgctatggtccagaatctgatgtctggagtgctggggtaattctttacattttgctatgtggtgttccaccattttgggcagaaactgaagctggaattttcaggcagattctacgaggcaaacttgattttgaatctgaaccctggcctagcatctctgacagtgctaaagatctagtccgtaatatgctttgccgggatcctacaaagagacttacagcccatgaggttctctgtcatccatggattgttgatgatgctgtggcacctgacaagcctattgattctgctgttttgtcaagactgaagcacttttcggcaatgaacaagctcaagaagatggcattgagggttattgctgaaagcctgtctgaggaagagattggaggactaaaggagctattcaaaatgattgatactgacgatagtggaactataacttttgatgagctgaaagagggcttgaaaagggtgggttcagaattaacagaacatgaaatccaggctttaatggaagcggctgatatcgacaacagtggaaccatcgactatggtgaattcattgctgctactctccacatgaataagctagagagggaggaaaacttagtatcagcattctcatttttcgacaaagatggaagtggtttcataactattgatgagctgtcacaagcatgccgcgaatttggccttgatgatcttcaccttgaggatatgattaaagatgttgatcaaaacaatgacggacaaattgactacagcgagttcacggcgatgatgagaaagggcaatgctggtggagctggaaggagaaccatgaggaacagcttgcagttgaatcttggtgagatcttgaaccccagcaacagctaa

SEQ ID NO: 4745 - protein, 513 aa, Oryza sativa
MQPDPSGSGGDGNANAKAKLAPPPVTAAGGRPVSVLPHKTANVRDHYRIGKKLGQGQFGTTYLCVDKASGGEFACKSIPKRKLLCREDYEDVWREIQIMHHLSEHPNVVRIRGAYEDALFVHIVMELCAGGELFDRIVAKGHYTERAAAQLIRTIVAVVEGCHSLGVMHRDLKPENFLFASAAEDAPLKATDFGLSMFYKPGDKFSDVVGSPYYVAPEVLQKCYGPESDVWSAGVILYILLCGVPPFWAETEAGIFRQILRGKLDFESEPWPSISDSAKDLVRNMLCRDPTKRLTAHEVLCHPWIVDDAVAPDKPIDSAVLSRLKHFSAMNKLKKMALRVIAESLSEEEIGGLKELFKMIDTDDSGTITFDELKEGLKRVGSELTEHEIQALMEAADIDNSGTIDYGEFIAATLHMNKLEREENLVSAFSFFDKDGSGFITIDELSQACREFGLDDLHLEDMIKDVDQNNDGQIDYSEFTAMMRKGNAGGAGRRTMRNSLQLNLGEILNPSNS

SEQ ID NO: 4746 - DNA, 1626 bp, Oryza sativa
  CDS (1)..(1626)
atgggccagtgctgcacgggtggcgggaaggccgtcgccggcgacgaggcagagccagggacctccaaggcggcgccgccgagccgcggcacctcctccaaaaatgggtccgccaagcagcagccgtgctcgccggcggccaaggcggcggcgacggaagcggcggcggcggcgtcgtcgtccaagaagccggcaggccccatcggcgaggtgctggagcggccgatggaggaggttcgcacgacgtactccatcggcaaggagctcgggcgcgggcagttcggcgtgacccacctgtgcacccacaaggccaccggcgagaagctggcgtgcaagacgatcgcgaagcggaagctggcgaacaaggaggacgtcgacgacgtccgccgcgaggtgcagatcatgcaccacctctctggccagcccaacatcgtcgacctccgcggcgcctacgaggacaagcacaacgtccacctcgtgatggagctctgcgccggcggcgagctcttcgaccgcatcatcgcgcgtggccactacacggagcgcgccgcggcggcgctcctccgcgccatcgtcgggatcgtgcacacctgccactccatgggggtgatccaccgggacctcaagccggagaacttcctgctgctgagcaaaggggacgacgcgccgctcaaggccaccgacttcggcctctccgtcttcttcaaggaaggcgaggtgttccgcgacatcgtcggcagcgcctactacatcgcgccggaggtgctcaagaggaagtacggccccgaggccgacatctggagcatcggcgtcatgctctacatcttcctcgccggcgtgccgcccttctgggccgagtcggagaacgccatcttcgccgccatccttcgcggacagatcgacctcgccagtgagccatggccgaagatctcctctggagccaaggacctcgtcaggaagatgctcaacatcaaccccaaggagaggcttacagcattccaagtgctcaatcacccgtggatcaaagaagatggggatgctcctgatgtaccacttgacaatgttgttctcaacaggctcaagcagttcagggccatgaaccagttcaagaaagctgcactgaggattatagccggatgcctgtcagaggaggagatcaaggggctgaaggagatgttcaagaacatcgacaaggacaatagtgggaccattacgcttgaggagctcaaaaatgggttagcaaagcagggcaccaagttttcagacaacgaaattgagcaacttatggaagcagctgatgctgatggcaatggaattatcgactatgaggagttcgtcaccgcgacggtgcacatgaacaaaatggatcgagaagagcacctttacacggcattccagtactttgacaaggataatagtgggtacatcacaaaggaagagctcgagcaagccttgaaggaacaagggttatacgacgccaacgagatcaaggatgtcatcacagatgcagactctaataatgatgggaggatagattattcagagtttgtggccatgatgaggaaaggatcaggctgtgcagaagcaacaaacccaaagaagaagaggcgagatctagttctatag

SEQ ID NO: 4747 - protein, 541 aa, Oryza sativa
MGQCCTGGGKAVAGDEAEPGTSKAAPPSRGTSSKNGSAKQQPCSPAAKAAATEAAAAASSSKKPAGPIGEVLERPMEEVRTTYSIGKELGRGQFGVTHLCTHKATGEKLACKTIAKRKLANKEDVDDVRREVQIMHHLSGQPNIVDLRGAYEDKHNVHLVMELCAGGELFDRIIARGHYTERAAAALLRAIVGIVHTCHSMGVIHRDLKPENFLLLSKGDDAPLKATDFGLSVFFKEGEVFRDIVGSAYYIAPEVLKRKYGPEADIWSIGVMLYIFLAGVPPFWAESENAIFAAILRGQIDLASEPWPKISSGAKDLVRKMLNINPKERLTAFQVLNHPWIKEDGDAPDVPLDNVVLNRLKQFRAMNQFKKAALRIIAGCLSEEEIKGLKEMFKNIDKDNSGTITLEELKNGLAKQGTKFSDNEIEQLMEAADADGNGIIDYEEFVTATVHMNKMDREEHLYTAFQYFDKDNSGYITKEELEQALKEQGLYDANEIKDVITDADSNNDGRIDYSEFVAMMRKGSGCAEATNPKKKRRDLVL

SEQ ID NO: 4748 - DNA, 1581 bp, Oryza sativa
  CDS (1)..(1581)
atgcagcctgacccgcagccgcatgggcgggggagggagaaggcggcgggggcgggcccgcggctcccgccgccggtgaccgcgccgtcggtggggcggccggcgtcggtgctcccccacaagacggcgaacgtgcgggaccactaccgcatcgggaagaagctggggcaggggcagttcgggaccacgtacctgtgcgtggggaagcccgacggcggcgagtacgcgtgcaagtccatccccaagcggaagctgctgtgccgggaggactacgaggacgtgtggcgcgagatccagatcatgcaccacctctccgagcacccaaacgtcgtccgcatccggggcgcctacgaggacgcgctgttcgtccacatcgtcatggagctctgcgccggcggcgagctcttcgaccgcatcgtcgccaagggccactacaccgagcgcgccgccgcgctgctcatcaggaccatcgtcggggtcgtcgaagggtgccactcgctcggcgtcatgcaccgcgacctcaagccggagaacttcctcttcgccagcaccgccgaggacgccccgctcaaggccaccgatttcgggctctccgtgttctacaagcccggtgacaaattttctgatgttgttgggagcccttattatgtcgcacctgaggtgcttcaaaaaatctatggcccagaagctgacgtctggagtgctggggtaatcctgtacattttgctgtgtggtgtgcccccattttgggcagaaactgaatctggaatcttcaggcaaattcttagaggcaaacttgatttggaatctgatccgtggcctagtatatctgatagtgctaaagatctagtccgtaatatgcttatccgtgatcctacaaagagatttactgctcacgaggttctctgtcatccatggattgttgatgatgctgtggcacctgataagcctattgattctgctgttttgtcaaggctgaaacacttttctgcaatgaacaagctcaagaagatggctttgagggttattgctgaaagcctatctgaagaagagatcggaggtttgaaggaattgtttaaaatgatcgatactgacaatagtgggacgataacttatgatgaactgaagaatggcctgaaaagggtgggctcagatctaatggaaccagaaatccaggctttaatggatgccgctgatattgacaacagtggaaccatcgactatggtgaattcttagcagctactttgcacatgaataaactggagagggaggaaaacttggtgtcagcattcacgttctttgataaggatggaagtggcttcataaccattgatgagctctcgcaagcctgcgaacagtttggcctttctgatgttcatcttgaggatatgatcaaagatgtggatcaaaataatgatggacaaattgattacagcgagtttgccgcgatgatgagaaagggcaatgctggtggagccaatgctggtggagtcacttctactggtggaacaggaaggagaacaatgaggaacagcttgcgtgtgaatcttggcgacatcttgaaacccaacgaaaactga

SEQ ID NO: 4749 - protein, 526 aa, Oryza sativa
MQPDPQPHGRGREKAAGAGPRLPPPVTAPSVGRPASVLPHKTANVRDHYRIGKKLGQGQFGTTYLCVGKPDGGEYACKSIPKRKLLCREDYEDVWREIQIMHHLSEHPNVVRIRGAYEDALFVHIVMELCAGGELFDRIVAKGHYTERAAALLIRTIVGVVEGCHSLGVMHRDLKPENFLFASTAEDAPLKATDFGLSVFYKPGDKFSDVVGSPYYVAPEVLQKIYGPEADVWSAGVILYILLCGVPPFWAETESGIFRQILRGKLDLESDPWPSISDSAKDLVRNMLIRDPTKRFTAHEVLCHPWIVDDAVAPDKPIDSAVLSRLKHFSAMNKLKKMALRVIAESLSEEEIGGLKELFKMIDTDNSGTITYDELKNGLKRVGSDLMEPEIQALMDAADIDNSGTIDYGEFLAATLHMNKLEREENLVSAFTFFDKDGSGFITIDELSQACEQFGLSDVHLEDMIKDVDQNNDGQIDYSEFAAMMRKGNAGGANAGGVTSTGGTGRRTMRNSLRVNLGDILKPNEN

SEQ ID NO: 4750 - DNA, 1692 bp, Oryza sativa
  CDS (1)..(1692)
atgggcaactgctgcgtgtcccggccgtccggcgccgacaagcggcggcgctgcggcagctccaccgccccgcacacccgcggcggcaggcgggtgatcggcgccgccaacatgcggtgcctctccacggtctcctccgtgtcggacgcggcgcgcgccgtgatgtcgaacgagccggcgaccgtgctgggcaacagcggcagcagcggcaacggcggcgtgatggcggcggaggagatgctgcggcggtacgagatcggggaggagctgggtcggggggagttcggggtgacgcggcggtgccgggacgcggtgacgggggagcggctggcgtgcaagtcgatcagcaagcggaagctccggagcagcgtggacgtggaggacgtgcggcgggaggtggccatcatgcggtcgctgccggcgcacgccaacgtggtgaggctccgggaggcgttcgaggacgccgacgccgtccacctcgtcatggaggtctgcgagggcggcgagctcttcgaccgcatcgtcgcccgcggccactacaccgagcgcgccgccgccgccgtcatgcgcaccatcatggacgtcgtccagcactgtcacaagaacggcgtcatgcatcgggacctcaaacctgagaactttctgtatgccaatgcatctgagaactcccctctcaaggtcatcgacttcggcctctcagtgtgcttcaaacctggtgcaagattcaatgagattgttggatctccctactacatggcaccagaagtcctgaagagaaactatggacaagaaatagacatatggagtgcaggagtcatactgtacatcttgctatgtggtgttcctcctttctgggccgagaccgacgaagggatcgcacaggccatcatccggtcacatatcgacttccaaagagagccttggccaaaggtgtcagataatgccaaggatcttgtaaggaggatgcttgatccaaacccatatactcggttgacggctcaacaggttctagagcatccttggatacagaatgcaagtgcagctcccaacattcctctgggagaagcagtcaggtccaggctgaagcaattcactgttatgaacaagttcaagaagaaggccttacttgtggtggcggagtacttaccaaccgaagagctggatgcaatcagggagctgttcaatatgttggacaccaaaaagaaggggcacttgacactagaagagctcagaaagggactgcaagtgatagggcacaacatccatgacacagatgtcgatatgctcatggaagctgcagacatagatggaaatggcatactggattgcaaggagtttgtgacagtatccattcacctgaagaaaatccgtagcgatgagcaccttccgaaggtgttcagcttcttcgacaagaacggcagcgggtacatagagatcgaagagttgaaagaagccctctccccaagaggtgaccagaagtcgatcgacgacatatttctggatgttgacatagacaaggatgggaagataagctacgaggagtttgagttaatgatgtcagccggaatggactggaggaatgcatcccggcaatactcgagagcagtttacaacactctcagccgcaagatattcaaggaagtgtccctgaagcttgatcacagtggtccacttgttgcagcaggaaaatag

SEQ ID NO: 4751 - protein, 563 aa, Oryza sativa
MGNCCVSRPSGADKRRRCGSSTAPHTRGGRRVIGAANMRCLSTVSSVSDAARAVMSNEPATVLGNSGSSGNGGVMAAEEMLRRYEIGEELGRGEFGVTRRCRDAVTGERLACKSISKRKLRSSVDVEDVRREVAIMRSLPAHANVVRLREAFEDADAVHLVMEVCEGGELFDRIVARGHYTERAAAAVMRTIMDVVQHCHKNGVMHRDLKPENFLYANASENSPLKVIDFGLSVCFKPGARFNEIVGSPYYMAPEVLKRNYGQEIDIWSAGVILYILLCGVPPFWAETDEGIAQAIIRSHIDFQREPWPKVSDNAKDLVRRMLDPNPYTRLTAQQVLEHPWIQNASAAPNIPLGEAVRSRLKQFTVMNKFKKKALLVVAEYLPTEELDAIRELFNMLDTKKKGHLTLEELRKGLQVIGHNIHDTDVDMLMEAADIDGNGILDCKEFVTVSIHLKKIRSDEHLPKVFSFFDKNGSGYIEIEELKEALSPRGDQKSIDDIFLDVDIDKDGKISYEEFELMMSAGMDWRNASRQYSRAVYNTLSRKIFKEVSLKLDHSGPLVAAGK

SEQ ID NO: 4752 - DNA, 1839 bp, Oryza sativa
  CDS (1)..(1839)
atgggcaacgtctgcatcggcccgcgccgcaacttcgccaagaacggcctcctcggcatcctgcggccgcgccacgccgcgccgtcctccccgtcgcagcccaccaccacctcccgctccatccccgtcgtgctcccctccgccccctcctccaagccgccgccgcccacccagaccgccccgcccgtacccgtcgtcatctccgagccgccgccaccgcagccgcagcccgaaccgcagcccgcggcgccgtcgcagccgccgccaccgcaggagcagccctcgccgccaccgcccgcgtcgtcgaacaccacccagcagcctccgccgccgcagcagcggcagcagtcgcgcgccaagaagccggcgcacatcaagcgcatctccagcgccggcctgcaggtggagtcggtgctccggcgaaagacggagaatctcaaggacaaatacagcctggggcgcaaactcggtcagggccagttcgggacgacgtacctgtgcgtcgacaaggcgaacggcggcgagtacgcgtgcaagtcgatcgccaagcggaagctactcaccgacgaggacgtggaggacgtccgccgcgagatccagatcatgcaccacctcgccggccaccccaacatcatctccatccgcggcgcctacgaggacgccgtggcggtgcacgtcgtcatggagctctgcgccggcggcgagctgttcgaccggatcgtgcgcaaggggcactacacggagcggcaggcggccgggctcgcccgcgtcatcgtcgccgtcgtcgagtcgtgccactcgctcggcgtcatgcaccgcgacctcaagcccgagaacttcctgttcgtcggcaacgaggaggacgcgccgctcaagaccatcgacttcggcctctccatgtttttccgcccaggcgaggtgttcaccgacgtggtggggagcccgtactacgtggcgccggaggtgctgaagaagagctacgggcaggaggccgacgtgtggagcgccggcgtcatcatctacatcctcctctgcggcgtgccgccgttctgggcagagacggagcaggggatattcgagcaggtgctgcacgggacgctggacttcgagtcggacccatggccgaacgtgtcggatggcgccaaggacctcctccgcaaggtgctcgtccgggaccccaagaagcggctcaccgcgcacgaagtcctatgccatccatggctgcagatgagcgggtcggcgccggacaagccgctggactcggcggtgctgtcgcggctgaggcagttctcggccatgaacaagctcaagaagatggcattgagagtgatcgcggagaacttgtcggaggaggagatcgccgggttgaaggagatgttcaagatgatggacacggacaacagcgggcagatcaactacgaggagctcaaggccgggttggagagagtgggtgccaacatgaaggagtctgaaatttatcagctcatgcaggctgctgatatcgacaatagtggcaccatagattatggagaattcatagctgccactctacacctcaacaaagttgaaagggaagatcatctatatgccgccttccaatacttcgacaaagatggcagtggatacatcacatctgatgagctccagcaagcctgcgatgagtttggtatcgaggatgttcgactcgaagacatgataggcgaagtagatcaggacaatgatgggcgtatagattacaacgagtttgtcgcgatgatgcagaaaacaacaacagggttcgggaagaaaggcggtcataattttagcggttttagggatgccttgaagtcacatagctga

SEQ ID NO: 4753 - protein, 612 aa, Oryza sativa
MGNVCIGPRRNFAKNGLLGILRPRHAAPSSPSQPTTTSRSIPVVLPSAPSSKPPPPTQTAPPVPVVISEPPPPQPQPEPQPAAPSQPPPPQEQPSPPPPASSNTTQQPPPPQQRQQSRAKKPAHIKRISSAGLQVESVLRRKTENLKDKYSLGRKLGQGQFGTTYLCVDKANGGEYACKSIAKRKLLTDEDVEDVRREIQIMHHLAGHPNIISIRGAYEDAVAVHVVMELCAGGELFDRIVRKGHYTERQAAGLARVIVAVVESCHSLGVMHRDLKPENFLFVGNEEDAPLKTIDFGLSMFFRPGEVFTDVVGSPYYVAPEVLKKSYGQEADVWSAGVIIYILLCGVPPFWAETEQGIFEQVLHGTLDFESDPWPNVSDGAKDLLRKVLVRDPKKRLTAHEVLCHPWLQMSGSAPDKPLDSAVLSRLRQFSAMNKLKKMALRVIAENLSEEEIAGLKEMFKMMDTDNSGQINYEELKAGLERVGANMKESEIYQLMQAADIDNSGTIDYGEFIAATLHLNKVEREDHLYAAFQYFDKDGSGYITSDELQQACDEFGIEDVRLEDMIGEVDQDNDGRIDYNEFVAMMQKTTTGFGKKGGHNFSGFRDALKSHS

SEQ ID NO: 4754 - DNA, 1737 bp, Brassica napus
  CDS (1)..(1737)
atggggatgtgccacggcaaacccatcgagcaccaatcaaaacagagcctcccatctcccgacgaacctcagcctcctcctcctcctcctccggcggcgaaatcctccggctttccgttttacagcccaagccctttacccagcttgttcaaatcctctccctccgtctcgtcgagcgcgagctcaacgcctctccgcatcttcaagagacctttccctcctccttcccctgccaagcacatacgcgctttcctcgcgcgtcgccacggctcctccgccaagccccccagcgaggtctcgatccccgaaggggaggagttcgagatcggtcttgataagagcttcgggttctcgaagcacttcgcgtcgcattacgagattgatggggaggtgggtcgggggcattttgggtatacttgctctgccaagggtaaaaagggaagcttgaagggtcaagaagttgctgttaaagtcatccctaagtcaaagatgacgactgcaattgcaattgaggacgttagtagagaagtgaagatactgcgagctctgactggtcacaagaacttagtccagttctatgacgcttttgaagatgatgaaaatgtttatattgtgatggagttatgtaaaggtggtgaactcttggacaaaatacttcaaaggggtggcaaatactcagaagatgatgctaaacaagttatggttcagattcttagtgtagtagcttactgtcatctacaaggtgtggttcaccgtgaccttaaacccgagaactttctcttcagcactaaggatgagacttctcctctaaaagcaatagactttggtctctctgattacgtcaagccagatgaaaggttgaatgatattgtaggaagtgcttactacgtagccccagaggttctgcaccgtacatacggaacagaagctgacatgtggagtataggagtgattgcttatattcttctctgtgggagcagacccttttgggcacgtactgaatccggaatctttagagctgttcttaaagcagaaccaaactttgaagaagctccttggccttcactatcacctgatgctgtagattttgtgaaaaaattgctgaataaagattaccgtaaaagactaaccgcagcacaggctttgtgtcatccgtggctggttgcttcccatgagctgaagataccatctgatatgatcatatacaagcttgtgaaagtgtacataatgtcaacttctttgagaaaatctgctttgcaggctcttgccaagacattaactgtaccacagttagcttatctgagggagcagtttacattgctggggccaagcaaaaatggatacatctcaatgcagaattacaaaacagcaatcctgaagactgcaacagatgctactaaggactcacgagtattagattttgttcacatgataagttgtcttcaatacaagaagctagactttgaagagttctgtgcatcagcattaagtgtttaccagctggaagcaatggaaacgtgggagcaacacgcacggcgtgcttacgagttgtttgagaaagatgggaatagacccatcatgattgaggaacttgcatcggaacttggactggggccatcagttccagtgcacgttgtgcttcaggattggataagacattcagatgggaagcttagtttcttgggttttgtcaggctactacacggcgtttcttctcggacgttacagaaagcttag

SEQ ID NO: 4755 - protein, 578 aa, Brassica napus
MGMCHGKPIEHQSKQSLPSPDEPQPPPPPPPAAKSSGFPFYSPSPLPSLFKSSPSVSSSASSTPLRIFKRPFPPPSPAKHIRAFLARRHGSSAKPPSEVSIPEGEEFEIGLDKSFGFSKHFASHYEIDGEVGRGHFGYTCSAKGKKGSLKGQEVAVKVIPKSKMTTAIAIEDVSREVKILRALTGHKNLVQFYDAFEDDENVYIVMELCKGGELLDKILQRGGKYSEDDAKQVMVQILSVVAYCHLQGVVHRDLKPENFLFSTKDETSPLKAIDFGLSDYVKPDERLNDIVGSAYYVAPEVLHRTYGTEADMWSIGVIAYILLCGSRPFWARTESGIFRAVLKAEPNFEEAPWPSLSPDAVDFVKKLLNKDYRKRLTAAQALCHPWLVASHELKIPSDMIIYKLVKVYIMSTSLRKSALQALAKTLTVPQLAYLREQFTLLGPSKNGYISMQNYKTAILKTATDATKDSRVLDFVHMISCLQYKKLDFEEFCASALSVYQLEAMETWEQHARRAYELFEKDGNRPIMIEELASELGLGPSVPVHVVLQDWIRHSDGKLSFLGFVRLLHGVSSRTLQKA

SEQ ID NO: 4756 - DNA, 1725 bp, Brassica napus
  CDS (1)..(1725)
atgggtctctgtttctcctccgccaaagtctccggccgccaacaccgcagcccccggagtcccaacccaccacatcatcccctcaccgtcgctaaacccaaaccgccgcaaacgccatgttcattcctagccgttacgatccagaaagaccacaaggcccaacagcgacgtaacgccgcgacgacggcgaataagaaaacgccgccgcagacgcaaacgcgacagacgccaacgcacgggaaggcgagagagaaggcgaagagacacggagaaaagatcccgtacggtaagcgcgtggatttcgggtacgctaaagatttcgataaccgttacaccatcgggaagttgctcggacatggccagttcggttatacgtacgtagctaccgataaaaagacaggagatcgtgtcgctgtgaagaaaatcgataaagccaagatgacactgccgatagctgtggaagatgttaggagagaggtgaagatacttcaagctttaactggtcatgaaaacgtggttcggttctacaatgccttcgaggacaagaactctgtttatatagccatggagttatgcgagggtggtgaattgctggatcggatattagccaagaaagatagtcattataccgagagagacgcggccgtggtagtgagacagatgctaaaagttgcagctgaatgtcatttacgtggtttggttcatagagatatgaaaccagagaattttctgttcaaatcaactgaagaagattcggctctaaaagctacagatttcggtttatcagacttcataaaaccaggcaagaagtttcatgatatagtagggagcgcgtattacgtagcacctgaagtattgaaacgaaggtcaggacctgaatcagatgtatggagtattggtgttatcagttacattcttctctgcgggagacgacctttctgggataagactgaagatggtattttcaaagaggtattgaagaacaaacctgacttcagaagaaaaccatggccaaccattagcaacagcgccaaagatttcgttaagaagttgttagtaaaagacccaagagctagattaacagctgcgcaggcactatcacatccatgggttagagaaggaggagatgcaactgagattcccatagacatatctgttctcagcaatatgcgtcagtttgttaaattcagccgcctcaagcaattcgcattaagggctcttgcaacgacgcttgatgaagaggagttggctgatcttagagaccagtttggtgcgatggatgctgataagaatggagccattagccttgacgagatgcggcaggcccttgcgaaagatcatccgtggaagcttaaagatgcacgagtcgctgagattcttcaagcgattgatagcaacacagatggatttgtggattttgaagagtttgttgctgctgcgttacacgtaaatcaactagaggagcatgattctgagaaatggcaacagagatcaagagcagcatttgagaaattcgatatagacggagatggatttataacagcagaagaacttcgaatgcatactggcttgaaagggtccattgagccactacttgaagaagcagacattgatcatgatggtaaaatcagtctccatgagtttcgtagacttttgaaaactgcgagtatcaaatcaagaaatgttagaaaccctcctggttatcttatttctcggaaagcctga

SEQ ID NO: 4757 - protein, 574 aa, Brassica napus
MGLCFSSAKVSGRQHRSPRSPNPPHHPLTVAKPKPPQTPCSFLAVTIQKDHKAQQRRNAATTANKKTPPQTQTRQTPTHGKAREKAKRHGEKIPYGKRVDFGYAKDFDNRYTIGKLLGHGQFGYTYVATDKKTGDRVAVKKIDKAKMTLPIAVEDVRREVKILQALTGHENVVRFYNAFEDKNSVYIAMELCEGGELLDRILAKKDSHYTERDAAVVVRQMLKVAAECHLRGLVHRDMKPENFLFKSTEEDSALKATDFGLSDFIKPGKKFHDIVGSAYYVAPEVLKRRSGPESDVWSIGVISYILLCGRRPFWDKTEDGIFKEVLKNKPDFRRKPWPTISNSAKDFVKKLLVKDPRARLTAAQALSHPWVREGGDATEIPIDISVLSNMRQFVKFSRLKQFALRALATTLDEEELADLRDQFGAMDADKNGAISLDEMRQALAKDHPWKLKDARVAEILQAIDSNTDGFVDFEEFVAAALHVNQLEEHDSEKWQQRSRAAFEKFDIDGDGFITAEELRMHTGLKGSIEPLLEEADIDHDGKISLHEFRRLLKTASIKSRNVRNPPGYLISRKA

SEQ ID NO: 4758 - DNA, 1650 bp, Brassica napus
  CDS (1)..(1650)
atgggcaattcatgccgtggttctttcaaggacaaaacctacgagggcaataacaacaacctgcccgaggagaattccatcaccatcacccacgattcctccgttcattccccgaccacagaacaagacttccctaaagaagacaacaacaacaacaacaagagtcctgttcttgtgcttcccgtgaaagaaccttttatgcgacgtaacatggacaaccaagcttactacgttctcggtcacaagactcctaacatccgtgatctttacaccttgagccgtaagttaggacaaggacagttcgggaccacgtatctctgcaccgaggtcgcaacgggtgttgactatgcttgcaagtctatatccaagaggaagttgatatctaaggaagatgttgaggatgttaggagggagattcagataatgcaccatttggctggtcacaagaacattgttacgataaaaggagcttatgaggaccctttgtatgttcacattgtgatggaggtttgtgctggtggtgagttgtttgataggattattcagagaggtcattacaccgagaggaaagctgctgagttgaccaagattgttgttggtgttgttgaggcgtgtcattcgcttggtgtcatgcatagagacttgaagcctgagaatttcttgttggttaataaggatgatgatttctctcttaaggccattgattttggtctctctgttttcttcaaaccaggccaaatatttaaggatgttgttggaagtccatactatgttgctcctgaggttcttcttaaacattatggtcctgaagctgatgtgtggactgctggtgttatactatatattctactaagtggtgtccctcctttttgggcagaaacacaacaaggaatatttgatgctgtcttgaaaggagatatagactttgagtcagatccgtggcctgtgatttccgacagtgctaaagatctgatcaggaagatgttatgctctaatccctctgaacgcttgacagctcatgaagtcatgcgtcatccatggatctgcgagaacggagttgcaccagacagagctcttgatcctgctgttctgtctcgtctcaaacagttttctgcaatgaataaattaaagaagatggctttaaaggtgatagctgagagtctctcagaagaagaaattgcaggtttaagagcaatgtttgaggcaatggatacagataacagcggtgcaatcacttttgatgaacttaaagctggtctgagaagatatggctctactttgaaagacactgagatccaagatcttatggaagcggctgatgtggataacagcggtacaatagattacagtgagttcattgcagcgaccatccatctgaataagctagacagagaagagcatcttgtctctgcgtttcagtactttgataaagatggaagtggttacatcaccattgatgagctgcaacaatcttgcgtggaacatgggatgaccgatgtttttcttgaagatgtaatcaaagaagttgatcaagacaatgatggacggattgactatggagaatttgttgcaatgatgcaaaagggaaatgctggtatcgggaggcgaacaatgagaaatagcctgaacatcagcatgagagatgcttag

SEQ ID NO: 4759 - protein, 549 aa, Brassica napus
MGNSCRGSFKDKTYEGNNNNLPEENSITITHDSSVHSPTTEQDFPKEDNNNNNKSPVLVLPVKEPFMRRNMDNQAYYVLGHKTPNIRDLYTLSRKLGQGQFGTTYLCTEVATGVDYACKSISKRKLISKEDVEDVRREIQIMHHLAGHKNIVTIKGAYEDPLYVHIVMEVCAGGELFDRIIQRGHYTERKAAELTKIVVGVVEACHSLGVMHRDLKPENFLLVNKDDDFSLKAIDFGLSVFFKPGQIFKDVVGSPYYVAPEVLLKHYGPEADVWTAGVILYILLSGVPPFWAETQQGIFDAVLKGDIDFESDPWPVISDSAKDLIRKMLCSNPSERLTAHEVMRHPWICENGVAPDRALDPAVLSRLKQFSAMNKLKKMALKVIAESLSEEEIAGLRAMFEAMDTDNSGAITFDELKAGLRRYGSTLKDTEIQDLMEAADVDNSGTIDYSEFIAATIHLNKLDREEHLVSAFQYFDKDGSGYITIDELQQSCVEHGMTDVFLEDVIKEVDQDNDGRIDYGEFVAMMQKGNAGIGRRTMRNSLNISMRDA

SEQ ID NO: 4760 - DNA, 1599 bp, Brassica napus
  CDS (1)..(1599)
atgggacacagacacagcaagtccaaatcctccggtccgccaccgtcctcctcctcctcctcttcctccaccaacgtcgtccaccatgtccaaccttccggagaacgccgcggatcttccggttctggccccacacccgtcggatcttcctcaaccggcggatcccgctccgccgcatctgctcagcagaacggtcggatcttaggccgtccgatggagaatgtcaggggaacgtacgatttcggcaaggagcttggtcgtggccagttcggagtcacgtatctcgtcactcacaaagagaccaaaaaactcttcgcctgcaagtcgatccccacgcgccgcctcgtccaccgtgacgacattgaagacgtccgccgtgaagtccagattatgcaccatctcagtggtcacaggaacatagtggacttgaagggagcttacgaggacagacactcggtgaatctgataatggagctgtgcgaaggaggggagcttttcgacaggatcatagcgaaaggccattacacggagagagccgctgcggatttgtgcaggcagatggtgatggttgtgcatagttgccactctatgggtgtgatgcaccgtgatttgaagcctgagaactttctctttctcagcaaagatgagaactctccgttgaaagctacagactttggtctatccgtcttctttaaaccaggagataagtttaaggatcttgttgggagtgcatactatgtggccccggaggttttgaaacggaactatggaccagaggctgatatctggagtgccggtgtgattctcttcatccttatcagcggtgttccgccgttttggggagaaaatgagacagggatctttgatgctattctaaaaggagagcttgacttctcagctgatccgtggccaacggtgtcggctggtgccaaagatcttgtgaagaaaatgttgaagtatgatcctaaagaccggcttacagctagcgaagtgctgaaccatccgtggattaaagaagatggagaggcctcagacaaaccgcttgacaatgctgtgttgtccaggatgaaacagttcagagccatgaacaaactaaagaaaatggcactgaatgtaattgcagagaacctgtctgaagaagaaatcattggtctgaaagagatgttcaaagctctagacaccgataaaaacggaatagtcaccttggaggaattgagaaccggtctcccaaagcttggcaataagatctctgaggctgaaataaaacagttaatggaagcagctgatatggatggagatggatcgatagattacttggagtttatatcagcgacaatgcatatgaacagaatcgaacgtgaggatcatttgtacactgctttccagtacttcgacaaggacaacagcgggtacataacaatggaagagctagagcaggccatgaagaaatacaacatgggtgatgacaaatccattaaagagatcattgctgaagttgacaccgatcgtgacgggaaaataaactacgaagagttcgtagcgatgatgaagaagggaaatccagaactggtgacgaaccgacgcagagtcaacatgtaa

SEQ ID NO: 4761 - protein, 532 aa, Brassica napus
MGHRHSKSKSSGPPPSSSSSSSSTNVVHHVQPSGERRGSSGSGPTPVGSSSTGGSRSAASAQQNGRILGRPMENVRGTYDFGKELGRGQFGVTYLVTHKETKKLFACKSIPTRRLVHRDDIEDVRREVQIMHHLSGHRNIVDLKGAYEDRHSVNLIMELCEGGELFDRIIAKGHYTERAAADLCRQMVMVVHSCHSMGVMHRDLKPENFLFLSKDENSPLKATDFGLSVFFKPGDKFKDLVGSAYYVAPEVLKRNYGPEADIWSAGVILFILISGVPPFWGENETGIFDAILKGELDFSADPWPTVSAGAKDLVKKMLKYDPKDRLTASEVLNHPWIKEDGEASDKPLDNAVLSRMKQFRAMNKLKKMALNVIAENLSEEEIIGLKEMFKALDTDKNGIVTLEELRTGLPKLGNKISEAEIKQLMEAADMDGDGSIDYLEFISATMHMNRIEREDHLYTAFQYFDKDNSGYITMEELEQAMKKYNMGDDKSIKEIIAEVDTDRDGKINYEEFVAMMKKGNPELVTNRRRVNM

SEQ ID NO: 4762 - DNA, 1632 bp, Brassica napus
  CDS (1)..(1632)
atgggtaactgtaacgtctgtgtgagaccccctaaccccgaagaatcgaaaccgaagaaaaccaaccaaaaccggaaattaaacccattcacctccgatttcatcagatcccccgctcgaacccgcgcccccaaggacgcggtaatccccacgagccaccagaccaagatcaccgacaagtacatcctcggccgagagctaggccgcggcgagttcgggatcacctacctctgcaccgaccgcgagtcccgcgaagccctggcctgcaaatcgatctccaagcggaagctccgcaccgccgtcgacgtcgaggacgtccgccgcgaggtctcgatcatgtccacactccccgaccaccccaacgtcgtcaagctcagggcgacttacgaggacggcgagagcgtgcatctggtcatggagctctgcgaaggcggcgagcttttcgacaggatcgtcgcgagggggcattacacggagcgtgcggctgcgggagttgcgaggacgatcgctgaggttgtgatgatgtgtcatgtgaatggagttgtgcatcgtgatttgaagcctgagaactttttgtttgctaacaagaaggagaactctgcgttgaaggctattgattttgggttgtctgtgttcttcaaacctggagaaaagtttaaggagattgtaggaagtccatattacatggctcctgaggtgttgaagagagattatggaccagaggttgatgtttggagtgctggagttatcatctacatcttgctctgtggtgttcctcccttttgggctgagacggaacaaggtgttgctcttgcgatcttgcggggagttattgactttaagagagacccttggcctcagatatcagagagcgccaagagccttgtgaggcagatgttgaatcctgatcccactaagcgtttaactgctcagcaagtgttagctcacccttgggtacagaatgcaaagaaagctccaaatgtaccattaggggatatagtcagatcaagattgaagcagttctctatgatgaatagattcaaaaagaaagttcttcgtgtaatagctgagcacttgtctattcaagaggttgaagtgatcaaggacatgttctcactgatggatgaagacaacgatggtagaataacttacctggagctcaaagctggacttcagaaggttggctcacagcttggtgaaccagagatcaaaatgttgatggaagtggctgatgttgatgggaatgggtttctggactacggagagtttgtagctgtgatcattcacttgcagaagatagagaacgacgagcttttcaaactagctttcatgttctttgacaaagatggaagtacatacatcgaacttgatgagctacgggaagctttaactgacgagttgggcgaacctgatgtcagtgttctaaacgacatcatgcgtgaagttgattctgacaaggatgggcgtataaactatgatgagtttgtgacgatgatgaaagcaggaaccgattggagaaaggcgtcgagacaatactcaagagagaggttcaaaagcttaagcattaacttgatgaaagatggttcattgcatctccatgatgctctcactggacaatctgtccctgtttga

SEQ ID NO: 4763 - protein, 543 aa, Brassica napus
MGNCNVCVRPPNPEESKPKKTNQNRKLNPFTSDFIRSPARTRAPKDAVIPTSHQTKITDKYILGRELGRGEFGITYLCTDRESREALACKSISKRKLRTAVDVEDVRREVSIMSTLPDHPNVVKLRATYEDGESVHLVMELCEGGELFDRIVARGHYTERAAAGVARTIAEVVMMCHVNGVVHRDLKPENFLFANKKENSALKAIDFGLSVFFKPGEKFKEIVGSPYYMAPEVLKRDYGPEVDVWSAGVIIYILLCGVPPFWAETEQGVALAILRGVIDFKRDPWPQISESAKSLVRQMLNPDPTKRLTAQQVLAHPWVQNAKKAPNVPLGDIVRSRLKQFSMMNRFKKKVLRVIAEHLSIQEVEVIKDMFSLMDEDNDGRITYLELKAGLQKVGSQLGEPEIKMLMEVADVDGNGFLDYGEFVAVIIHLQKIENDELFKLAFMFFDKDGSTYIELDELREALTDELGEPDVSVLNDIMREVDSDKDGRINYDEFVTMMKAGTDWRKASRQYSRERFKSLSINLMKDGSLHLHDALTGQSVPV

SEQ ID NO: 4764 - DNA, 1599 bp, Brassica napus
  CDS (1)..(1599)
atggggaactgttgcggcagtccaagttcagccaccatcgagagtggacatggcaaacccaagaacaaaaacaatccctttcacagcaacgaagcaaacggatctggagctggcttcaagctctctgtgctgaaagatccaacaggacacgacatatcttctcagtatgatcttggacgcgaggttggtcgaggggagtttggtgtgacttacttgtgtactgacatccaaacgggtgacaagtacgcttgcaagtccatatcgaagaagaagctgaggacagcggtggatataggggatgttaggagggaggttgagataatgagacatatgcctaaacacccaaacattgtctctttgaaggattcgttcgaggatgatgacgcggttcatatagttatggagttgtgtgaaggaggggagctgtttgatcggattgttgcgagagggcattacactgagagggctgctgctgcggttatgaagactattgttgaagttgttcagatatgtcataagcagggagtgatgcatagggatcttaaaccagagaactttctttttgctaataagaaagagacatcagctcttaaggctattgattttggattatctgtcttctttaaaccaggtgagcagtttaatgagattgtgggaagtccttattacatggcaccagaggtgctaagacgaaactatggacctgagatcgatgtctggagtgcaggagtcatcctctatatccttctttgtggtgtccctcctttttgggcagagactgagcaaggggtggctcaagcgatcattaggtcagtaattgactttaagagagatccatggccaagagtttccgaaagcgccaaggaccttgtgagaaagatgcttgaacctgatcccaagaaacggctttctgctgcagaagtactcgaacatacttggatactgaatgcaaagaaggctccgaatgtgtctcttggggagactgtgaaagcaaggctaaagcagttttctgttatgaacaagctcaagaaacgagctttacgagtgatagctgaacacttgtcagtggaagaagcagctgggataaaggaagcatttgaaatgatggacgttaacaagagaggcaagataaacctcgaggagcttaagtacggacttcaaaaagctggacagcagattgctgatgctgatcttcagattcttatggaagctactgatgttgatggggacgggacactgaactatggagagttcgtggctgtatcagtgcacttgaagaagatggcgaacgatgaacacttgcataaagcgttcaacttctttgataagaaccagagtggttacatagagcctgaagagcttcgtgaggctttgaatgatgaattggatgaaactagcagtgaggaagtcatcgctgccatcatgcatgatgttgatactgacaaggacgggcgaataagctatgaagagtttgcagcgatgatgaaagctgggacagactggaggaaagcgtcacggcagtattcgagggaaagattcaacagtttgagcctcaagttaatgagagatggttctttgcaactagcaggtgaggcttaa

SEQ ID NO: 4765 - protein, 532 aa, Brassica napus
MGNCCGSPSSATIESGHGKPKNKNNPFHSNEANGSGAGFKLSVLKDPTGHDISSQYDLGREVGRGEFGVTYLCTDIQTGDKYACKSISKKKLRTAVDIGDVRREVEIMRHMPKHPNIVSLKDSFEDDDAVHIVMELCEGGELFDRIVARGHYTERAAAAVMKTIVEVVQICHKQGVMHRDLKPENFLFANKKETSALKAIDFGLSVFFKPGEQFNEIVGSPYYMAPEVLRRNYGPEIDVWSAGVILYILLCGVPPFWAETEQGVAQAIIRSVIDFKRDPWPRVSESAKDLVRKMLEPDPKKRLSAAEVLEHTWILNAKKAPNVSLGETVKARLKQFSVMNKLKKRALRVIAEHLSVEEAAGIKEAFEMMDVNKRGKINLEELKYGLQKAGQQIADADLQILMEATDVDGDGTLNYGEFVAVSVHLKKMANDEHLHKAFNFFDKNQSGYIEPEELREALNDELDETSSEEVIAAIMHDVDTDKDGRISYEEFAAMMKAGTDWRKASRQYSRERFNSLSLKLMRDGSLQLAGEA

SEQ ID NO: 4766 - DNA, 1746 bp, Glycine max
  CDS (1)..(1746)
atggggaacacgtgtgttggtcctagcatttcaaaaaatggttttgttcaatcagtttctgcggcgatttggcggtcccaattgcctgaaggttcagtgtctaatagagaatctgtaaaagaggaagcaactagtgtgcccgaatcgcccttgcctgtccaaaacaagcctcctgagcagataactatgccgaaacaagaagccaaacaagagggaaaatcagaaatagaaccggaaaaggaacaggataagaagaaacagaagaaacgtggttcagtgaagagagtttctagcgcagggcttcgtgttgattctgtgttgcaaagagagaccgataatttcaaggagttcttcactcttgggagaaaacttggacagggtcagttcgggacaacgttcttgtgcgtggaaaaggcaacagggcaggagtacgcctgcaaatctattgcaaagaggaagctcgtcaccgatgatgatgtcgaggatgtgagaagagaaattcagataatgcaccacttggccgggcatcctaatgttatatccatcaaaggtgcatatgaggatgccgtggctgttcatgttgtgatggaattatgtgcaggtggagagcttttcgataggattattcagcgtggccattataccgagagacaggcagccaagcttactaagactatagttggcgttgtggaagcttgccattctcttggtgtgatgcacagagaccttaaacctgagaattttctctttgtcaatcagcacgaggattcccttctcaaaaccattgactttggattatctgtcttctttaagccaggtgatatatttaatgatgtggtgggcagcccatactatgttgccccggatgttttgcgaaagcgttatggtcctgaggcagatgtttggagtgctggtgttatcctttacattcttttgagtggagtacctccattttgggctgaaaacgaacaaggaatatttgaacaagttctgcgtggtgatcttgacttttcttctgatccctggccttcaatttctgaaagtgcaaaagatttagtaagaaaaatgcttgttcgcgaccctagaaggcggttgactgcacatcaagtattatgtcatccttggattcaagttgatggtgtagctcctgacaagccacttgattctgccgtattaagtcgcttgaagcaattttctgctatgaacaagctcaaaaaaatggcccttataattattgcagagagcttatctgaagaagaaatagctggcttaaaagaaatgttcaagatgatagatgcagataacagtggtcaaatcacttttgaagaacttaaagctggtttgaaaagagtcggcgctaatcttaaggagtctgaaatttatgatttaatgcaagcagctgatgttgataacagtgggacaattgattacggcgatttccttgctgcaacgttgcaccgcaacaaaattgaaagagaagataatctatttgcagccttttcttactttgataaagatggaagtggctatattactcaggaagaacttcaacaggcttgtgatgagtttggcataaaagatgtccgtttggaagagataatcaaggaaattgatgaagataatgatggacgcatagattacaatgagtttgtggctatgatgcagaaaggaaatcttccagcggttggtaagaagggcctagaaaatagcttcagcgttaagttcagggaggcattaaaattgtag

SEQ ID NO: 4767 - protein, 581 aa, Glycine max
MGNTCVGPSISKNGFVQSVSAAIWRSQLPEGSVSNRESVKEEATSVPESPLPVQNKPPEQITMPKQEAKQEGKSEIEPEKEQDKKKQKKRGSVKRVSSAGLRVDSVLQRETDNFKEFFTLGRKLGQGQFGTTFLCVEKATGQEYACKSIAKRKLVTDDDVEDVRREIQIMHHLAGHPNVISIKGAYEDAVAVHVVMELCAGGELFDRIIQRGHYTERQAAKLTKTIVGVVEACHSLGVMHRDLKPENFLFVNQHEDSLLKTIDFGLSVFFKPGDIFNDVVGSPYYVAPDVLRKRYGPEADVWSAGVILYILLSGVPPFWAENEQGIFEQVLRGDLDFSSDPWPSISESAKDLVRKMLVRDPRRRLTAHQVLCHPWIQVDGVAPDKPLDSAVLSRLKQFSAMNKLKKMALIIIAESLSEEEIAGLKEMFKMIDADNSGQITFEELKAGLKRVGANLKESEIYDLMQAADVDNSGTIDYGDFLAATLHRNKIEREDNLFAAFSYFDKDGSGYITQEELQQACDEFGIKDVRLEEIIKEIDEDNDGRIDYNEFVAMMQKGNLPAVGKKGLENSFSVKFREALKL

SEQ ID NO: 4768 - DNA, 1647 bp, Triticum aestivum
  CDS (1)..(1647)
atgggtaatcagaatgggacccctgggaatgattactgcagccggttccccagggagcatcctgcttccaggtacgccgatgggattgaagatgatagctactcagacttgaagaaatccgagaagccctggcccgatgccgactcgtttaagcccaccgccgctggtattctgaggcagggtttggatctgacatccatctctgtcctcgggcgcaagacggcggacctaagggagcattatatcattggccggaagcttgggcagggccagtttgggacgacatacctctgcaccgagataagtacagggtgcgacttcgcatgcaagaccatcctcaagcgcaagctcgtcaccaaggtggatgtcgaggatgtgcgccgtgagatccagataatgcaccatttgtcgggacacaagaacgttgtctcgatcaaggatgtctatgaggacgtgcaggcggtccacattgtgatggagctcttgcccggcggggagctctttgaccgaattcaggggaatgggcattacagcgagatgaaggctgcagagattacaagaattgttgtcagcattgtggctatgtgccattcacttggtgtgatgcaccgcgatctcaagccagaaaatttcctcctccttgacaaagatgatgacctgtccataaaagcaattgattttggcctatccgtttacttcaagccaggccaggttttcagtgagctagttggcagcccgttctatgttgctcctgaggtgctgcacaaacgctatgggccagaatctgatgtgtggtcagctggagtgatactctatgtgttgctaagtggggttccaccattttgggcagatacacagaaaggcatatttgatgcagttctgaaggggcaccttgatttggaatcagacccttggcctaagatatctgacggtgcaaaggatcttataagaaaaatgctttgcaattgcccttcagagcgtttgaaagcccatgaagtgctacggcatccctggatctgccaaaatggggtggccactgatggagttttggatcctagtgtcatctctcggctcaagcggttctctgcaatgaacaatctacagaaattagctctgagagtgatagctgagcgtctttcagaagaggagattgctggattaagagaattattcaagacagtggacataaaaaatagaggtgtgatcactttcggtgagcttaggaaaggtttgacaagatatggcaacgaattggtggataccgagatttgtgatataatggaagcggctgatacagacactgatgtaaccataaattatgaagaatttattgctgcaaccatgcctctaaacaagatagagcgggaagagcacttgaaggcagcttttacatattttgacaaagatggcagtggctatatcacagtcgacaagcttcaacgagcctgtgcagaatataacatggagggcactctccttgaagagattattttagaggccgaccagaacaatgacggtcaaattgattatgctgaatttgtagccatgatgcaaggcaacaccaacggtggcaatattggacttgggcgtccaacaatggaaaccagtctgaatgtgaccttgagagatgcagctcaagtacattaa

SEQ ID NO: 4769 - protein, 548 aa, Triticum aestivum
MGNQNGTPGNDYCSRFPREHPASRYADGIEDDSYSDLKKSEKPWPDADSFKPTAAGILRQGLDLTSISVLGRKTADLREHYIIGRKLGQGQFGTTYLCTEISTGCDFACKTILKRKLVTKVDVEDVRREIQIMHHLSGHKNVVSIKDVYEDVQAVHIVMELLPGGELFDRIQGNGHYSEMKAAEITRIVVSIVAMCHSLGVMHRDLKPENFLLLDKDDDLSIKAIDFGLSVYFKPGQVFSELVGSPFYVAPEVLHKRYGPESDVWSAGVILYVLLSGVPPFWADTQKGIFDAVLKGHLDLESDPWPKISDGAKDLIRKMLCNCPSERLKAHEVLRHPWICQNGVATDGVLDPSVISRLKRFSAMNNLQKLALRVIAERLSEEEIAGLRELFKTVDIKNRGVITFGELRKGLTRYGNELVDTEICDIMEAADTDTDVTINYEEFIAATMPLNKIEREEHLKAAFTYFDKDGSGYITVDKLQRACAEYNMEGTLLEEIILEADQNNDGQIDYAEFVAMMQGNTNGGNIGLGRPTMETSLNVTLRDAAQVH

SEQ ID NO: 4770 - DNA, 1599 bp, Linum usitatissimum
  CDS (1)..(1599)
atggggaactgctgtgcaagccctggcaacagctctcctaagaacaccaagaacaacaaagagaaaggcaagaacaacaaaggaagcaatccattcttcggaactgactatgtagtcaacgacaagaagctctacgtgttgagtgaacctactggtagggacatctcagctcactacgatctaggccgtgagcttggccgtggtgaattcggagtcacgtatttgtcaactgagatgaccactggggataagtatgcctgcaagtccatctccaagaagaagctgaggactgctattgatgttgaggatgtgaggagggaagttgagatcatgaagcacttgcctcaccacccaaatatcgtttcgattaaggatacttacgaggatgacagtgctgtccacattgttatggagctctgtgaaggtggggagctgttcgataggattgttgctagaggacattacactgaacgggctgctgctgctgttatgcggaccatcgttgaagttgttcagatgtgccataagcatggtgtgatgcaccgtgatctcaagccggagaactttctgtttgcaaataagaaggaagcgtccgctttgaaggcaatcgattttggattgtccgtcttctttaaacctggagagagattcaatgagatagtgggaagtccatattacatggcccccgaggtcctgaaacggaactatggccccgaagttgatgtatggagcgctggagttatcctctacatcttgctctgtggagttcctccattttgggcagaaaccgagcagggtgtggcacaggcgattatacgatcggtcatagacttcaagagggatccatggcctaaagtttcggataatgcaaaggatctcgtaaggaagatgcttaatcccgatcctaagcagcgccttacagctcagcaagtgcttgaccatacgtggctgcagaatgcgaagaaggctccgaatgtcccattgggcgagactgtgagaacccggctcaaacagttctctatgatgaacaaactcaagaaaagagcacttagggtgatagccgagcacttatcgttggaggaagttgctggcataaaggagacctttgacatgatggacacaagccaaaggggtaaaatcaacattgatgagctcagagttggacttcacaagcttggccagcagattaccgatccggatctgcaaattcttatggatgctgctgatatcgatggagatggaactctgaactatggagagtttgtcgcgatcaccatccacataaaaaagatggggaacgacgagcatctacacaaagcgttcgggttcttcgaccagaacaagacgggatacattgagatggaggagcttcgacaagcactgaatgacgacattgacacttgtagcgaagacgtgttgaatgccatcatgcacgatgtggacaccgacaaggacggccgaataagctacgaggagtttgcgacgatgatgaaggcagggactgactggagaaaagcttcgaggcaatattcgagagagagattcaacagtctaagcttgaagttgatgagagatggttcattgcaggtagctagctga

SEQ ID NO: 4771 - protein, 532 aa, Linum usitatissimum
MGNCCASPGNSSPKNTKNNKEKGKNNKGSNPFFGTDYVVNDKKLYVLSEPTGRDISAHYDLGRELGRGEFGVTYLSTEMTTGDKYACKSISKKKLRTAIDVEDVRREVEIMKHLPHHPNIVSIKDTYEDDSAVHIVMELCEGGELFDRIVARGHYTERAAAAVMRTIVEVVQMCHKHGVMHRDLKPENFLFANKKEASALKAIDFGLSVFFKPGERFNEIVGSPYYMAPEVLKRNYGPEVDVWSAGVILYILLCGVPPFWAETEQGVAQAIIRSVIDFKRDPWPKVSDNAKDLVRKMLNPDPKQRLTAQQVLDHTWLQNAKKAPNVPLGETVRTRLKQFSMMNKLKKRALRVIAEHLSLEEVAGIKETFDMMDTSQRGKINIDELRVGLHKLGQQITDPDLQILMDAADIDGDGTLNYGEFVAITIHIKKMGNDEHLHKAFGFFDQNKTGYIEMEELRQALNDDIDTCSEDVLNAIMHDVDTDKDGRISYEEFATMMKAGTDWRKASRQYSRERFNSLSLKLMRDGSLQVAS

SEQ ID NO: 4772 - DNA, 1596 bp, Zea mays; identical to SEQ ID NO: 2207
  CDS (1)..(1596)

SEQ ID NO: 4773 - protein, 531 aa, Zea mays; identical to SEQ ID NO: 2208

SEQ ID NO: 4774 - DNA, 1650 bp, Brassica napus
  CDS (1)..(1650)
atgggcaattcatgccgtggttctttcaaggacaaaacctacgagggcaataacaacaacctgcccgaggagaattccatcaccatcacccacgattcctccgttcattccccgaccacagaacaagacttccctaaagaagacaacaacaacaacaacaagagtcctgttcttgtgcttcccgtgaaagaaccttttatgcgacgtaacatggacaaccaagcttactacgttctcggtcacaagactcctaacatccgtgatctttacaccttgagccgtaagttaggacaaggacagttcgggaccacgtatctctgcaccgaggtcgcaacgggtgttgactatgcttgcaagtctatatccaagaggaagttgatatctaaggaagatgttgaggatgttaggagggagattcagataatgcaccatttggctggtcacaagaacattgttacgataaaaggagcttatgaggaccctttgtatgttcacattgtgatggaggtttgtgctggtggtgagttgtttgataggattattcagagagggcattacaccgagaggaaagctgccgagctgaccaagattgttgtcggtgttgttgaggcgtgccattcgcttggtgtcatgcatagagacttgaagcctgagaatttcttgttggttaataaggatgatgatttctctctcaaggccattgattttggtctctctgttttcttcaaaccaggccaaatattcaaggatgttgttggaagtccatactacgttgctccagaggttcttctaaaacattatggtccagaagctgatgtgtggactgctggtgttatactatatattctactaagtggtgtccctcccttttgggcagaaacacaacaaggaatatttgatgctgtcttgaaaggagatatagactttgagtcagacccgtggcctgtgatatccgacagtgctaaagatctgatcagcaagatgttatgctctaaaccctctgaacgcttgacagctcatgaagtcatgcgacatccatggatctgcgagaacggagttgcaccagacagagcacttgatccggctgttctgtctcgtctcaaacagttttctgcaatgaataaattaaagaagatggctttaaaggtgatagctgagagcctctcagaagaagaaattgcaggtttaagagcaatgtttgaggcaatggatacagataacagcggtgcaatcacttttgatgaactcaaagctggactgagaagatatggctcaactttgaaagacactgagatcaaagatcttatggaagcggctgatgtggacaacagcggtacaatagactacagtgaattcattgcagcgacgattcatctgaataagctagacagagaggagcaccttgtctctgcgttccagtactttgataaagatggaagtggttatatcaccattgatgagctgcaacaatcttgcgtggaacatgggatgaccgacgtttttcttgaagatgtaatcaaagaagttgatcaagacaatgatggacggattgactatggagaatttgttgcaatgatgcaaaagggaaatgctggtatcgggagacgaacaatgagaaatagcctgaacatcagcatgagagatgcatag

SEQ ID NO: 4775 - protein, 549 aa, Brassica napus
MGNSCRGSFKDKTYEGNNNNLPEENSITITHDSSVHSPTTEQDFPKEDNNNNNKSPVLVLPVKEPFMRRNMDNQAYYVLGHKTPNIRDLYTLSRKLGQGQFGTTYLCTEVATGVDYACKSISKRKLISKEDVEDVRREIQIMHHLAGHKNIVTIKGAYEDPLYVHIVMEVCAGGELFDRIIQRGHYTERKAAELTKIVVGVVEACHSLGVMHRDLKPENFLLVNKDDDFSLKAIDFGLSVFFKPGQIFKDVVGSPYYVAPEVLLKHYGPEADVWTAGVILYILLSGVPPFWAETQQGIFDAVLKGDIDFESDPWPVISDSAKDLISKMLCSKPSERLTAHEVMRHPWICENGVAPDRALDPAVLSRLKQFSAMNKLKKMALKVIAESLSEEEIAGLRAMFEAMDTDNSGAITFDELKAGLRRYGSTLKDTEIKDLMEAADVDNSGTIDYSEFIAATIHLNKLDREEHLVSAFQYFDKDGSGYITIDELQQSCVEHGMTDVFLEDVIKEVDQDNDGRIDYGEFVAMMQKGNAGIGRRTMRNSLNISMRDA

SEQ ID NO: 4776 - DNA, 1590 bp, Brassica napus
  CDS (1)..(1590)
atgggacacagacacagcaagtccaaatcctcaggtccgccaccgtcctcctcttcctccaccaacgtcgtccaccatgtcaaaccttccggagagcgccgcggatcttccggttctggctccgcacccgtcggatcttcctcaaccggcggatcccgctccgccgcatctgctcagcagaacggtcggatcttaggccgtccgatggagaatgtcaggggaacgtacgacttcggcaaggagcttggtcgtggccagttcggagtcacgtatctcgtcactcacaaagagaccaaaaaactcttcgcctgcaagtcgatccccacgcgccgcctcgtccaccgtgacgacattgaagacgttcgccgtgaagtccagattatgcaccatctcagtggtcacaggaacatagtggacttgaagggagcttacgaggacagacactcggtgaatctgataatggagctgtgcgaaggaggggagcttttcgacaggatcatagctaaaggccattacacggagagagccgctgcggatttgtgcaggcagatggtgatggttgtgcatagttgccactctatgggcgtgatgcaccgagacttgaagcccgaaaacttcctctttctcagcaaagatgagagctccccgttgaaagctacagactttggcctctccgtcttcttcaaaccaggagataagtttaaggatcttgttggaagtgcatactatgttgccccggaagttttaaaacggaactatggaccagaggctgatatctggagtgccggtgtgattctgtacatccttctcagtggtgtcccgccattttggggagaaaatgagacagggatcttcgatgccattctagaaggaaagcttgatttttcagctgatccatggcctgatgtatccaacggtgccaaagatcttgtgaagaagatgttgacgtatgaccctaaagaccggcttacagcgagtgaagtgctaaaccatccgtggattaaagaagacggagaggcgtcagacaaaccgcttgacaatgctgtgttatccaggatgaaacagttcagagccatgaacaaactcaagaaaatggcactcaaggtaatcgcagagaacctatctgaagaagaaatcattggtctgaaagagatgttcaaagctctagacaccgataaaaacggaatagtcaccttggaggaattgagaaccggtctcccaaaacttggcaataagatctctgaggctgaaataaaacagttaatggaagcagctgatatggatggagatggatcaatagattacttggagtttatatcagcaacaatgcatatgaacagaatcgaacgtgaggatcacttgtacactgctttccaatacttcgacaaggacaacagcggctacataacaatggaagagctagaacaagccatgaagaaatacaacatgggtgatgacaaatccatcaaagagatcattgctgaagtagacaccgatcgtgacggaaaaataaactacgaagaattcgtagcgatgatgaagaaaggaaatccagaactggtgacaaaccgacgcagagtcaacatgtaa

SEQ ID NO: 4777 - protein, 529 aa, Brassica napus
MGHRHSKSKSSGPPPSSSSSTNVVHHVKPSGERRGSSGSGSAPVGSSSTGGSRSAASAQQNGRILGRPMENVRGTYDFGKELGRGQFGVTYLVTHKETKKLFACKSIPTRRLVHRDDIEDVRREVQIMHHLSGHRNIVDLKGAYEDRHSVNLIMELCEGGELFDRIIAKGHYTERAAADLCRQMVMVVHSCHSMGVMHRDLKPENFLFLSKDESSPLKATDFGLSVFFKPGDKFKDLVGSAYYVAPEVLKRNYGPEADIWSAGVILYILLSGVPPFWGENETGIFDAILEGKLDFSADPWPDVSNGAKDLVKKMLTYDPKDRLTASEVLNHPWIKEDGEASDKPLDNAVLSRMKQFRAMNKLKKMALKVIAENLSEEEIIGLKEMFKALDTDKNGIVTLEELRTGLPKLGNKISEAEIKQLMEAADMDGDGSIDYLEFISATMHMNRIEREDHLYTAFQYFDKDNSGYITMEELEQAMKKYNMGDDKSIKEIIAEVDTDRDGKINYEEFVAMMKKGNPELVTNRRRVNM

SEQ ID NO: 4778 - DNA, 1608 bp, Brassica napus; identical to SEQ ID NO: 2223
  CDS (1)..(1608)

SEQ ID NO: 4779 - protein, 535 aa, Brassica napus; identical to SEQ ID NO: 2224

SEQ ID NO: 4780 - DNA, 1743 bp, Brassica napus
  CDS (1)..(1743)
atgggtctctgctacagccggaacacctcctccgtcaaagacgacgagatccccgtcgagcagccgtcgcaaaccccccggcttgcttcgatccctcagtctcccgtcccctccgaagtcaactcctacgccagcagcccgttccagagccccttaccggcgggagtagctccgtcgccggcgagaactccgggacggaagttcaaatggccgtttccgccgccgtcccccgcgaagccgatcatggcggctctgaggcggagaagaggcgcgccgccgcggccgagagacgagccgatcccggaggacagcgaggacgttgacggcgtcggaggggagaggctggacaagaacttcgggttcgggaagaacatggaagggaagtacgagttggggaaggaggtggggcgagggcattttggtcatacttgctgggctaaggccaagaaagggaagatgaaggggcagacggtggctgtcaagatcatctccaaagctaagatgacatcggctttgtctattgaagatgttcgtagagaagtgaagttgctgaaagctttatctgggcataagcatatggttaagttctatgatgtgtatgaggacaatgataacgtctatgtagttatggagttgtgtgaaggaggagagttattggacaggatcttggcgagaggtggtaaataccctgaagtagacgccaaacgtattcttgtacagattctatctgcaacagcattttttcatctccaaggtgtagtgcaccgtgacctgaagccagagaactttctcttcaccagcagaaacgaggatgcagtactcaaggtcatagactttggcttgtctgatttcattagatacgatcaacggctcaatgatgtggtaggaagcgcatactatgtagcaccagaagtactccacaggtcttacagcactgaagcagatatgtggagcatcggtgtcataagctacatactactctgtggaagcagacctttctacggaagaactgaatctgcaatattccgttgtgtgcttagagcaaaccctaattttgaggatatgccttggccttcaatctctcctactggtaaagactttgtgaaaaggcttttgaacaaggatcataggaaacgaatgacagctgctcaagctctagctcatccatggttacgtgatgaaaaccctggtttgcttcttgatttctcggtttacaagttggtcagatcctatattcgtgcctcgcctttcagaagatcagcactcaaggctctcgccaaagctatacctgatgaggagcttgtgttccttaaggcacagttcatgctcctagaccctaaagatggaggcttatctcttaacaacttcacaacggctttaacaagatatgctactgatgctatgatggaatcaaagcttcctgacattttaaacacaatgcaaccgctggtgcaaaagaaactggactttgaagagttctgtgcggctggggtcagcgtttaccaactggaagctcttgaagaatgggaacagattgcaacttcagcgtttgagcactttgaacaagaaggaaaccgagtcatatccgtccaagaactcgctggggagatgagcgtgggaccaaatgcatatcctctgctcaaggattggatccggagttcagatgggaagctgagtttcttggggtacgctaagttcttgcatggtgtgactgtacgaagctcgagctcaagacctaggtga

SEQ ID NO: 4781 - protein, 580 aa, Brassica napus
MGLCYSRNTSSVKDDEIPVEQPSQTPRLASIPQSPVPSEVNSYASSPFQSPLPAGVAPSPARTPGRKFKWPFPPPSPAKPIMAALRRRRGAPPRPRDEPIPEDSEDVDGVGGERLDKNFGFGKNMEGKYELGKEVGRGHFGHTCWAKAKKGKMKGQTVAVKIISKAKMTSALSIEDVRREVKLLKALSGHKHMVKFYDVYEDNDNVYVVMELCEGGELLDRILARGGKYPEVDAKRILVQILSATAFFHLQGVVHRDLKPENFLFTSRNEDAVLKVIDFGLSDFIRYDQRLNDVVGSAYYVAPEVLHRSYSTEADMWSIGVISYILLCGSRPFYGRTESAIFRCVLRANPNFEDMPWPSISPTGKDFVKRLLNKDHRKRMTAAQALAHPWLRDENPGLLLDFSVYKLVRSYIRASPFRRSALKALAKAIPDEELVFLKAQFMLLDPKDGGLSLNNFTTALTRYATDAMMESKLPDILNTMQPLVQKKLDFEEFCAAGVSVYQLEALEEWEQIATSAFEHFEQEGNRVISVQELAGEMSVGPNAYPLLKDWIRSSDGKLSFLGYAKFLHGVTVRSSSSRPR

SEQ ID NO: 4782 - DNA, 1599 bp, Brassica napus
  CDS (1)..(1599)
atggggaactgttgcggcagtccaagttcagccaccatcgagagtggacatggcaaacccaagaacaaaaacaatccctttcacagcaacgaagcaaacggatctggagctggcttcaagctctctgtgctgaaagatccaacaggacacgacatatcttctcagtatgatcttggacgcgaggttggtcgaggggagtttggtgtgacttacttgtgtactgacatccaaacgggtgacaagtacgcttgcaagtccatatcgaagaagaagctgaggacagcggtggatataggggatgttaggagggaggttgagataatgagacatatgcctaaacacccaaacattgtctctttgaaggattcgttcgaggatgatgacgcggttcatatagttatggagttgtgtgaaggaggggagctgtttgatcggattgttgcgagagggcattacactgagagggctgctgctgcggttatgaagactattgttgaagttgttcagatatgtcataagcagggagtgatgcatagggatcttaaaccagagaactttctttttgctaataagaaagagacatcagctcttaaggctattgattttggattatctgtcttctttaaaccaggtgagcagtttaatgagattgtgggaagtccttattacatggcaccagaggtgctaagacgaaactatggacctgagatcgatgtctggagtgcaggagtcatcctctatatccttctttgtggtgtccctcctttttgggcagagactgagcaaggggtggctcaagcgatcattaggtcagtaattgactttaagagagatccatggccaagagtttccgaaagcgccaaggaccttgtgagaaagatgcttgaacctgatcccaagaaacggctttctgctgcagaagtactcgaacatacttggatactgaatgcaaagaaggctccgaatgtgtctcttggggagactgtgaaagcaaggctaaagcagttttctgttatgaacaagctcaagaaacgagctctacgagtgatagctgaacacttgtcagtggaggaagcagctgggataaaggaagcatttgaaatgatggacgttaacaagagaggcaagataaacctcgaggagcttaagtacggacttcaaaaagctggacagcagattgctgatgctgatcttcagattcttatggaagctactgatgttgatggggacgggacactgaactatggagagttcgtggctgtatcagtgcacttgaagaagatggcgaacgatgaacacttgcataaagcgttcaacttctttgataagaaccagagtggttacatagagcctgaagagcttcgtgaggctttgaatgatgaattggatgaaactagcagtgaggaagtcatcgctgccatcatgcatgatgttgatactgacaaggacgggcgaataagctatgaagagtttgcagcgatgatgaaagctgggacagactggaggaaagcgtcacggcagtattcgagggaaagattcaacagtttgagcctcaagttaatgagagatggttctttgcaattagaaggcgagacctga

SEQ ID NO: 4783 - protein, 532 aa, Brassica napus
MGNCCGSPSSATIESGHGKPKNKNNPFHSNEANGSGAGFKLSVLKDPTGHDISSQYDLGREVGRGEFGVTYLCTDIQTGDKYACKSISKKKLRTAVDIGDVRREVEIMRHMPKHPNIVSLKDSFEDDDAVHIVMELCEGGELFDRIVARGHYTERAAAAVMKTIVEVVQICHKQGVMHRDLKPENFLFANKKETSALKAIDFGLSVFFKPGEQFNEIVGSPYYMAPEVLRRNYGPEIDVWSAGVILYILLCGVPPFWAETEQGVAQAIIRSVIDFKRDPWPRVSESAKDLVRKMLEPDPKKRLSAAEVLEHTWILNAKKAPNVSLGETVKARLKQFSVMNKLKKRALRVIAEHLSVEEAAGIKEAFEMMDVNKRGKINLEELKYGLQKAGQQIADADLQILMEATDVDGDGTLNYGEFVAVSVHLKKMANDEHLHKAFNFFDKNQSGYIEPEELREALNDELDETSSEEVIAAIMHDVDTDKDGRISYEEFAAMMKAGTDWRKASRQYSRERFNSLSLKLMRDGSLQLEGET

SEQ ID NO: 4784 - DNA, 1590 bp, Brassica napus
  CDS (1)..(1590)
atggggaactgttgcagatctcccgccgctgtagccagagaagacgtcaaatccaactactccggccacgatcaccaccgcaaagacgcctccggcgggaaaaaaccggcgccgattcgagtcctcagcgacgtccccaaggagaacatcgaggaccgttacttactcgaccgagagctcggacgcggcgagttcggcgtcacgtacctctgcatcgagagatccacgcgcgacctcctcgcctgcaagtcgatctcgaagaggaagctcaggaccgccgtggacatcgaggacgtgaagagggaggtggcgattatgcagcatttgcctaagagctcgagcatcgtcactctgaaggaggcttgcgaggacgacaacgctgtgcatttggtgatggagctgtgcgaaggtggcgagcttttcgataggattgtggcgagagggcactacaccgagcgagccgccgcgggagtcacgaagacgatcatggaggtggtgcagctttgccacaagcacggggttattcatagagatttgaagccggagaactttttgttcgctaacaagaaggagaactctccgctcaaagctattgactttggattgtctatcttcttcaagccaggtgagaagttctcggagatagttgggagtccatattacatggcacctgaggtgctaaagaggagctatggacctgaaatagatatttggagtgctggagtcattctttatattctgctttgtggagttcctcctttctgggcagagtcggaacagggagttgctcaggctattttacgcgggataattgattttaagagggaaccgtggccaaacatttcggagactgctaagagtcttgtcagacaaatgttagagcctgatccaaagcgccggctgactgcaaagcaagtgcttgagcacccatggattcaaaacgccaagaaagctccaaatgttcctcttggagatgttgtgaagtccagattaaagcagttttcagtgatgaacagattcaagagaaaagctttgagggttattgctgaatttttatcttcacaagaagtagaagacatcaaagagatgttcaacaagatggatactgacaaagatggtattgttaccatcgaggagttgaaagctggacttcgcgattttggtacacagctagctgaatcagaagttcagatgcttattgaagcggtggatactaaagggaaaggaacactagactatggagaatttgttgcagtctctctccacctgcaaaaggtagcaaacgatgagcatctccgcaaagcattctcctactttgacaaggatggaaatgggtacattttcccccaagagctttgtgaagccttaaaggaagatggaggggatgactgtgtggatgtcgccaatgatatattccaagatgttgacactgacaaggatgggagaataagctacgaagagtttgcagcgatgatgaaagctgggacagactggaggaaagcatcgagacagtattccagggaaagattcaacagtttgagtctcaagttgatgagagacggttcattgcagttagaaggcgagaactga

SEQ ID NO: 4785 - protein, 529 aa, Brassica napus
MGNCCRSPAAVAREDVKSNYSGHDHHRKDASGGKKPAPIRVLSDVPKENIEDRYLLDRELGRGEFGVTYLCIERSTRDLLACKSISKRKLRTAVDIEDVKREVAIMQHLPKSSSIVTLKEACEDDNAVHLVMELCEGGELFDRIVARGHYTERAAAGVTKTIMEVVQLCHKHGVIHRDLKPENFLFANKKENSPLKAIDFGLSIFFKPGEKFSEIVGSPYYMAPEVLKRSYGPEIDIWSAGVILYILLCGVPPFWAESEQGVAQAILRGIIDFKREPWPNISETAKSLVRQMLEPDPKRRLTAKQVLEHPWIQNAKKAPNVPLGDVVKSRLKQFSVMNRFKRKALRVIAEFLSSQEVEDIKEMFNKMDTDKDGIVTIEELKAGLRDFGTQLAESEVQMLIEAVDTKGKGTLDYGEFVAVSLHLQKVANDEHLRKAFSYFDKDGNGYIFPQELCEALKEDGGDDCVDVANDIFQDVDTDKDGRISYEEFAAMMKAGTDWRKASRQYSRERFNSLSLKLMRDGSLQLEGEN

SEQ ID NO: 4786 - DNA, 1791 bp, Brassica napus
  CDS (1)..(1791)
atgggaggtcgaacctacaaaccctcctcctccgtgaaacccaaagacgcgttcccacaaaatgacgatactacccctgcccatcccggcaaatcaccggtccgtacctcaaccgccgtaaagacctctcctttcctcccattctacactccaagccccgccaggcaccgccgcaacaagacccgcgaccgagaaggaggaggagagagcaagagcgtcaccagcactccgctccgtcaactcgcgcgtgctttccaccctccgtcgccagcgaaacacatacgggatgttctgcggcggaggaaggggaaaaaggaagctactttgccggcggagaagaagcagacggaggaggagaaggagagagaggaggtggggctggacaagagattcggattctcaagggagtttcagagtaggatggagttaggggaagagattgggagagggcattttgggtatacttgctctgctaagttcaagaaaggagagctcaaggatcatgaggttgctgttaaagtcatccctaaatctaagatgacaactgcaatatctatagaggatgtaagaagagaagtgaaaatcctgcgggcgttatctggacataacaatctagtacaattctacgatgcgttcgaggacaatgccaacgtctacatcgtaatggagttatgtggaggtggtgaactccttgacagaatactagcaaggggagggaaatactcagaagatgatgcaaaagaagtccttacacagatccttaacgttgtagctttctgtcatctccaaggagttgttcatagagatctaaaaccagagaacttcttgtacacttccaaggaggacaactctcagttgaaagtcatagactttggtttatcagactttgtcagaccagacgaaagactaaacgatatagtgggcagtgcatactacgtagcccccgaagttctacacagatcttacaccacggaagcggatgtatggagtataggagtcatagcatacattctcctatgtggaagccgtcccttttgggcaagaactgaatcaggaatcttcagagcagttcttaaagctgatccgagttttaatgagcctccttggccttcattgtcctttgaagcaaaagattttgttaaacggttactgtacaaagatccacgaaagagaatgacagcctctcaagctttgatgcatccttggatctctggaagtaagaagatgaatatcccatttgatattctgatcttcaagcagatcaaagcatacttgaaatcttcttctttgcgcaaagctgctttgatggctctgtcaaagacgttaattacagatgaagttctttatctgaaagcacagtttgcactcttagcacccaatataaatggtctcatcactttggataacatcacatcggcacttgctataaacgcaacagaagtaatgaaggaatcacgcatccctgactttcttgcattgttgaatggacttgaatgcaaaggaatggactttgaagagttttgtgcagcttccatcagtgttcatcagcacgagtcacttgactgctgggagcagagcgttcgccatgcctatgagctctttgacatgaacggaaaccgagtcatcatcatcgaagaactcgcttccgaactcggtgttggatcatcaatccctgtacataccattctacatgactggataaggcacactgacggaaagctaagcttcttggggtttgtcaaactgttacacggtgtctctactctacagcctttagcgaaaacacggtga

SEQ ID NO: 4787 - protein, 596 aa, Brassica napus
MGGRTYKPSSSVKPKDAFPQNDDTTPAHPGKSPVRTSTAVKTSPFLPFYTPSPARHRRNKTRDREGGGESKSVTSTPLRQLARAFHPPSPAKHIRDVLRRRKGKKEATLPAEKKQTEEEKEREEVGLDKRFGFSREFQSRMELGEEIGRGHFGYTCSAKFKKGELKDHEVAVKVIPKSKMTTAISIEDVRREVKILRALSGHNNLVQFYDAFEDNANVYIVMELCGGGELLDRILARGGKYSEDDAKEVLTQILNVVAFCHLQGVVHRDLKPENFLYTSKEDNSQLKVIDFGLSDFVRPDERLNDIVGSAYYVAPEVLHRSYTTEADVWSIGVIAYILLCGSRPFWARTESGIFRAVLKADPSFNEPPWPSLSFEAKDFVKRLLYKDPRKRMTASQALMHPWISGSKKMNIPFDILIFKQIKAYLKSSSLRKAALMALSKTLITDEVLYLKAQFALLAPNINGLITLDNITSALAINATEVMKESRIPDFLALLNGLECKGMDFEEFCAASISVHQHESLDCWEQSVRHAYELFDMNGNRVIIIEELASELGVGSSIPVHTILHDWIRHTDGKLSFLGFVKLLHGVSTLQPLAKTR

SEQ ID NO: 4788 - DNA, 1461 bp, Brassica napus
  CDS (1)..(1461)
atggctaacaaaccaagaaccaggtgggttctcccttacaagaccaaaaacgtggaagacgattactctctcggcaaagtgctcggacaaggacaattcggaaccacttacctctgcacacacaaccagacaggtcaaaagctcgcctgcaaatccatacccaaaaggaagctcctttgccaagaagactacgacgacgttttgagggagatacagataatgcatcacttgtctgaataccccaacgttgtccggatacaagacacctacgaggattccagcagcgtccaccttgtgatggagctctgcgaaggaggtgagctgttcgatagaatcgtgaagaaaggtcattacagcgagagagaagctgctaagcttatcaagaccattgttggcgttgttgaggcttgtcactctcttggggtgttgcatagagatcttaagcctgagaacttcttgtttgcttcttgtgatgaagatgcttctcttaaatccactgactttggcctctctgttttctgcaaaccaggggcaacgttttcagaactagttgggagtgcatactatgtagcacctgaggttttacataagcattacagccgcgaatgtgaggtatggagcgctggagttatcctctacattctcttatgcggcttccctcctttctgggatgaaagtgagagtggcatcttcagaaagattctacagggaaaaatgaactttgagacaaatccctggcctagcatttcagagagtgccaaggatcttataatgaaaatgctcgagaaagatccaaagaaaagactaactgctcatcaagtcttgtgtcacccctggattgtggatgataaggttgctccagataaaccactggactgtgcagtactgtcacgcttgaaaaacttctctgcaatgaacaaactcaaaaaaatggctttacgagtgattgcagagagactatctgaggaagagataggtggactcaaagaactgttcaagatgatagacacagacaacagtggcaccatcacgtttgaagagttgaaagacactatgaaacgtgttggggcagaccttatggaatcagagatccaagaactcttgcgctcagctgatgttgatgagaatggatcaatagactatggagagtttttagctgcaacaatacacttgaacaagctggagagagaggagaatctagtggctgcattctctttctttgacaaagatggaagtggctacatcactgtggatgagctccagcaggctttgaaggagtttggtataaatgattcacatcttgatgaaatgatcaaagacattgaccaagacaatgatggacaaatagactatggagagtttgtggcaatgatgaggaaaggaaatgggagtggagggactggcaggagaacaatgaccaacactctcaactttgcaaattggaaagtagcctcttcctga

SEQ ID NO: 4789 - protein, 486 aa, Brassica napus
MANKPRTRWVLPYKTKNVEDDYSLGKVLGQGQFGTTYLCTHNQTGQKLACKSIPKRKLLCQEDYDDVLREIQIMHHLSEYPNVVRIQDTYEDSSSVHLVMELCEGGELFDRIVKKGHYSEREAAKLIKTIVGVVEACHSLGVLHRDLKPENFLFASCDEDASLKSTDFGLSVFCKPGATFSELVGSAYYVAPEVLHKHYSRECEVWSAGVILYILLCGFPPFWDESESGIFRKILQGKMNFETNPWPSISESAKDLIMKMLEKDPKKRLTAHQVLCHPWIVDDKVAPDKPLDCAVLSRLKNFSAMNKLKKMALRVIAERLSEEEIGGLKELFKMIDTDNSGTITFEELKDTMKRVGADLMESEIQELLRSADVDENGSIDYGEFLAATIHLNKLEREENLVAAFSFFDKDGSGYITVDELQQALKEFGINDSHLDEMIKDIDQDNDGQIDYGEFVAMMRKGNGSGGTGRRTMTNTLNFANWKVASS

SEQ ID NO: 4790 - DNA, 1638 bp, Brassica napus
  CDS (1)..(1638)
atgggcaattcatgccgccgatcttccaaagacaaaatccaccaaggcaataacaacaacactaagcctgaagacaacaactccaaatcctcagatcgctctacagagatcatcattcctcaagaactccccaaagaagctcacaacaaggatccagctctcgttatccctctaaaagaaccaatcatgagacgcaacatggacaaccaagcctactacgtcctcggccacaagaccccgaacatccgcgacctctacaaccttagccgcaagctaggacaaggccagttcggaacaacgtacctctgcacggagctcgccacgggggtcgactacgcttgcaagtcaatatccaagaggaagctgatctctaaagaagatgttgaggatgttagaagagagattcagatcatgcaccatttggctggtcacggtaacattgttaccatcaagggagcttatgaggactctctgtatgttcacattgtgatggagctttgcgctggaggggagttgtttgataggattattcagagagggcattatagtgagaggaaagctgctgagctgactaagatcattgtgggagttgtggaagcgtgtcattctctgggtgttatgcatagagacttgaagcctgagaatttcttgttggttaataaggatgatgatttctctctcaaggccattgattttggactctctatcttcttcaaaccaggtcaaatattcactgatgttgttgggagtccatactatgttgctcctgaggttttgctcaaacgttatgggcctgaagctgatgtgtggaccgctggtgttatactctatatattgctaagcggagtcccaccgttctgggcagaaacacagcaagggatatttgatgctgtgttgaagggatatatcgactttgattcggacccttggcctgtgatatcagacagtgctaaagacttgatccgcagaatgttatgctccaagcctgcagagcgcttgacagctcatgaagtcttgcgtcatccatggatctgtgagaacggtgtggcaccagatagagcacttgatccggctgtgctgtcacgtctcaagcagttctctgcaatgaataaactaaagaagatggctttgaaggtgatagctgagagcctctctgaagaagagattgctggtttaagggagatgtttcaggcaatggatactgataacagcggtgcaatcacgtttgatgaactcaaagctggactgaggaagtatggatccaccttgaaagacacagagatccatgatctaatggaagcggctgatgtggacaacagtgggacaatagattacagcgagttcattgcagcgaccatccatctcaacaaacttgaacgtgaagaacatcttgtggctgcgtttcagtactttgacaaagatggaagtggttacataacgatagatgagctgcaacaagcgtgtgttgaacatagtatgactgatgttttccttgaagacatcatcaaagaagttgatcaaaacaatgatggaaagattgattatggtgagtttgtggagatgatgcaaaagggaaatgctggtgttgggagaagaacgatgagaaatagtctgaacattagcatgagagacgcctag

SEQ ID NO: 4791 - protein, 545 aa, Brassica napus
MGNSCRRSSKDKIHQGNNNNTKPEDNNSKSSDRSTEIIIPQELPKEAHNKDPALVIPLKEPIMRRNMDNQAYYVLGHKTPNIRDLYNLSRKLGQGQFGTTYLCTELATGVDYACKSISKRKLISKEDVEDVRREIQIMHHLAGHGNIVTIKGAYEDSLYVHIVMELCAGGELFDRIIQRGHYSERKAAELTKIIVGVVEACHSLGVMHRDLKPENFLLVNKDDDFSLKAIDFGLSIFFKPGQIFTDVVGSPYYVAPEVLLKRYGPEADVWTAGVILYILLSGVPPFWAETQQGIFDAVLKGYIDFDSDPWPVISDSAKDLIRRMLCSKPAERLTAHEVLRHPWICENGVAPDRALDPAVLSRLKQFSAMNKLKKMALKVIAESLSEEEIAGLREMFQAMDTDNSGAITFDELKAGLRKYGSTLKDTEIHDLMEAADVDNSGTIDYSEFIAATIHLNKLEREEHLVAAFQYFDKDGSGYITIDELQQACVEHSMTDVFLEDIIKEVDQNNDGKIDYGEFVEMMQKGNAGVGRRTMRNSLNISMRDA

SEQ ID NO: 4792 - DNA, 1503 bp, Brassica napus
  CDS (1)..(1503)
atggagaaaccaagctctagacgaccttcaagcagcgtcctcccttacgaaacgccaaggctccgagatcactacctcctcggcaagaagctaggccaaggccaattcggcacgacctatctctgcaccgagaaatcaacctccgccaactacgcctgcaaatcgatccccaagcgcaagctcgtgtgccgagaagactacgaagatgtctggcgcgagattcagatcatgcaccacctctccgagcaccccaacgtggtccggatcaaggggacctacgaggactccgtcttcgtacacatcgtcatggaggtctgcgaaggaggagagctgttcgatcggatcgtggccaaagggcatttcagcgagcgtgaggcggcgaagctgataaagacgattcttgcggtggtggaggcatgccattcgcttggggttatgcatagagatctcaagcctgagaatttcttgtttgatagccctaaggaagatgccaagcttaaggctaccgattttggcttgtctgtcttctacaaaccaggacaatatctatacgacgtagtgggaagcccgtactacgttgcacccgaggttcttaaaaaatgttatggaccagagatagatgtgtggagcgctggtgttatcctctacatcttactaagtggtgttcctcctttctgggcagaaaccgagtcaggaatctttagacagattttgcaagggaagttagatttcaaatctgacccgtggcccactatctcagaaggtgccaaagatttgatttacaaaatgcttgacaggagccccaagaaacgcatctctgcacatgaagcattgtgtcacccgtggatcgttgatgagcaggctgcaccagacaagcctcttgatccagcagtcttgtcacgactaaagcagttctcacaaatgaacaagattaagaaaatggccttaagggtcatcgctgagaggctctcggaggaagaaattggtggtctgaaggaactgttcaagatgatagatacagacaacagtggaacaatcacctttgaagagcttaaagctggcctgaagagagtcggatctgaactaatggaatcagaaatcaagtctcttatggatgcggcggatatagataacagtgggacgatagactatggtgagtttctagcagcgacactacacatgaacaagatggagagagaagagaatctggtggcagcattttcatactttgacaaagacgggagcggatatatcaccatagatgagctgcaacaagcatgcacagagtttggtctatgtgacacacctcttgatgacatgatcaaggagattgatcttgacaacgacgggaagatagatttctcagaatttacggcaatgatgaagaaaggagatggagttgggagaagcagaaccatgatgaaaaacttgaacttcaacatagctgacgcttttggagttgaggaaactagcactgctgaaactgatgacaaaccaaactaa

SEQ ID NO: 4793 - protein, 500 aa, Brassica napus
MEKPSSRRPSSSVLPYETPRLRDHYLLGKKLGQGQFGTTYLCTEKSTSANYACKSIPKRKLVCREDYEDVWREIQIMHHLSEHPNVVRIKGTYEDSVFVHIVMEVCEGGELFDRIVAKGHFSEREAAKLIKTILAVVEACHSLGVMHRDLKPENFLFDSPKEDAKLKATDFGLSVFYKPGQYLYDVVGSPYYVAPEVLKKCYGPEIDVWSAGVILYILLSGVPPFWAETESGIFRQILQGKLDFKSDPWPTISEGAKDLIYKMLDRSPKKRISAHEALCHPWIVDEQAAPDKPLDPAVLSRLKQFSQMNKIKKMALRVIAERLSEEEIGGLKELFKMIDTDNSGTITFEELKAGLKRVGSELMESEIKSLMDAADIDNSGTIDYGEFLAATLHMNKMEREENLVAAFSYFDKDGSGYITIDELQQACTEFGLCDTPLDDMIKEIDLDNDGKIDFSEFTAMMKKGDGVGRSRTMMKNLNFNIADAFGVEETSTAETDDKPN

SEQ ID NO: 4794 - DNA, 1590 bp, Brassica napus
  CDS (1)..(1590)
atggggaactgttgcagatctcccgcagctgtagctcgagaagacgtgaaatcaaactactccggccacgatcacccccgcaaagactccaccaacggcaaaaaatcagctccgattcgagtcctcacggacgtccccaaggagaacatcgaggaccggtacttgctcgaccgagagctcggacgcggcgagttcggcgtcacctacctctgcatcgagagagccacgcgcgacctcctcgcgtgcaagtcgatctcgaagaggaagctcaggaccgccgtggatatcgaggacgtgaagagggaggtggcgattatgcagcatttgcctaagagctcgagcatcgtcactctgaaggaggcttgcgaggacgacaacgctgtgcacttggtgatggagttgtgtgaaggcggcgagcttttcgataggattgtggctagagggcactacacggagcgagccgcggcgggagtcacgaagacgatcatggaggttgtgcagctttgccataagcacggggttattcatagagatttgaagccggagaattttttgtttgctaacaagaaggagaactctccgctgaaagctattgactttggattgtctatcttcttcaagccaggtgagaagttctcggagatagttgggagtccatattacatggcacctgaggtgctaaagaggagctatggacctgaaatagatatttggagtgctggagtcattctttatattctgctttgtggagttcctcctttctgggcagagtcggaacagggagttgctcaggctattttacgcgggataattgattttaagagggaaccgtggccaaacatttcggagactgctaagagtcttgtcagacaaatgttagagcctgatccaaagcgccggctgactgcaaagcaagtgcttgagcacccatggattcaaaacgccaagaaagctccaaatgttcctcttggagatgttgtgaagtccagattaaagcagttttcagtgatgaacagattcaagagaaaagctttgagggttattgctgaatttttatcttcacaagaagtagaagacatcaaagagatgttcaacaagatggatactgacaaagatggtattgttaccatcgaggagttgaaagctggacttcgcgattttggtacacagctagctgaatcagaagttcagatgcttattgaagcggtggatactaaagggaaaggaacactagactatggagaatttgttgcagtctctctccacctgcaaaaggtagcaaacgatgagcatctccgcaaagcattctcctactttgacaaggatggaaatgggtacattttcccccaagagctttgtgaagccttaaaggaagatggaggggatgactgtgtggatgtcgccaatgatatattccaagatgttgacactgacaaggatgggagaataagctacgaagagtttgcagcgatgatgaaagctgggacagactggaggaaagcatcgagacagtattccagggaaagattcaacagtttgagtctcaagttgatgagagacggttcattgcagttagaaggcgagaactga

SEQ ID NO: 4795 - protein, 529 aa, Brassica napus
MGNCCRSPAAVAREDVKSNYSGHDHPRKDSTNGKKSAPIRVLTDVPKENIEDRYLLDRELGRGEFGVTYLCIERATRDLLACKSISKRKLRTAVDIEDVKREVAIMQHLPKSSSIVTLKEACEDDNAVHLVMELCEGGELFDRIVARGHYTERAAAGVTKTIMEVVQLCHKHGVIHRDLKPENFLFANKKENSPLKAIDFGLSIFFKPGEKFSEIVGSPYYMAPEVLKRSYGPEIDIWSAGVILYILLCGVPPFWAESEQGVAQAILRGIIDFKREPWPNISETAKSLVRQMLEPDPKRRLTAKQVLEHPWIQNAKKAPNVPLGDVVKSRLKQFSVMNRFKRKALRVIAEFLSSQEVEDIKEMFNKMDTDKDGIVTIEELKAGLRDFGTQLAESEVQMLIEAVDTKGKGTLDYGEFVAVSLHLQKVANDEHLRKAFSYFDKDGNGYIFPQELCEALKEDGGDDCVDVANDIFQDVDTDKDGRISYEEFAAMMKAGTDWRKASRQYSRERFNSLSLKLMRDGSLQLEGEN

SEQ ID NO: 4796 - DNA, 1791 bp, Brassica napus
  CDS (1)..(1791)
atgggaggtcgaacctacaaaccctcctcctccgtgaaacccaaagacgcgttcccacaaaatgacgatactacccctgcccatcccggcaaatcaccggtccgtacctcaaccgccgtgaagtcctctcctttcctcccattctacactccaagccccgccaggcaccgccggaacaagacccgcgacggaggaggaggaggagagagcaagagcgtcaccagcactccgctccgtcaactcgcgcgtgctttccaccctccgtcgccagcgaaacacatccgggatgttctgcggcggaggaaggggaaaaaggaagctactttgccggcggagaagaagcagacggaggaggagaaggagagagaggaggtggggctggacaagagattcggattctcaagggagtttcagagtaggatggagttaggggaagagattgggagagggcattttgggtatacttgctctgctaagttcaagaaaggagagctcaaggatcatgaggttgctgttaaagtcatccctaaatctaagatgacaactgcaatatctatagaggatgtaagaagagaagttaagatcctgcgggcgttatctggacataacaatctagtacaattctacgatgcgtttgaggacaatgctaacgtctacatcgttatggagttatgtggaggtggtgaactccttgacagaatactagcaaggggagggaaatactcagaagatgatgcaaaagaagtgcttatacagatccttaacgttgtagctttctgtcatctccaaggagttgttcatcgagatcttaaaccagagaacttcttgtacacttccaaggaggagaactctcagttgaaagtcatagactttggtttatcagactttgtcagaccagacgagagactaaacgatatagtgggtagtgcatactacgtagcccctgaagttctacacagatcttacaccacggaagcggatgtatggagtataggagtcatagcatacattctcctatgtggaagccgtcccttttgggcaagaactgaatcaggaatcttcagagcagttcttaaagctgatccgagttttgatgagcctccttggccttcattgtcctttgaagcaaaagattttgttaaacggttactgtacaaagatccacgaaagagaatgacagcctctcaagctttgatgcatccttggatctctggaagtaagaagatgaatatcccatttgatattctgatcttcaggcagatgaaagcatatttgaaatcttcttctttgcgcaaagctgctttgatggctctgtccaagacattgattacagatgaacttctttatctgaaagcacagtttgcgatcttagcacctaacaaaaacggtctcatcactctggataacatcagatcggcacttgcttcaaatgcaacagaagcaatgaaagaatcaaggataccagactttcttgcattgttaaatggacttgaatacaaagggatggattttgaagagttttgtgcagcttccattagtgttcatcagcatgagtcgcttgattgttgggagcagagcgttcgccatgcttatgagctctttgagatgaatggaaaccgagttatcgtcatcgaagaactcgcttccgaactcggtgttggatcatcgattccagtccataccatcctacatgactggataagacacactgatgggaagctaagcttcttgggttttgtcaaactgttgcacggtgtctctactcgacagcctttagctaaaacacggtga

SEQ ID NO: 4797 - protein, 596 aa, Brassica napus
MGGRTYKPSSSVKPKDAFPQNDDTTPAHPGKSPVRTSTAVKSSPFLPFYTPSPARHRRNKTRDGGGGGESKSVTSTPLRQLARAFHPPSPAKHIRDVLRRRKGKKEATLPAEKKQTEEEKEREEVGLDKRFGFSREFQSRMELGEEIGRGHFGYTCSAKFKKGELKDHEVAVKVIPKSKMTTAISIEDVRREVKILRALSGHNNLVQFYDAFEDNANVYIVMELCGGGELLDRILARGGKYSEDDAKEVLIQILNVVAFCHLQGVVHRDLKPENFLYTSKEENSQLKVIDFGLSDFVRPDERLNDIVGSAYYVAPEVLHRSYTTEADVWSIGVIAYILLCGSRPFWARTESGIFRAVLKADPSFDEPPWPSLSFEAKDFVKRLLYKDPRKRMTASQALMHPWISGSKKMNIPFDILIFRQMKAYLKSSSLRKAALMALSKTLITDELLYLKAQFAILAPNKNGLITLDNIRSALASNATEAMKESRIPDFLALLNGLEYKGMDFEEFCAASISVHQHESLDCWEQSVRHAYELFEMNGNRVIVIEELASELGVGSSIPVHTILHDWIRHTDGKLSFLGFVKLLHGVSTRQPLAKTR

SEQ ID NO: 4798 - DNA, 1596 bp, Brassica napus
  CDS (1)..(1596)
atgggaaactgttgtgcaacccctggttccgacaccaagtccaaagacgccaaaccaaagaccaaaaacaaccctttttacagcgaagcctacactacaacaaccggagctggcttcaagctctccgttttaaaagatccaacaggacatgacataaccctcatgtacgatcttggccgcgaggttggtcgtggagagttcggtatcacctacctctgcactgatatcaacaccggtgagaagtatgcgtgcaagtctatatccaagaagaagcttaggacggctgtggatatagaggatgttaggagagaagttgagatcatgaggcatatgcctgagcatcccaatgttgttactttgaaggagacttatgaggatgagcatgctgttcatttggttatggagctttgtgaaggtggggagttgtttgataggattgtggcgagagggcattacactgagagagctgctgctgttgtcactaagaccatcatggaagttgttcaggtgtgtcataaacatggggtaatgcacagggacctgaaacctgagaacttcttatttgcaaacaagaaggagactgcacctcttaaggctattgattttggactctctgttttcttcaaaccaggcgagaggttcaacgaaatcgttgggagtccgtactacatggctcctgaggtgctaaaacgaaactatgggcccgaagttgacatctggagtgctggtgtaattctttacatacttctctgtggtgttccacctttctgggcagaaactgaacaaggagttgcacaagcaattattcgatctcaattggacttcagaagggatccatggcccaaggtttctgaacacgccaaagaccttatcaggaaaatgcttgatcctgaccaaaagcgtcgtctcactgctcagcaagtgctagatcatccgtggttacagaatgcaaacacggctcccaatgtatcactaggtgaaacagtaagggcaaggttgaagcagttcactgtcatgaacaagctcaagaaacgagcactcagggttattgctgagcatctatcagatgaagaagcttctggtataagagaagggttccaaataatggacacaagccaaagagggaagatcaacatcgacgagctgaaaatagggttgcagaagcttggccataacattccccaagatgatatacaaatcttgatggacgctggagataccgataaagatggatacttggactgtgacgagttcattgccatatcagtgcatctcaggaaaatgggcaatgatgagcatctcaagaaagcgtttgcattctttgatcaagacaacaacgggtatattgaaatagaagagttaagggaagctttgtctgatgaagttggtacaagtgaagaggttgttgatgccattatccgtgatgttgatactgataaggatggaagaataagttatgaagaatttgcgacaatgatgaaaacaggaacagattggagaaaagcttctaggcagtactcaagggaacggtttaatagtatcagtcaaaaactgatgcaagatgcatcgttgcatgtcaatagcgaggcaatatga

SEQ ID NO: 4799 - protein, 531 aa, Brassica napus
MGNCCATPGSDTKSKDAKPKTKNNPFYSEAYTTTTGAGFKLSVLKDPTGHDITLMYDLGREVGRGEFGITYLCTDINTGEKYACKSISKKKLRTAVDIEDVRREVEIMRHMPEHPNVVTLKETYEDEHAVHLVMELCEGGELFDRIVARGHYTERAAAVVTKTIMEVVQVCHKHGVMHRDLKPENFLFANKKETAPLKAIDFGLSVFFKPGERFNEIVGSPYYMAPEVLKRNYGPEVDIWSAGVILYILLCGVPPFWAETEQGVAQAIIRSQLDFRRDPWPKVSEHAKDLIRKMLDPDQKRRLTAQQVLDHPWLQNANTAPNVSLGETVRARLKQFTVMNKLKKRALRVIAEHLSDEEASGIREGFQIMDTSQRGKINIDELKIGLQKLGHNIPQDDIQILMDAGDTDKDGYLDCDEFIAISVHLRKMGNDEHLKKAFAFFDQDNNGYIEIEELREALSDEVGTSEEVVDAIIRDVDTDKDGRISYEEFATMMKTGTDWRKASRQYSRERFNSISQKLMQDASLHVNSEAI

SEQ ID NO: 4800 - DNA, 1626 bp, Zea mays
  CDS (1)..(1626)
atgggaaactgctgccgctcgccggccgccgcggcgcgggaagacgtcaagtcgtcgcacttcccggcctccgccggcgggaagaagaagccccaccagcaggcgcggaacggcggccccggctccggggagaagaagcgtctgtcggtgctcggggaggaggggtgcgacgtgggcgcgggcgggatcgaggagaagtacgcgctggaccgggagctggggcgcggcgagttcggggtgacgtacctgtgcatggaccggggcacgcgggagctgctcgcctgcaagtccatctccaagcgcaagctgcggacggccgtcgacgtggaggacgtgcgccgggaggtggccatcatgcgccacctgcccaagagccccagcgtcgtgtccctgcgggaggcgtgcgaggacgagggcgccgtgcacctcgtcatggagctctgcgagggcggcgagctcttcgaccgcatcgtcgcgcgggggcactacaccgagcgcgccgccgccagtgtcacccgcaccatcgtcgaggtcgtccagctctgccaccgccacggcgtcatccaccgggacctcaagccggagaacttcctcttcgccaataagaaggagaactcgccgctcaaggccatcgacttcggtctctccatcttcttcaagcctggtgaaaagttttcagaaattgtgggaagtccctactacatggctcctgaagtcttgaagaggaactatggacctgaaatagacatatggagcgctggtgttatcttgtatattttgttatgtggcgttcctccgttttgggctgagactgaacaaggagttgcacaagctattctccggggaaatatagattttaagcgagaaccctggcccaatgtttctgacaatgctaaagatcttgttcggcagatgcttcaacctgatccaaaactcaggctaacagcaaagcaagttcttgagcatccctggcttcaaaatgctaagaaagctccaaatgttcctcttggagacattgtaaagtcaaggctgaaacagttttcaaggatgaacagattcaaaagaaaagctctaagggttattgctgatcacttgtcagctgaagaggttgaggacataaaggatatgttcaaggtgatggatactgataatgatggcatagtttcttatgaagagttaaagagtgggatcgcaaattttggttctcatcttgcagaatcagaagtgcaaatgcttatcgaagctgtggatacaaatggtagaggagcactagattacggtgaatttttggctgtctcgctccatttacaaaggatggcaaatgacgagcaccttcggcgggccttcctatttttcgacaaggatggcaacggtttcatcgagcccgaggagcttcaggaagccctgatggaggacgggggagctgataccatggacgtggtcaatgacatattgcaagaagttgacacagacaaggatgggaaaattagctacgacgaatttgtagcgatgatgaaaactggcacggactggaggaaggcatcgcggcactattcaagagggcgcttcaatagccttagcataaagcttataaaagacgggtctgtaaagctgggtagcgagtga

SEQ ID NO: 4801 - protein, 541 aa, Zea mays
MGNCCRSPAAAAREDVKSSHFPASAGGKKKPHQQARNGGPGSGEKKRLSVLGEEGCDVGAGGIEEKYALDRELGRGEFGVTYLCMDRGTRELLACKSISKRKLRTAVDVEDVRREVAIMRHLPKSPSVVSLREACEDEGAVHLVMELCEGGELFDRIVARGHYTERAAASVTRTIVEVVQLCHRHGVIHRDLKPENFLFANKKENSPLKAIDFGLSIFFKPGEKFSEIVGSPYYMAPEVLKRNYGPEIDIWSAGVILYILLCGVPPFWAETEQGVAQAILRGNIDFKREPWPNVSDNAKDLVRQMLQPDPKLRLTAKQVLEHPWLQNAKKAPNVPLGDIVKSRLKQFSRMNRFKRKALRVIADHLSAEEVEDIKDMFKVMDTDNDGIVSYEELKSGIANFGSHLAESEVQMLIEAVDTNGRGALDYGEFLAVSLHLQRMANDEHLRRAFLFFDKDGNGFIEPEELQEALMEDGGADTMDVVNDILQEVDTDKDGKISYDEFVAMMKTGTDWRKASRHYSRGRFNSLSIKLIKDGSVKLGSE

SEQ ID NO: 4802 - DNA, 1518 bp, Glycine max
  CDS (1)..(1518)
atggggaactgtaacagcgaaccctcttcccaaacccagccacattccgatcaccaccatcatcacccccaaccctccaacggcatcactgtccttcctcccaattcgaagccctccgtaggccgggttctgggccggcccatggaggacgcccgctccacctacaccttcggccgcgagctgggccgcgcccaattcggcgtgacctaccaagtgacccacaaacacacgaaacagcaattcgcgtgcaaatccatcgccacgcgcaagctcgtccaccgcgatgacttggaggacgtccggcgagaggtgcagatcatgcaccacctcaccggccaccgcaacatcgtggagctcaagggcgcttacgaggaccgccactccgtcaacctcatcatggagctctgcggcggcggcgagctcttcgaccgcatcatcgccaagggccactactccgagcgcgccgccgcagatctctgccgccagatcgtgacggtggtccacgattgccacaccatgggagtcatgcatagggacttgaagcccgagaatttcttgttgctcaacaagaacgatgattcccccctcaaggccacagattttggcctctccgtcttttttaagccaggggatgtgtttagagaccttgttgggagtgcttactatgttgctcctgaggtgctgagaagaagttatggacctgaagctgatatttggagtgctggagttatattgtacattctactttctggtgttccacctttttgggcagaaaatgaacagggtatatttgatgctattcttcgtggacatattgattttgcatcagatccttggccttccatatcgagtagtgccaaagatctggtcaagaagatgttacgagctgaccccaaacaaagactttcagcagttgaagtacttaatcatccttggatgagagaagatggagcatctgataaacctctagatgttgctgttttatccagaatgaaacaatttagggcaatgaacaagctaaagaaagttgctctgaaggttattgctgaaaacctttctgaagaagaaatcattggcttgaaggaaatgtttaaatccatggacacagataacagtggaacaatcacttttgaagagttgaaagctggtctgccaaaactgggtactaaggtttctgagtctgaagtaaggcagttgatggaagcggctgatgtagacggaaatgggaccattgattacattgaatttataacagctaccatgcacatgaatagaatggaaagagaggaccacctatataaagcttttgaatattttgacaaggatagaagcgggtacatcacaatggaagagttggaatctacccttaaaaaatataatatgggtgatgagaaaacaataaaggaaatcattgtggaagtcgatacagacaatgatggaagaattaattatgatgagtttgtagccatgatgaggaaaggcaaaccagatttagtaaccaacagacgtcgcaaatga

SEQ ID NO: 4803 - protein, 505 aa, Glycine max
MGNCNSEPSSQTQPHSDHHHHHPQPSNGITVLPPNSKPSVGRVLGRPMEDARSTYTFGRELGRAQFGVTYQVTHKHTKQQFACKSIATRKLVHRDDLEDVRREVQIMHHLTGHRNIVELKGAYEDRHSVNLIMELCGGGELFDRIIAKGHYSERAAADLCRQIVTVVHDCHTMGVMHRDLKPENFLLLNKNDDSPLKATDFGLSVFFKPGDVFRDLVGSAYYVAPEVLRRSYGPEADIWSAGVILYILLSGVPPFWAENEQGIFDAILRGHIDFASDPWPSISSSAKDLVKKMLRADPKQRLSAVEVLNHPWMREDGASDKPLDVAVLSRMKQFRAMNKLKKVALKVIAENLSEEEIIGLKEMFKSMDTDNSGTITFEELKAGLPKLGTKVSESEVRQLMEAADVDGNGTIDYIEFITATMHMNRMEREDHLYKAFEYFDKDRSGYITMEELESTLKKYNMGDEKTIKEIIVEVDTDNDGRINYDEFVAMMRKGKPDLVTNRRRK

SEQ ID NO: 4804 - DNA, 1746 bp, Glycine max
  CDS (1)..(1746)
atggggaacacgtgtgttggtcctagcatttcaaaaaatggttttgttcaatcagtttctgcggcgatttggcggtcccaattgcctgaaggttcagtgtctaatagagaatctgtaaaagaggaagcaactagtgtgcccgaatcgcccttgcctgtccaaaacaagcctcctgagcagataactatgccgaaacaagaagccaaacaagagggaaaatcagaaatagaaccggaaaaggaacaggataagaagaaacagaagaaacgtggttcagtgaagagagtttctagcgcagggcttcgtgttgattctgtgttgcaaagagagaccgataatttcaaggagttcttcactcttgggagaaaacttggacagggtcagttcgggacaacgttcttgtgcgtggaaaaggcaacagggcaggagtacgcctgcaaatctattgcaaagaggaagctcgtcaccgatgatgatgtcgaggatgtgagaagagaaattcagataatgcaccacttggccgggcatcctaatgttatatccatcaaaggtgcatatgaggatgccgtggctgttcatgttgtgatggaattatgtgcaggtggagagcttttcgataggattattcagcgtggccattataccgagagacaggcagccaagcttactaagactatagttggcgttgtggaagcttgccattctcttggtgtgatgcacagagaccttaaacctgagaattttctctttgtcaatcagcacgaggattcccttctcaaaaccattgactttggattatctgtcttctttaagccaggtgatatatttaatgatgtggtgggcagcccatactatgttgccccggatgttttgcgaaagcgttatggtcctgaggcagatgtttggagtgctggtgttatcctttacattcttttgagtggagtacctccattttgggctgaaaacgaacaaggaatatttgaacaagttctgcgtggtgatcttgacttttcttctgatccctggccttcaatttctgaaagtgcaaaagatttagtaagaaaaatgcttgttcgcgaccctagaaggcggttgactgcacatcaagtattatgtcatccttggattcaagttgatggtgtagctcctgacaagccacttgattctgccgtattaagtcgcttgaagcaattttctgctatgaacaagctcaaaaaaatggcccttataattattgcagagagcttatctgaagaagaaatagctggcttaaaagaaatgttcaagatgatagatgcagataacagtggtcaaatcacttttgaagaacttaaagctggtttgaaaagagtcggcgctaatcttaaggagtctgaaatttatgatttaatgcaagcagctgatgttgataacagtgggacaattgattacggcgagttccttgctgcaacgttgcaccgcaacaaaattgaaagagaagataatctatttgcagccttttcttactttgataaagatggaagtggctatattactcaggaagaacttcaacaggcttgtgatgagtttggcataaaagatgtccgtttggaagagataatcaaggaaattgatgaagataatgatggacgcatagattacaatgagtttgtggctatgatgcagaaaggaaatcttccagcggttggtaagaagggcctagaaaatagcttcagcgttaagttcagggaggcattaaaattgtag

SEQ ID NO: 4805 - protein, 581 aa, Glycine max
MGNTCVGPSISKNGFVQSVSAAIWRSQLPEGSVSNRESVKEEATSVPESPLPVQNKPPEQITMPKQEAKQEGKSEIEPEKEQDKKKQKKRGSVKRVSSAGLRVDSVLQRETDNFKEFFTLGRKLGQGQFGTTFLCVEKATGQEYACKSIAKRKLVTDDDVEDVRREIQIMHHLAGHPNVISIKGAYEDAVAVHVVMELCAGGELFDRIIQRGHYTERQAAKLTKTIVGVVEACHSLGVMHRDLKPENFLFVNQHEDSLLKTIDFGLSVFFKPGDIFNDVVGSPYYVAPDVLRKRYGPEADVWSAGVILYILLSGVPPFWAENEQGIFEQVLRGDLDFSSDPWPSISESAKDLVRKMLVRDPRRRLTAHQVLCHPWIQVDGVAPDKPLDSAVLSRLKQFSAMNKLKKMALIIIAESLSEEEIAGLKEMFKMIDADNSGQITFEELKAGLKRVGANLKESEIYDLMQAADVDNSGTIDYGEFLAATLHRNKIEREDNLFAAFSYFDKDGSGYITQEELQQACDEFGIKDVRLEEIIKEIDEDNDGRIDYNEFVAMMQKGNLPAVGKKGLENSFSVKFREALKL

SEQ ID NO: 4806 - DNA, 1650 bp, Glycine max
  CDS (1)..(1650)
atgggcaacacttgccgcggatctttgaaaggtaaatattctcagggcttgagccagcccgaagaccattcaaagcccaccaccacccattctgatccctcctccgaccacccctctaccaagcaatctgcagaaaactacaacaacaacaactatcttcccttcaacgccaagagagagtccatcatgcgccgcggcctcgacaaccaagcctattatgtcctaggccataagactcccaacattcgtgatctatacactcttggtcgtaaattgggacagggccaatttggcaccacttatttatgcaccgagaattctacctccattgaatatgcctgcaaatccatctccaaaaggaagttgatttccaaggaggacgtcgaggacgttaggagggaaattcagataatgcatcatttagctggtcacaagaacattgtcaccatcaagggtgcttatgaggatcctctctatgttcatattgtcatggagctttgttccgggggtgagttgtttgatcgcatcatccagaggggccactataccgagaggaaggccgcggagttgaccaaaattattgttggggttgttgaggctcgccattcccttggggtcatgcatagagatctcaagcctgaaaactttctcttggtcaacaaagatgatgatttctctcttaaagccattgactttggcctctccgttttcttcaaacccggtcaagttttcactgatgtagtcggcagcccatactatgttgctcctgaggttctcctcaaacattatgggcctgaagcagatgtgtggacagcgggtgtcatactgtacatattgcttagtggagtgccgccattttgggcagagacccagcagggtatatttgatgcagtattgaagggacttatagattttgactcagatccttggcctctaatatctgacagtgcaaaagatctgattagaaagatgctgtgttctcggccttcagaacggttgactgctcatcaagtgttatgtcatccttggatatgtgaaaatggagttgcccctgacaggtcactggaccctgctgttctttctcgtctcaaacagttttctgctatgaataagctaaagaagatggctctgcgagtgattgctgaaagtctatccgaagaggagattgccggtttgagagaaatgtttcaggctatggatactgataacagtggtgcaatcactttcgatgaactcaaagctggtctaagaagatatgggtctacccttaaggatatagaaatacgtgatcttatggaagcggctgatgtggacaaaagtggaaccatagattatggggagtttattgctgcaacatttcatctcaacaaactagagcgtgaagaacatcttattgcagcattccaatattttgacaaggatggtagtggctacattacagttgatgaacttcaacaagcttgtgcagaacataacatgactgatgcttttcttgaagatattattagagaagttgatcaagataatgatggaaggattgattatggtgaatttgctgccatgatgcaaaaaggcaacgctggaattggtaggaggactatgcgcaacagtctgaatttaagcatgagagatgcaccaagtgctcaatag

SEQ ID NO: 4807 - protein, 549 aa, Glycine max
MGNTCRGSLKGKYSQGLSQPEDHSKPTTTHSDPSSDHPSTKQSAENYNNNNYLPFNAKRESIMRRGLDNQAYYVLGHKTPNIRDLYTLGRKLGQGQFGTTYLCTENSTSIEYACKSISKRKLISKEDVEDVRREIQIMHHLAGHKNIVTIKGAYEDPLYVHIVMELCSGGELFDRIIQRGHYTERKAAELTKIIVGVVEARHSLGVMHRDLKPENFLLVNKDDDFSLKAIDFGLSVFFKPGQVFTDVVGSPYYVAPEVLLKHYGPEADVWTAGVILYILLSGVPPFWAETQQGIFDAVLKGLIDFDSDPWPLISDSAKDLIRKMLCSRPSERLTAHQVLCHPWICENGVAPDRSLDPAVLSRLKQFSAMNKLKKMALRVIAESLSEEEIAGLREMFQAMDTDNSGAITFDELKAGLRRYGSTLKDIEIRDLMEAADVDKSGTIDYGEFIAATFHLNKLEREEHLIAAFQYFDKDGSGYITVDELQQACAEHNMTDAFLEDIIREVDQDNDGRIDYGEFAAMMQKGNAGIGRRTMRNSLNLSMRDAPSAQ

SEQ ID NO: 4808 - DNA, 1884 bp, Zea mays
  CDS (1)..(1884)
atggggcagtgctacgggaaggcgcgcggcgcgtcctcgcgggcggaccacgacgccgacccctcgggggcggggtcggtcgcgccgccatccccgctgccggccaacggcgcgccgctgcccgccacgcccaggcgccacaagtccggatccaccacgccggtgcaccaccaccaggcggcgacgcccggcgccgccgcctggcctagcccgtacccggccggcggcgccagcccgctccccgcgggcgtgtcgccgtcgccggcccggtccacgccccggaggttcttcaagcggcccttcccgccgccctcgcccgccaagcacatcaaggccacgctcgccaagcgcctcggcgggggcaagcccaaggagggcaccataccggaggagggcggcgcgggggccggggccggggccggggccggcgccggcgccggcgcggccgttggtgccgccgattccgccgaggccgaccgcccgttggacaaaacgttcggcttcgccaagaactttggggccaagtacgatctcgggaaggaggtcgggaggggccactttggccacacctgctccgccgtcgtcaagaagggcgagcacaagggccataccgtcgccgtcaagatcatctccaaagctaagatgacaacggccatttccattgaagatgttcgtagggaggtcaagattttgaaagccctatcagggcacgataatctcgtcagattctatgatgcatgtgaggacgccctcaatgtctacattgtcatggaattatgtgaaggtggagagttgctagacagaattttagcaagaggtgggagatatacagaagaagatgccaaagcgatcattgtacagattttgagcgtagtggccttctgtcatcttcagggagtagtgcatcgtgatttgaagccagagaattttctcttcacaacaagagatgaaagcgctcctatgaagttgattgactttggtctgtcagattttattagaccagatgaaaggctcaatgatattgttggaagtgcttattatgttgctccagaggttctacacagatcatacagtatggaagcagacatttggagtataggtgttataacatacattctgctctgtggcagtcggccattctgggcaaggacagaatctgggatcttccggtccgtattgagggctgatcccaattttgacgattcaccatggccttcagtatcggctgaggctaaggattttgtgaagagatttctgaacaaagattaccgcaaaagaatgactgctgtccaagcactgactcacccttggttacgagatgaacaaaggcaaattccattggacatactcattttcagattagttaagcagtatctccgtgctactcctcttaaacgtttggcattaaaggcactatctaaggctttaagcgaggatgaacttttgtatcttaggttgcagtttaagctgcttgaacccagagatgggttcgtgtcactcgacaactttcggacggctctgacaagatactcaactgacgccatgagagaatcaagggttcttgagtttcagcatgcgttggaaccacttgcgtacagaaagatggactttgaagaattctgtgctgcagcaatcagcccgtaccagctggaagctttggaaaggtgggaagaaattgctggaacagcttttcagcactttgaacaagagggcaaccgagttatatcagttgaggagttagcacaggaactaaatctcgcgccgacacattactccattgtgcaagactggatcagaaaatcggacggcaagcttaactttcttgggttcaccaaatttttgcacggtgtcacgatacggggttcaaatacaagacgacactaa

SEQ ID NO: 4809 - protein, 627 aa, Zea mays
MGQCYGKARGASSRADHDADPSGAGSVAPPSPLPANGAPLPATPRRHKSGSTTPVHHHQAATPGAAAWPSPYPAGGASPLPAGVSPSPARSTPRRFFKRPFPPPSPAKHIKATLAKRLGGGKPKEGTIPEEGGAGAGAGAGAGAGAGAAVGAADSAEADRPLDKTFGFAKNFGAKYDLGKEVGRGHFGHTCSAVVKKGEHKGHTVAVKIISKAKMTTAISIEDVRREVKILKALSGHDNLVRFYDACEDALNVYIVMELCEGGELLDRILARGGRYTEEDAKAIIVQILSVVAFCHLQGVVHRDLKPENFLFTTRDESAPMKLIDFGLSDFIRPDERLNDIVGSAYYVAPEVLHRSYSMEADIWSIGVITYILLCGSRPFWARTESGIFRSVLRADPNFDDSPWPSVSAEAKDFVKRFLNKDYRKRMTAVQALTHPWLRDEQRQIPLDILIFRLVKQYLRATPLKRLALKALSKALSEDELLYLRLQFKLLEPRDGFVSLDNFRTALTRYSTDAMRESRVLEFQHALEPLAYRKMDFEEFCAAAISPYQLEALERWEEIAGTAFQHFEQEGNRVISVEELAQELNLAPTHYSIVQDWIRKSDGKLNFLGFTKFLHGVTIRGSNTRRH

SEQ ID NO: 4810 - DNA, 1524 bp, Glycine max; identical to SEQ ID NO: 2251
  CDS (1)..(1524)

SEQ ID NO: 4811 - protein, 507 aa, Glycine max; identical to SEQ ID NO: 2252

SEQ ID NO: 4812 - DNA, 1587 bp, Glycine max
  CDS (1)..(1587)
atgggttgtcatggtagcaaggagaaaaaatcaaacacttcctatggatcagcagccactggtagtggtagtggtagtggcagtggtggtggttacacactgttcagccatcaccacctactaccctcaggttcagcatcagcacagactccagaaaaccgaaaagcttctcctacagtgcagaagaaagcagacacaagcatcggggggaaaccctgtgacgacataaagaaatactacagtatagggaaggaattgggaaggggccaattcgggataacgtatctgtgcacggagaattcgagcggggggacgtacgcgtgcaagtcgatactgaagaggaagctggtctcgaaggcggacagggaggacatgaagagggagattcagatcatgcagcatttgtcggggcaacccaacattgtcgagttcaagggcgcctacgaggacagcttctccgtccaccttgtcatggaactctgcgccggcggggagctcttcgatcgtatcatcgcccagggtcactactccgagagagccgctgcctctctctgccgctccatcgtcaacgttgtccacatttgccacttcatgggcgtcatgcaccgcgatctcaagcccgaaaatttcttgctctctaccaaggacgaccacgccaccctcaaggccactgattttggtctctctgtcttcattgaacaagggaaggtttaccatgatatggttggcagtgcttactatgttgctcctgaggtattgcgtcgtagttatggaaaggaaatagatatttggagcgcaggcatcatattgtatattcttctgagtggtgtaccacctttttgggctgaaactgaaaagggaatatttaatgccatattggaaggtgaaattgattttgtaagtgaaccatggccatccatatcagacagtgctaaagacctagtcaggaagatgctgacacaggatccaaacaagcggattacttcttctcaagtccttgaacacccatggatgagagaaggtggagatgcatctgataaaccaatcgatagtgcagttctatccagaatgaaacaattcagggcaatgaataagctcaagaagctagcattgaaggttatcgctgaaaatctatcagaagaggagattaaaggtctcaaagcaatgtttgccaacatggacactgacaatagtggcactatcacctatgaagaaataaagactggcttggctcgaatcggatcaaaactgtctgaggctgaagtgaagcaactcatggatgctgctgatgttgatggaaatgggtcaattgactatcttgaaatcatttctgctacaatgcataggcacagacttgaacgtgatgaacatctttacaaagcattccagtattttgataaggataacagtggatatattactagagatgaattggagactgctatgacccaacatggaatgggtgatgaagcaacaataaaggaaataatctctgaggtggatacagataatgatgggagaataaactatgaggagttctgtgcaatgatgagaagtggaatgccacaccagggacagctactttaa

SEQ ID NO: 4813 - protein, 528 aa, Glycine max
MGCHGSKEKKSNTSYGSAATGSGSGSGSGGGYTLFSHHHLLPSGSASAQTPENRKASPTVQKKADTSIGGKPCDDIKKYYSIGKELGRGQFGITYLCTENSSGGTYACKSILKRKLVSKADREDMKREIQIMQHLSGQPNIVEFKGAYEDSFSVHLVMELCAGGELFDRIIAQGHYSERAAASLCRSIVNVVHICHFMGVMHRDLKPENFLLSTKDDHATLKATDFGLSVFIEQGKVYHDMVGSAYYVAPEVLRRSYGKEIDIWSAGIILYILLSGVPPFWAETEKGIFNAILEGEIDFVSEPWPSISDSAKDLVRKMLTQDPNKRITSSQVLEHPWMREGGDASDKPIDSAVLSRMKQFRAMNKLKKLALKVIAENLSEEEIKGLKAMFANMDTDNSGTITYEEIKTGLARIGSKLSEAEVKQLMDAADVDGNGSIDYLEIISATMHRHRLERDEHLYKAFQYFDKDNSGYITRDELETAMTQHGMGDEATIKEIISEVDTDNDGRINYEEFCAMMRSGMPHQGQLL

SEQ ID NO: 4814 - DNA, 1602 bp, Glycine max
  CDS (1)..(1602)
atgggcaactgctgcagatccccggccgctgtggcccgcgaggacgtcaaatcgagcttctccaacgccgaccacggcaagcgcggcggaggtggctccgcctccgccgccgccaagcagaaggccccgatcacggtgcttgccggcgtgccgaaagagaacatcgaggaccggtacctcgtggaccgcgagctcgggcgcggcgagttcggcgtgacgtacctctgcatcgaccgcgacacgcgcgagctgctcgcgtgtaagagcatctcgaagaggaagctccggacagccgtggacgtcgaggacgtgcgccgcgaggtcgccatcatgcgccacctgccggagagcccgagcatcgtgtcgctccgcgaggcctgtgaggacgacaatgccgtccacctcgtcatggagctctgcgagggcggcgaactcttcgaccggatcgtcgcccgcgggcactacaccgagcgcgccgccgccgccgtcacgcggacgatcgtcgaggtcgtgcagctctgccacaagcacggggtcatccaccgagacctcaagccggagaacttcttgttcgcgaacaagaaggagaattcgccgctcaaggctattgactttggcctctccatattcttcaagccaggtgagaggttctcagaaattgttggaagtccatattatatggctccagaagtgctcaagcggaattatggaccagaaatagatatatggagtgcaggagtaattctctacatcttattgtgtggtgttcccccattttgggctgaatctgagcaaggagttgcacaggccattcttcgaggacttatagattttaaaagggaaccatggcccagtatttctgaaagtgctaaaagccttgttaggcaaatgttagaaccagaccccaagcttcgattaactgccaaacaagtgcttgagcatccctggattcaaaatgctaagaaggctcctaatgttccacttggagatgttgtcaagtcaaggcttaagcaattttcaatgatgaacagattcaaaagaaaagcccttagggtcattgctgatttcttatccaatgaagaagttgaagacatcaaagatatgttcaagaagatggataatgataatgatggcattgtttccattgaagaactaaaagctggatttcgaaactttgggtctcaactggctgagtctgaagttcagttgcttattgaagctgtagatactaatggtaagggaacactagactacggagaattcgttgctgtttcccttcatttaagaaggatggctaatgacgatcatcttcacaaggccttctcctattttgacaaagatgggaatggatatattgaaccagatgagctacggaatgctttgatggaagatggagcagatgactgtacagatgtagcgaatgacattttcctagaagtagacacggacaaggatggacgtatcagctacgatgaatttgttgctatgatgaaaactggaacagattggagaaaagcatcaaggcattactcacgtggaagattcaatagcttgagcttaaagttgatgaaagacggttctttaaacttaggaaatgagtag

SEQ ID NO: 4815 - protein, 533 aa, Glycine max
MGNCCRSPAAVAREDVKSSFSNADHGKRGGGGSASAAAKQKAPITVLAGVPKENIEDRYLVDRELGRGEFGVTYLCIDRDTRELLACKSISKRKLRTAVDVEDVRREVAIMRHLPESPSIVSLREACEDDNAVHLVMELCEGGELFDRIVARGHYTERAAAAVTRTIVEVVQLCHKHGVIHRDLKPENFLFANKKENSPLKAIDFGLSIFFKPGERFSEIVGSPYYMAPEVLKRNYGPEIDIWSAGVILYILLCGVPPFWAESEQGVAQAILRGLIDFKREPWPSISESAKSLVRQMLEPDPKLRLTAKQVLEHPWIQNAKKAPNVPLGDVVKSRLKQFSMMNRFKRKALRVIADFLSNEEVEDIKDMFKKMDNDNDGIVSIEELKAGFRNFGSQLAESEVQLLIEAVDTNGKGTLDYGEFVAVSLHLRRMANDDHLHKAFSYFDKDGNGYIEPDELRNALMEDGADDCTDVANDIFLEVDTDKDGRISYDEFVAMMKTGTDWRKASRHYSRGRFNSLSLKLMKDGSLNLGNE

SEQ ID NO: 4816 - DNA, 1587 bp, Glycine max
  CDS (1)..(1587)
atgggttgttgtatgagtaaaaaagggtcagagccagaagaacacattgtttacagacatgttgcgggtgctgggggtgctggtgtgtacaataatcacaagagccatgaacccccttctcatcaaccttacccattacctgagaagcatgccccttggaggcctccaccaagcccaaaacatgttcacaagcatgacacaatcactgggaagccatttgaggatgttaaacagcactacacacttgggaaggaattggggagaggccaattcggggtgacttatctctgcactgagaattcaactggttttcagtatgcctgcaagtccatttcaaagaggaagcttgtgagcagagacgacaaggaggacatgaagagggagattcaaatcatgcagcatttgagtggacaatccaacattgtggagttcaaaggtgcttttgaggataagcaatcagttcatgtggttatggagctgtgtgctggtggtgaactttttgacaggattattgccaagggccactacagtgaaagggctgctgcttcaatatgtaggcaggttgttaaggttgttaacacctgccattttatgggtgtcattcatagggatctcaagccagagaatttcttgctatctagtaaggatgacaagggacttctcaaggccacggattttggcttgtcagtcttcattgaagaaggaaaggtgtatcgagatatagttggcagtgcttactatgttgctccagaagttctacgtcgtagctatgggaaggaagcagatatatggagtgcaggagttatattgtatatcttacttagtggtgtacctccattttgggcagagacggaaaagggaatatttgatgccatattgcaaggtcatattgattttgaaagtagtccatggccaagcatatcaaacagtgctaaagaccttgttcgcaaaatgcttataaaggatccaaagaaacgcattactgctgctcaggttctagagcacccatggcttaaagaaggtggaaatgcttctgacaagccaatagacagtgcagtgctttccagaatgaagcaattcagagcaatgaataaactaaaaaaactagccctcaaggtcattgctgaaaatctttctgaagaagagatccaaggcttgaaggcaatgttcacaaatattgacactgacaatagtggtacaatcacctatgaggaactgagggcaggattgcaaagacttggctcaaagcttactgaaactgaagtgcgacagcttatggatgccgctgatgtagatggaaatggcacaattgactacatagaattcatcactgctacaatgcatagacacaggttagaaagagatgagcatctttacaaggccttccaatattttgacaaagatggcagcgggtatatcacaagagatgaactggaaatagccatgaaggagtatggtatgggtgacgaggccacaatcagggaaattatatctgaagttgacacagataatgatggtagaatcaactatgaagaattttgtacaatgatgaggagtggaacccaacaacaaggcaagctattctga

SEQ ID NO: 4817 - protein, 528 aa, Glycine max
MGCCMSKKGSEPEEHIVYRHVAGAGGAGVYNNHKSHEPPSHQPYPLPEKHAPWRPPPSPKHVHKHDTITGKPFEDVKQHYTLGKELGRGQFGVTYLCTENSTGFQYACKSISKRKLVSRDDKEDMKREIQIMQHLSGQSNIVEFKGAFEDKQSVHVVMELCAGGELFDRIIAKGHYSERAAASICRQVVKVVNTCHFMGVIHRDLKPENFLLSSKDDKGLLKATDFGLSVFIEEGKVYRDIVGSAYYVAPEVLRRSYGKEADIWSAGVILYILLSGVPPFWAETEKGIFDAILQGHIDFESSPWPSISNSAKDLVRKMLIKDPKKRITAAQVLEHPWLKEGGNASDKPIDSAVLSRMKQFRAMNKLKKLALKVIAENLSEEEIQGLKAMFTNIDTDNSGTITYEELRAGLQRLGSKLTETEVRQLMDAADVDGNGTIDYIEFITATMHRHRLERDEHLYKAFQYFDKDGSGYITRDELEIAMKEYGMGDEATIREIISEVDTDNDGRINYEEFCTMMRSGTQQQGKLF

SEQ ID NO: 4818 - DNA, 1656 bp, Glycine max
  CDS (1)..(1656)
atgggttgttgtgcaagtaaagagtcagagccgcaacacaatggttacagacatgctgggactggtggtgtgcacaaccagaagactcatgaacctttggtcaaccaatcaagagcacctgcaaatcaaccttatcatttacatgaaaagcatgctgcatccactgctcagacagtgcctcagaatatgccatggaagcctcctggtccagcccttagtcctaaacctgttgttagtgttaggcaagacacaattcttgggaagcagtttgaggatgtgaagcagttctacacactcgggaaggaattgggtagagggcaatttggtgtgacatatctttgcactgagaattcaactgggttgcagtatgcctgcaagtccatttccaagaggaaacttgtgaagaaatctgataaggaggacataaagagggagattcagattatgcagcatttgagtggtcaacccaacattgttgagttcaaaggggcttatgaggataggagctcagttcatgttgtgatggagctgtgtgcaggtggggaactttttgataggattattgccaaggggcattacagtgagaaggctgctgcttcaatatgcagacaaattgtaaatgttgttcatatctgccatttcatgggtgtgatgcatagggatctgaaaccagagaatttcttgctatctagtagggatgaaaatgcacttctcaaggcaaccgattttggcttgtcagttttcattgaagaaggaaaggtatatcgggatatagttggtagtgcttactatgttgctcctgaagttctgcggcgcagatgtgggaaggaaatagatatatggagtgcaggagtcatattgtatatcttactgagtggagtccctccattttgggccgagactgagaagggaatatttgatgccatattggaaggtcacattgattttgaaagtcaaccatggcctaacatctcaaacaatgccaaggatcttgttcgtaagatgcttatacaggatccaaagaaacgcattacctctgctcaagttcttgagcacccatggattaaagatggaaatgcttcagacaagccgatagacagtgcagtcctttccagaatgaagcaatttagagcaatgaataagctaaagaaacttgccttgaaggtcattgctgagaatatgtctgcagaagagatccaaggtttgaaggcaatgtttacaaatatggacactgacaagagtggtacaatcacctatgaagaacttaagtcaggattgcatagacttggctcaaagcttacagaggctgaagtgaagcaacttatggaagctgctgatgtagatggaaatggctcaattgactacatagaattcatcactgctacaatgcatagacacaaattagaaagagatgaccaacttttcaaggccttccaatattttgataaagacaacagtgggtttattacaagagatgaattggaatcagccatgaaagaatatggtatgggtgatgatgcaacaatcaaggaaatcatatctgaagttgatacaattatatctgaagtggatacagatcatgatggtagaatcaactatgaagaattctctgcgatgatgaagagtgggaaccaacaacaaggcaagctattctaa

SEQ ID NO: 4819 - protein, 551 aa, Glycine max
MGCCASKESEPQHNGYRHAGTGGVHNQKTHEPLVNQSRAPANQPYHLHEKHAASTAQTVPQNMPWKPPGPALSPKPVVSVRQDTILGKQFEDVKQFYTLGKELGRGQFGVTYLCTENSTGLQYACKSISKRKLVKKSDKEDIKREIQIMQHLSGQPNIVEFKGAYEDRSSVHVVMELCAGGELFDRIIAKGHYSEKAAASICRQIVNVVHICHFMGVMHRDLKPENFLLSSRDENALLKATDFGLSVFIEEGKVYRDIVGSAYYVAPEVLRRRCGKEIDIWSAGVILYILLSGVPPFWAETEKGIFDAILEGHIDFESQPWPNISNNAKDLVRKMLIQDPKKRITSAQVLEHPWIKDGNASDKPIDSAVLSRMKQFRAMNKLKKLALKVIAENMSAEEIQGLKAMFTNMDTDKSGTITYEELKSGLHRLGSKLTEAEVKQLMEAADVDGNGSIDYIEFITATMHRHKLERDDQLFKAFQYFDKDNSGFITRDELESAMKEYGMGDDATIKEIISEVDTIISEVDTDHDGRINYEEFSAMMKSGNQQQGKLF

SEQ ID NO: 4820 - DNA, 1491 bp, Glycine max; identical to SEQ ID NO: 2263
  CDS (1)..(1491)

SEQ ID NO: 4821 - protein, 496 aa, Glycine max; identical to SEQ ID NO: 2264

SEQ ID NO: 4822 - DNA, 1620 bp, Glycine max
  CDS (1)..(1620)
atggggaactgcaacgcctgcgttcgagtcgatgacgtggcagactcaaaccgcggcaaaaagaataagaaaaccaaaccgaacccctacgcggaggaagagatacgctccggcgttccgatccgtgtgctgaaggacgtgacgtcacggagcctcatcggcgacaagtacgtgataggccgggagctaggtcgtggcgagttcgggataacgtacctctgcacggaccgcgaaacgaagcaggagctcgcgtgcaagtcgatctcgaagcggaagctgagaaccgcgatcgacgtggaggacgtgcggcgagaggtggcgatcatgtcgacgctgccggagcacgctaacgtggtgaagctgaaggcgacttacgaggacgaagagaacgttcatctcgttatggagctctgcgccggcggggagctcttcgaccggatcgtcgcgcgggggcactacagcgagcgtgccgccgcgaacgtggcgaggaccattgctgaggttgttaggatgtgtcacgccaatggtgttatgcatcgagaccttaaacctgagaattttctctttgcgaataagaaggagaattctgttctcaaggctattgactttggactctccgtgtttttcaagccaggggagaggttttcggagattgtggggagtccttactacatggcgccggaggtattgaaaaggaattatgggccagaggtggatgtgtggagtgctggggtgattctttatattttgttgtgtggagttcctccgttttgggcagaggacgaacgaggggtggctttggcaatattgaggggagtgatgaacttcaagagagaaccgtggcctcagatttcagatagtgctaagagtcttgtgcgccagatgttggagcatgatcctaagaagcgcttgacggctgaacaggtgcttgagcattcctggttacaaaatgcaaagaaagcttcaaatgttccattaggagatattgtgagaacaaggcttaggcaattctctttgatgaatagattaaaaaagagagcacttcgggtaattgcagagcatttgtctgttgaagaggtagaaataatcaaagacatgtttacattgatggacacaaacaaagatggcaaagtaacatatgaggagctgaaggttgggttacggaaggttggttcacaattggctgagccagagataaagatgctgatggaagtggctgatgttgatgggaatggagtacttgactatggagagtttgtagccgtgacaattcacttgcaaagaatggagaatgatgagcatttccgcaaagcattcatgtattttgacaaagatgggagtgggtatatcgagttaggggagctagagaaagcattaacagatgagtcgggagatactgatactgctgtattgaatgacatcatgcgtgaagttgacactgacagggatggtcgtatcagttatgaagagtttgtggccatgatgaaaactggaactgactggagaaaagcatctaggcagtattcaagggagagattcaagagcttgagcataaatttgatgaaggatggctcacttcagcttcatgacgatattagtggtcaagctgaagtggtttga

SEQ ID NO: 4823 - protein, 539 aa, Glycine max
MGNCNACVRVDDVADSNRGKKNKKTKPNPYAEEEIRSGVPIRVLKDVTSRSLIGDKYVIGRELGRGEFGITYLCTDRETKQELACKSISKRKLRTAIDVEDVRREVAIMSTLPEHANVVKLKATYEDEENVHLVMELCAGGELFDRIVARGHYSERAAANVARTIAEVVRMCHANGVMHRDLKPENFLFANKKENSVLKAIDFGLSVFFKPGERFSEIVGSPYYMAPEVLKRNYGPEVDVWSAGVILYILLCGVPPFWAEDERGVALAILRGVMNFKREPWPQISDSAKSLVRQMLEHDPKKRLTAEQVLEHSWLQNAKKASNVPLGDIVRTRLRQFSLMNRLKKRALRVIAEHLSVEEVEIIKDMFTLMDTNKDGKVTYEELKVGLRKVGSQLAEPEIKMLMEVADVDGNGVLDYGEFVAVTIHLQRMENDEHFRKAFMYFDKDGSGYIELGELEKALTDESGDTDTAVLNDIMREVDTDRDGRISYEEFVAMMKTGTDWRKASRQYSRERFKSLSINLMKDGSLQLHDDISGQAEVV

SEQ ID NO: 4824 - DNA, 1599 bp, Glycine max
  CDS (1)..(1599)
atgttcggccgcgccggcccggctgcagcgccgccggagccggtgacgccgcagaagaagcaaccgtcgcaggctaaacggcggcaagtgccggaggattcgcagaagaacccacgctccaaagacaaagcgggtgcgcgtcggcaagggacgcatgttccgtgcggaaagcgaacggatttcgggtacgagaaagacttcgagaatagattctcgctcgggaaattgttgggacatggacaattcggttacacctacgttggaatagacaaaacaaatggggatcgtgtcgccgttaagagactcgagaagagcaagatggttctgcctattgccgttgaggatgttaagcgagaggtcaagatattgaaagcacttactggccatgagaatgtggttcagttctataatgcttttgaagatggttcttatgtgtacatagttatggagttgtgcgagggtggagaactgctagatcggatattggccaagaaggacagtcgttatactgaaagagacgcagcggtggttgtaaggcagatgctcaaggttgcagctgagtgtcatttacatggtttggtacaccgggacatgaaaccagagaattttctttttaaatcaaccaaagaagattcacctttaaaggccactgattttggtttgtcagatttcataaaacctggaaaaaagtttcatgatattgttggcagtgcttactatgttgcacctgaagtgttaaaacgtaagtctggtcctcaatcagatgtgtggagtattggtgttattacatacatattgttgtgcggaagacgcccattttgggataagactgaggatggtatcttcaaggaggtcttacgtaagaagcccgattttcgtcggaaaccatggccaactattagtaatgctgcaaaagattttgtgaaaaaattactagtaaaggatcctcgggcgagattaactgctgctcaagctttatcacatccatgggttagagaaggaggagaagcattggagattcctattgatatatctgtcctgagcaacatgcggcagtttgtgaaatatagtcgattcaaacaatttgcactgagggcattggctagcacacttaatgaagaagagttggctgatataaaagatcaatttgatgctatagatgtagacaaaaatggttcgattagcctggaagagatgagacaggctcttgccaaagatcttccttggaaattgaaagaatcacgtgtactagagatattgcaagcgatagacaacaacactgatggtctagtggatttccgggagtttgtagcggctacattacacgtgcatcaattggaggaagactctgacaagtggcagcaactgtcacaggctgcttttgagaaatttgacctagataaagatggctatattactccggaagaacttagaatgcatacatgcttgagaggctccgttgatcctttgctagaggaagctgatattgacaaagatggaaaaataagcctaccagagtttcggagacttcttagaactgcaagcatgggttctcaaaatgtttcaagcccatctgttcatcggcggcagaggttctag

SEQ ID NO: 4825 - protein, 532 aa, Glycine max
MFGRAGPAAAPPEPVTPQKKQPSQAKRRQVPEDSQKNPRSKDKAGARRQGTHVPCGKRTDFGYEKDFENRFSLGKLLGHGQFGYTYVGIDKTNGDRVAVKRLEKSKMVLPIAVEDVKREVKILKALTGHENVVQFYNAFEDGSYVYIVMELCEGGELLDRILAKKDSRYTERDAAVVVRQMLKVAAECHLHGLVHRDMKPENFLFKSTKEDSPLKATDFGLSDFIKPGKKFHDIVGSAYYVAPEVLKRKSGPQSDVWSIGVITYILLCGRRPFWDKTEDGIFKEVLRKKPDFRRKPWPTISNAAKDFVKKLLVKDPRARLTAAQALSHPWVREGGEALEIPIDISVLSNMRQFVKYSRFKQFALRALASTLNEEELADIKDQFDAIDVDKNGSISLEEMRQALAKDLPWKLKESRVLEILQAIDNNTDGLVDFREFVAATLHVHQLEEDSDKWQQLSQAAFEKFDLDKDGYITPEELRMHTCLRGSVDPLLEEADIDKDGKISLPEFRRLLRTASMGSQNVSSPSVHRRQRF

SEQ ID NO: 4826 - DNA, 1590 bp, Glycine max
  CDS (1)..(1590)
atgggttgtcatggtagcaaggagaaaaaatcaaacacttcctatggatcagcagccactggtagtggtagtggtagtggcagtggtggtggttacaacactgttcagccatcaccacctactaccgatcaggttcaagcatcagcacagactccagaaaaccgaaaagcttctcctacagtgcagaagaaagcagacacaagcatcgtggggaaaccctttgacgacataaagaaatactacagtatagggaaggaattgggaaggggccaattcgggataacgtatctgtgcacggagaattcgagcggggggacgtacgcgtgcaagtcgatactgaagaggaagctggtctcgaaggcggacagggaggacatgaagagggagattcagatcatgcagcatttgtcggggcaacccaacattgtcgagttcaagggcgccttcgaggaccgcttctccgttcacctcgtcatggaactctgctccggcggggagctcttcgatcgtatcatcgcccagggtcactactccgagagagccgctgcctctctctgccgctccatcgtcaacgttgtccacatttgccacttcatgggcgtcatgcaccgcgatctcaagcccgagaatttcttgctctctaccaaggacgaccacgccaccctcaaggctactgattttggtctctctgtcttcattgaacaagggaaggtttaccatgatatggttggcagtgcttactatgttgctcctgaggtattgcgtcgtagttatggaaaggaaatagatatttggagcgcaggcatcatattgtatattcttctgagtggtgtaccgcctttttgggctgaaactgaaaagggaatatttaacgccatattggaaggtgaaattgattttgtaagtgaaccatggccatcgatatcagacagtgctaaagatctagtcaggaagatgctgacacaggatccaaagaagcggattacttctgctcaagttcttgaacacccatggatgagagaaggtggagacgcatctgataaaccaatcgatagtgcagttctatccagaatgaaacaattcagggcaatgaataagctcaagaagctagcattgaaggttatcgctgaaaatctatcagaagaggagattaaaggtctcaaagcaatgtttgccaatatggacactgacagtagtggcaccatcacctatgaagaactgaagactggcttggctcgaatcggatcaagactatccgaggctgaagtgaagcaactcatggatgctgctgatgttgatggaaatgggtcaattgactatcttgaattcatttctgctacaatgcataggcacagacttgaacgtgatgaacatctttacaaagcattccagtattttgataaggataacagtggatatattactagagatgaattggagactgctatgacccaacatggaatgggtgatgaagcaacaataaaggaaataatctctgaggtggatacagataatgatgggagaataaactatgaggagttctgtgcaatgatgagaagtggaatgccacaccagggacagctactttaa

SEQ ID NO: 4827 - protein, 529 aa, Glycine max
MGCHGSKEKKSNTSYGSAATGSGSGSGSGGGYNTVQPSPPTTDQVQASAQTPENRKASPTVQKKADTSIVGKPFDDIKKYYSIGKELGRGQFGITYLCTENSSGGTYACKSILKRKLVSKADREDMKREIQIMQHLSGQPNIVEFKGAFEDRFSVHLVMELCSGGELFDRIIAQGHYSERAAASLCRSIVNVVHICHFMGVMHRDLKPENFLLSTKDDHATLKATDFGLSVFIEQGKVYHDMVGSAYYVAPEVLRRSYGKEIDIWSAGIILYILLSGVPPFWAETEKGIFNAILEGEIDFVSEPWPSISDSAKDLVRKMLTQDPKKRITSAQVLEHPWMREGGDASDKPIDSAVLSRMKQFRAMNKLKKLALKVIAENLSEEEIKGLKAMFANMDTDSSGTITYEELKTGLARIGSRLSEAEVKQLMDAADVDGNGSIDYLEFISATMHRHRLERDEHLYKAFQYFDKDNSGYITRDELETAMTQHGMGDEATIKEIISEVDTDNDGRINYEEFCAMMRSGMPHQGQLL

SEQ ID NO: 4828 - DNA, 1656 bp, Glycine max
  CDS (1)..(1656)
atgggaaactgcaacgtgtgcgcgaaagctgacgtggtagaagatagcaataacaacaggaacaagaagtctaatgaaacgaaccgcgctaggaagaaagagccgaaaccattcacggacgaaccggcccggtcgacggcggctccgatccgggtcctgaaggacgtgattccaatgagccaccggacgcgcataagcgacaagtacatactgggccgggaactgggccggggcgagttcggaatcacctacctctgcacggaccgggagaggaaggaagcccttgcctgcaagtcgatctcgaagcggaagctccggactgccgtggacatcgacgacgtgcggcgcgaggtcgccatcatgtccacgctgccggagcaccccaacgtcgtgaagctgaaggcgacttacgaggacaacgagaacgtccacctcgtcatggagctctgcgaagggggagagctcttcgaccggattgtcgccaggggacactacagcgagcgcgccgccgccgccgtggcgcgcaccatcgccgaggttgttaggatgtgccacagcaatggcgtcatgcatagggacctcaagcctgagaatttcctcttcgcaaataagaaagagaattctgctctcaaggccatcgatttcggcctctccgtcttcttcaagccaggggagaggttttcagagattgttgggagtccttactacatggcgccggaggttttgaagcggaattacgggccggaggttgatgtgtggagtgctggggtgattctttatattttgttgtgtggggttcctccgttctgggcagagactgagcaaggtgtggctttggcgatcttgaggggtgtgattgacttcaagagggaaccttggccgcaaatatcggagagtgccaagagccttgtgcggcgaatgttggagccggatcctaaaaaccgcttgacagctgaacaggtgcttgaacatccctggctgcaaaatgcaaagaaagctccaaatgttccattaggagatattgtcaggtcaaggcttaagcagttttctgtgatgaatagattcaaaaagaaagctctgcgggtaattgcagatcatttatctgttgaagaggtagaaataatcaaagatatgtttacattgatggatactgacaaagatggcagagtaacgtttgaggaactaaaggctgggttgaggaaggttggttcacaattggctgagccagagataaagatgctgatggaagtggctgatgttgatgggaatggagtacttgactatggagagtttgtagctgttacaattcacttgcaaaaaatggagaatgatgagcatttccacaaagcattcaagttttttgacaaagatgggaatgggtatattgagttacgtgagctagaggaagcattagcagatgagtcaggagaaactgatgctgatgtattgaatgacatcatgcgtgaagttgacactgacaaggatggtcgcatcagttatgaggagtttgtggcgatgatgaaaactggaactgactggaggaaagcatctaggcaatattcaagggagagattcaagagtttgagcctaaatttgatgaaagatggctcgcttcagcttcatgatgaaattactggtcaagctgtggtggtttga

SEQ ID NO: 4829 - protein, 551 aa, Glycine max
MGNCNVCAKADVVEDSNNNRNKKSNETNRARKKEPKPFTDEPARSTAAPIRVLKDVIPMSHRTRISDKYILGRELGRGEFGITYLCTDRERKEALACKSISKRKLRTAVDIDDVRREVAIMSTLPEHPNVVKLKATYEDNENVHLVMELCEGGELFDRIVARGHYSERAAAAVARTIAEVVRMCHSNGVMHRDLKPENFLFANKKENSALKAIDFGLSVFFKPGERFSEIVGSPYYMAPEVLKRNYGPEVDVWSAGVILYILLCGVPPFWAETEQGVALAILRGVIDFKREPWPQISESAKSLVRRMLEPDPKNRLTAEQVLEHPWLQNAKKAPNVPLGDIVRSRLKQFSVMNRFKKKALRVIADHLSVEEVEIIKDMFTLMDTDKDGRVTFEELKAGLRKVGSQLAEPEIKMLMEVADVDGNGVLDYGEFVAVTIHLQKMENDEHFHKAFKFFDKDGNGYIELRELEEALADESGETDADVLNDIMREVDTDKDGRISYEEFVAMMKTGTDWRKASRQYSRERFKSLSLNLMKDGSLQLHDEITGQAVVV

SEQ ID NO: 4830 - DNA, 1602 bp, Glycine max
  CDS (1)..(1602)
atgggcaactgctgcagatccccggccgctgtggcccgcgaggacgtcaaatcgagcttctccaacgccgaccacggcaagcgcggcggaggtggctccgcctccgccgccgccaagcagaaggccccgatcacggtgcttgccggcgtgccgaaagagaacatcgaggaccggtacctcgtggaccgcgagctcgggcgcggcgagttcggcgtgacgtacctctgcatcgaccgcgacacgcgcgagctgctcgcgtgtaagagcatctcgaagaggaagctccggacagccgtggacgtcgaggacgtgcgccgcgaggtcgccatcatgcgccacctgccggagagcccgagcatcgtgtcgctccgcgaggcctgtgaggacgacaatgccgtccacctcgtcatggagctctgcgagggcggcgaactcttcgaccggatcgtcgcccgcgggcactacaccgagcgcgccgccgccgccgtcacgcggacgatcgtcgaggtcgtgcagctctgccacaagcacggggtcatccaccgagacctcaagccggagaacttcttgttcgcgaacaagaaggagaattcgccgctcaaggctattgactttggcctctccatattcttcaagccaggtgagaggttctcagaaattgttggaagtccatattatatggctccagaagtgctcaagcggaattatggaccagaaatagatatatggagtgcaggagtaattctctacatcttattgtgtggtgttcccccattttgggctgaatctgagcaaggagttgcacaggccattcttcgaggacttatagattttaaaagggaaccatggcccagtatttctgaaagtgctaaaagccttgttaggcaaatgttagaaccagaccccaagcttcgattaactgccaaacaagtgcttgagcatccctggattcaaaatgctaagaaggctcctaatgttccacttggagatgttgtcaagtcaaggcttaagcaattttcaatgatgaacagattcaaaagaaaagcccttagggtcattgctgatttcttatccaatgaagaagttgaagacatcaaagatatgttcaagaagatggataatgataatgatggcattgtttccattgaagaactaaaagctggatttcgaaactttgggtctcaactggctgagtctgaagttcagttgcttattgaagctgtagatagtaatggtaagggaacactagactacggggaattcgttgctgtttcccttcatttaagaaggatggctaatgacgatcatcttcacaaggccttctcctattttgacaaagatgggaatggatatattgaaccagatgagctacggaatgctttgatggaagatggagcagatgactgtacagatgtagcgaatgacattttcctagaagtagacacggacaaggatggacgtatcagctacgatgaatttgttgctatgatgaaaactggaacagattggagaaaagcatcaaggcattactcacgtggaagattcaatagcttgagcttaaagttgatgaaagacggttctttaaacttaggaaatgagtaa

SEQ ID NO: 4831 - protein, 533 aa, Glycine max
MGNCCRSPAAVAREDVKSSFSNADHGKRGGGGSASAAAKQKAPITVLAGVPKENIEDRYLVDRELGRGEFGVTYLCIDRDTRELLACKSISKRKLRTAVDVEDVRREVAIMRHLPESPSIVSLREACEDDNAVHLVMELCEGGELFDRIVARGHYTERAAAAVTRTIVEVVQLCHKHGVIHRDLKPENFLFANKKENSPLKAIDFGLSIFFKPGERFSEIVGSPYYMAPEVLKRNYGPEIDIWSAGVILYILLCGVPPFWAESEQGVAQAILRGLIDFKREPWPSISESAKSLVRQMLEPDPKLRLTAKQVLEHPWIQNAKKAPNVPLGDVVKSRLKQFSMMNRFKRKALRVIADFLSNEEVEDIKDMFKKMDNDNDGIVSIEELKAGFRNFGSQLAESEVQLLIEAVDSNGKGTLDYGEFVAVSLHLRRMANDDHLHKAFSYFDKDGNGYIEPDELRNALMEDGADDCTDVANDIFLEVDTDKDGRISYDEFVAMMKTGTDWRKASRHYSRGRFNSLSLKLMKDGSLNLGNE

SEQ ID NO: 4832 - DNA, 1587 bp, Glycine max
  CDS (1)..(1587)
atgggttgttgtatgagtaaaaaagggtcagagccagaagaacacattgtttacagacatgttgctggtgctgggggtgctggtgtgtacaataatcacaagagccatgaacccccttctcatcaaccttacccattacctgagaagcatgccccttggaggcctccaccaagcccaaaacatgttcacaagcatgacacaatcactgggaagccatttgaggatgttaaacagcactacacacttgggaaggaattggggagaggccaattcggggtgacttatctctgcactgagaattcaactggttttcagtatgcctgcaagtccatttcaaagaggaagcttgtgagcagagacgacaaggaggacatgaagagggagattcaaatcatgcagcatttgagtggacaatccaacattgtggagttcaaaggtgcttttgaggataagcaatcagttcatgtggttatggagctgtgtgctggtggtgaactttttgacaggattattgccaagggccactacagtgaaagggctgctgcttcaatatgtaggcaggttgttaaggttgttaacacctgccattttatgggtgtcattcatagggatctcaagccagagaatttcttgctatctagtaaggatgacaagggacttctcaaggccacggattttggcttgtcagtcttcattgaagaaggaaaggtgtatcgagatatagttggcagtgcttactatgttgctccagaagttctacgtcgtagctatgggaaggaagcagatatatggagtgcaggagttatattgtatatcttacttagcggtgtaccaccattttgggcagagacggaaaagggaatatttgatgtcatattgcaaggtcatattgattttgaaagtagtccatggccaagcatatcaaacagtgctaaggaccttgttcgcaaaatgcttataaaggatccaaagaaacgcattactgctgctcaggttctagagcacccatggcttaaagaaggtggaaatgcttctgacaagccaatagacagtgcagtgctttccagaatgaagcaattcagagcaatgaataaactaaaaaaactagccctcaaggtcattgctgaaaatctttctgaagaagagatccaaggcttgaaggcaatgttcacaaatatcgacactgacaatagtggtacaatcacctatgaggaactgagggcaggattgcaaagacttggctcaaagcttactgaaactgaagtgcgacagcttatggatgccgctgatgtagatggaaatggcacaattgactacatagaattcatcactgctacaatgcatagacacaggttagaaagagatgagcatctttacaaggccttccaatattttgacaaagatggcagcgggtatatcacaagagatgaactggaaatagccatgaaggagtatggtatgggtgacgaggccacaatcagggaaattatatctgaagttgacacagataatgatggtagaatcaactatgaagaattttgtacaatgatgaggagtggaacccaacaacaaggcaagctattctga

SEQ ID NO: 4833 - protein, 528 aa, Glycine max
MGCCMSKKGSEPEEHIVYRHVAGAGGAGVYNNHKSHEPPSHQPYPLPEKHAPWRPPPSPKHVHKHDTITGKPFEDVKQHYTLGKELGRGQFGVTYLCTENSTGFQYACKSISKRKLVSRDDKEDMKREIQIMQHLSGQSNIVEFKGAFEDKQSVHVVMELCAGGELFDRIIAKGHYSERAAASICRQVVKVVNTCHFMGVIHRDLKPENFLLSSKDDKGLLKATDFGLSVFIEEGKVYRDIVGSAYYVAPEVLRRSYGKEADIWSAGVILYILLSGVPPFWAETEKGIFDVILQGHIDFESSPWPSISNSAKDLVRKMLIKDPKKRITAAQVLEHPWLKEGGNASDKPIDSAVLSRMKQFRAMNKLKKLALKVIAENLSEEEIQGLKAMFTNIDTDNSGTITYEELRAGLQRLGSKLTETEVRQLMDAADVDGNGTIDYIEFITATMHRHRLERDEHLYKAFQYFDKDGSGYITRDELEIAMKEYGMGDEATIREIISEVDTDNDGRINYEEFCTMMRSGTQQQGKLF

SEQ ID NO: 4834 - DNA, 1527 bp, Glycine max
  CDS (1)..(1527)
atggctgcgaaatctagttcgagttcgacaacaacaaacgtggtgactctgaaggcggcgtgggttctcccgcagcgcacgcagaacatccgtgaggtgtacgaggttgggcggaagctcgggcagggccaattcgggaccaccttcgagtgcacgcgccgtgcgagtggtgggaagttcgcgtgcaagtcgattccgaagcggaagctgctgtgcaaggaggactacgaggacgtgtggcgggagattcagataatgcaccacttgtcggaacacgccaacgttgtccgcatcgaagggacgtacgaggattccacggccgtgcacctggtcatggagttgtgcgagggtggagagttgtttgacaggatcgtgcagaagggacactacagcgagagacaggcggcgaggttgataaagacgattgttgagggtggtgaggcgtgtcactcgctaggggtcatgcatagggaccttaagcctgagaatttcttgtttgataccattgatgaggatgctaagcttaaggccaccgatttcggcttgtctgttttttacaagcctggtgaatccttttgtgatgttgtcgggagcccatactatgtcgcaccagaggtcttgcgcaagctctatggacctgaatcagatgtttggagtgcaggggttattctgtacatcttattaagtggggtgccaccattttgggccgaatctgaaccggggatcttccgacagattttactaggaaaacttgattttcattctgagccttggcctagcatttcagacagtgccaaggatctaattcggaaaatgcttgatcaaaatccaaaaacaaggcttacagcacatgaagtactccgccacccatggattgttgatgacaacattgcacctgataaacctcttgattctgcagttttatcacgtctgaaacaattctctgcaatgaataaattgaaaaagatggcattgcgtgttattgctgagaggctatctgaagaagaaattggtggactgaaagagttattcaagatgattgacacagacaacagtggaaccataacgtttgatgagttaaaagatggtttgaagcgagtaggatctgaacttatggagtctgaaatcaaggatcttatggatgctgcggatattgataaaagtgggacaattgattatggtgaattcattgctgccactgtccatttaaataagctggagagagaggaaaacctagtgtcggccttctcctattttgacaaagatggcagtggttacataacccttgatgagatacaacaagcttgtaaggactttggtttagatgatatccatattgacgacatgatcaaggaaattgatcaagataacgatgggcaaatagattatggggaatttgctgccatgatgagaaaaggcaatggaggaattgggaggcgaactatgagaaaaacactaaatttaagagatgctcttggattagtagacaatgggtccaatcaagttattgagggctactttaagtaa

SEQ ID NO: 4835 - protein, 508 aa, Glycine max
MAAKSSSSSTTTNVVTLKAAWVLPQRTQNIREVYEVGRKLGQGQFGTTFECTRRASGGKFACKSIPKRKLLCKEDYEDVWREIQIMHHLSEHANVVRIEGTYEDSTAVHLVMELCEGGELFDRIVQKGHYSERQAARLIKTIVEGGEACHSLGVMHRDLKPENFLFDTIDEDAKLKATDFGLSVFYKPGESFCDVVGSPYYVAPEVLRKLYGPESDVWSAGVILYILLSGVPPFWAESEPGIFRQILLGKLDFHSEPWPSISDSAKDLIRKMLDQNPKTRLTAHEVLRHPWIVDDNIAPDKPLDSAVLSRLKQFSAMNKLKKMALRVIAERLSEEEIGGLKELFKMIDTDNSGTITFDELKDGLKRVGSELMESEIKDLMDAADIDKSGTIDYGEFIAATVHLNKLEREENLVSAFSYFDKDGSGYITLDEIQQACKDFGLDDIHIDDMIKEIDQDNDGQIDYGEFAAMMRKGNGGIGRRTMRKTLNLRDALGLVDNGSNQVIEGYFK

SEQ ID NO: 4836 - DNA, 1617 bp, Glycine max
  CDS (1)..(1617)
atgggttgtcaaggtagcaaggagaaaaaatcaaagacagaatttactacttcctatggatcagcagccactggtagtggtggtggtactagttacaacactgttcagcctccgccgccgccaccaccacctactactactgctactactactaatcaggttcaaacatcagcagcacccaaaccacaatcaaaagcttctcctacagtgcagcagaaagcagacacgaggattctggggaaaccctttgacgacataaaaaaatactacagtttagggaaggaattgggaagggggcaattcgggataacgtatctgtgcacggataatgcgagcggtgggacgtacgcgtgcaagtcgatactgaagaggaagctggtgtcgaaggcggacagggaggacatgaagagggagattcagatcatgcagcatttgtcggggcaacccaacattgtcgagtttaagggcgcctacgaggacaggttttccgtccaccttgtcatggaactctgcgccggcggggagctcttcgatcgtatcatcgcccagggtcattactccgagagagccgcttcctctctctgccgctccattgtcaatgttgtccacatttgccacttcatgggtgtcatgcaccgcgatctcaagcctgaaaatttcttgctctctagcaaggacgaccacgccactctcaaggccactgattttggtctctctgtcttcattgaacaagggaaggtttaccatgatatggttggcagtgcttactatgttgctcctgaggtattgcgtcgtagttatggaaaggaaatagatatttggagtgcaggcatcatattgtatattcttctgagtggtgtaccacctttttgggctgaaactgaaaagggaatatttaatgccatattggaaggtgaaattgattttgtaagtgaaccatggccatccatatcagacagtgctaaagacctagtcaggaagatgctgacacaggatccaaacaagcggattacttcttctcaagtccttgaacacccatggatgagagaaggtggagatgcatctgataaaccaatcgatagtgcagttctatccagaatgaaacaattcagggcaatgaataagctcaagaagctagcattgaaggttatcgctgaaaatctatcagaagaggagattaaaggtctcaaagcaatgtttgccaacatggacactgacaatagtggcactatcacctatgaagaattaaagactggcttggctcgaatcggatcaaaactgtctgaggctgaagtgaagcaactcatggatgcggctgatgttgacggaaatgggtcgattgactatcttgaattcatttcggctacaatgcataggcacagacttgaacgtgatgaacatctttacaaagcattccagtattttgataaggataacagtgggtatattacaagagatgaattggagattgctatgactcaaaatggaatgggtgatgaagcaacaataaaggaaataatctctgaggtggatgcagataatgatgggagaataaactatgaggaattctgtgcaatgatgagaagtggaatgccacaccagggacagcttctttaa

SEQ ID NO: 4837 - protein, 538 aa, Glycine max
MGCQGSKEKKSKTEFTTSYGSAATGSGGGTSYNTVQPPPPPPPPTTTATTTNQVQTSAAPKPQSKASPTVQQKADTRILGKPFDDIKKYYSLGKELGRGQFGITYLCTDNASGGTYACKSILKRKLVSKADREDMKREIQIMQHLSGQPNIVEFKGAYEDRFSVHLVMELCAGGELFDRIIAQGHYSERAASSLCRSIVNVVHICHFMGVMHRDLKPENFLLSSKDDHATLKATDFGLSVFIEQGKVYHDMVGSAYYVAPEVLRRSYGKEIDIWSAGIILYILLSGVPPFWAETEKGIFNAILEGEIDFVSEPWPSISDSAKDLVRKMLTQDPNKRITSSQVLEHPWMREGGDASDKPIDSAVLSRMKQFRAMNKLKKLALKVIAENLSEEEIKGLKAMFANMDTDNSGTITYEELKTGLARIGSKLSEAEVKQLMDAADVDGNGSIDYLEFISATMHRHRLERDEHLYKAFQYFDKDNSGYITRDELEIAMTQNGMGDEATIKEIISEVDADNDGRINYEEFCAMMRSGMPHQGQLL

SEQ ID NO: 4838 - DNA, 1620 bp, Glycine max
  CDS (1)..(1620)
atggggaactgcaacgcctgcgttcgagtcgatgacgtggcagactcaaaccgcggcaaaaagaataagaaaaccaaaccgaacccctacgcggaggaagagatacgctccggcgttccgatccgtgtgctgaaggacgtgacgtcacggagcctcatcggcgacaagtacgtgataggccgggagctaggtcgtggcgagttcgggataacgtacctctgcacggaccgcgaaacgaagcaggagctcgcgtgcaagtcgatctcgaagcggaagctgagaaccgcgatcgacgtggaggacgtgcggcgagaggtggcgatcatgtcgacgctgccggagcacgctaacgtggtgaagctgaaggcgacttacgaggacgaagagaacgttcatctcgttatggagctctgcgccggcggggagctcttcgaccggatcgtcgcgcgggggcactacagcgagcgtgccgccgcgaacgtggcgaggaccattgctgaggttgttaggatgtgtcacgccaatggtgttatgcatcgagaccttaaacctgagaattttctctttgcgaataagaaggagaattctgttctcaaggctattgactttggactctccgtgtttttcaagccaggggagaggttttcggagattgtggggagtccttactacatggcgccggaggtattgaaaaggaattatgggccagaggtggatgtgtggagtgctggggtgattctttatattttgttgtgtggagttcctccgttttgggcagaggacgaacgaggggtggctttggcaatattgaggggagtgatgaacttcaagagagaaccgtggcctcagatttcagatagtgctaagagtcttgtgcgccagatgttggagcatgatcctaagaagcgcttgacggctgaacaggtgcttgagcattcctggttacaaaatgcaaagaaagcttcaaatgttccattaggagatattgtgagaacaaggcttaggcaattctctttgatgaatagattaaaaaagagagcacttcgggtaattgcagagcatttgtctgttgaagaggtagaaataatcaaagacatgtttacattgatggacacaaacaaagatggcaaagtaacatatgaggagctgaaggttgggttacggaaggttggttcacaattggctgagccagagataaagatgctgatggaagtggctgatgttgatgggaatggagtacttgactatggagagtttgtagccgtgacaattcacttgcaaagaatggagaatgatgagcatttccgcaaagcattcatgtattttgacaaagatgggagtgggtatatcgagttaggggagctagagaaagcattaacagatgagtcgggagatactgatactgctgtattgaatgacatcatgcgtgaagttgacactgacaaggatggtcgcatcagttatgaagagtttgtggccatgatgaaaactggaactgactggagaaaagcatcaaggcagtattcaagggagagattcaagagcttgagcataaatttgatgaaggatggctcacttcagcttcatgacgatattagtggtcaagctgaagtggtttga

SEQ ID NO: 4839 - protein, 539 aa, Glycine max
MGNCNACVRVDDVADSNRGKKNKKTKPNPYAEEEIRSGVPIRVLKDVTSRSLIGDKYVIGRELGRGEFGITYLCTDRETKQELACKSISKRKLRTAIDVEDVRREVAIMSTLPEHANVVKLKATYEDEENVHLVMELCAGGELFDRIVARGHYSERAAANVARTIAEVVRMCHANGVMHRDLKPENFLFANKKENSVLKAIDFGLSVFFKPGERFSEIVGSPYYMAPEVLKRNYGPEVDVWSAGVILYILLCGVPPFWAEDERGVALAILRGVMNFKREPWPQISDSAKSLVRQMLEHDPKKRLTAEQVLEHSWLQNAKKASNVPLGDIVRTRLRQFSLMNRLKKRALRVIAEHLSVEEVEIIKDMFTLMDTNKDGKVTYEELKVGLRKVGSQLAEPEIKMLMEVADVDGNGVLDYGEFVAVTIHLQRMENDEHFRKAFMYFDKDGSGYIELGELEKALTDESGDTDTAVLNDIMREVDTDKDGRISYEEFVAMMKTGTDWRKASRQYSRERFKSLSINLMKDGSLQLHDDISGQAEVV

SEQ ID NO: 4840 - DNA, 1524 bp, Glycine max; identical to SEQ ID NO: 2287
  CDS (1)..(1524)

SEQ ID NO: 4841 - protein, 507 aa, Glycine max; identical to SEQ ID NO: 2288

SEQ ID NO: 4842 - DNA, 1587 bp, Glycine max
  CDS (1)..(1587)
atgggttgttgtatgagtaaaaaagggtcagagccagaagaacacattgtttacagacatgttgctggtgctgggggtgctggtgtgtacaataatcacaagagccatgaacccccttctcatcaaccttacccattacctgagaagcatgccccttggaggcctccaccaagcccaaaacatgttcacaagcatgacacaatcactgggaagccatttgaggatgttaaacagcactacacacttgggaaggaattggggagaggccaatttggggtgacttatctctgcactgagaattcaactgggttgcagtatgcctgcaagtccatttcaaggaggaagcttgtgagcagagctgacaaggaggacatgaagagggagattcaaatcatgcagcatttgagtggacagtccaacattgtggagttcaaaggcgcttttgaggataaacaatcagttcatgtggttatggagctgtgtgctggtggtgaactttttgacaggattattgccaagggccactacagtgaaagggctgctgcttcaatatgtaggcaggttgttaaggttgttaacacctgccattttatgggtgtcattcatagggatctcaagccagagaatttcttgctatctagtaaggatgacaagggacttctcaaggccacggattttggcttgtcagtcttcattgaagaaggaaaggtgtatcgagatatagttggcagtgcttactatgttgctccagaagttctacgtcgtagctatgggaaggaagcagatatatggagtgcaggagttatattgtatatcttacttagcggtgtaccaccattttgggcagagacggaaaagggaatatttgatgccatattgcaaggtcatattgattttgaaagtagtccatggccaagcatatcaaacagtgctaaagaccttgttcgcaaaatgcttataaaggatccaaagaaacgcattactgcttctcaggttctagagcacccatggcttaaagaaggtggaaatgcttctgacaagccaatagacagtgcagtgctttccagaatgaagcaattcagagcaatgaataaactaaaaaaactagccctcaaggtcattgctgaaaatctttctgaagaagagatccaaggtttgaaggcaatgttcacaaatattgacactgacaatagtggtacaatcacctatgaggaactgagggcaggattgcaaagacttggctcaaagcttactgaaactgaagtgcgacagcttatggatgctgctgatgtagatggaaatggcacaattgactacatagaattcatcactgctacaatgcatagacacaggttagaaagagatgagcaccttcacaaggccttccaatattttgacaaagatggcagcgggtatatcacaagagatgaactagaaacagccatgaaggagtatggtatgggcaacgaggccacaatcagggaaattatatctgaagttgacacagataatgatggtagaatcaactatgatgaattttgtacaatgatgaggagtggaacccaacaacaaggcaagctattctaa

SEQ ID NO: 4843 - protein, 528 aa, Glycine max
MGCCMSKKGSEPEEHIVYRHVAGAGGAGVYNNHKSHEPPSHQPYPLPEKHAPWRPPPSPKHVHKHDTITGKPFEDVKQHYTLGKELGRGQFGVTYLCTENSTGLQYACKSISRRKLVSRADKEDMKREIQIMQHLSGQSNIVEFKGAFEDKQSVHVVMELCAGGELFDRIIAKGHYSERAAASICRQVVKVVNTCHFMGVIHRDLKPENFLLSSKDDKGLLKATDFGLSVFIEEGKVYRDIVGSAYYVAPEVLRRSYGKEADIWSAGVILYILLSGVPPFWAETEKGIFDAILQGHIDFESSPWPSISNSAKDLVRKMLIKDPKKRITASQVLEHPWLKEGGNASDKPIDSAVLSRMKQFRAMNKLKKLALKVIAENLSEEEIQGLKAMFTNIDTDNSGTITYEELRAGLQRLGSKLTETEVRQLMDAADVDGNGTIDYIEFITATMHRHRLERDEHLHKAFQYFDKDGSGYITRDELETAMKEYGMGNEATIREIISEVDTDNDGRINYDEFCTMMRSGTQQQGKLF

SEQ ID NO: 4844 - DNA, 1779 bp, Zea mays
  CDS (1)..(1779)
atgggcctctgcctgggcaagtcggcagcggtccaggagccggcggtggcggaagacaacagcgtagccgatggcgcggcggcgggccgcggcgatgggccgcccgtgaaggcgcctcggacgcccaagcagcccaagttctccttctacctgccgagcccgctccagccctccagctacaagggctcgccggccaactccagcgccgcgtccacgccggcgcgcggcgggttcaagcgcccattcccgccgccgtcgcctgccaagcacatccgtgcgctgctggcgcggcgccacggctcggtcaagcctaacgaggcgtccatccccgaaggcggcgagctggacctggggctggacaagagcttcggctactccaggcacttcgcggccaagtacgaccttggccgggaggtggggcgcggccactttggcttcacctgcgctgccaagtgcaagaagggcgagctcaagggggaggacgtcgccgtcaaggtccttcccaaggccaagatgactactgctattgccattgaagatgtcagacgagaagtcagaatattgagttctttggcaggccacattaacctagtgcaattttatgatgcttttgaggatgaagaaaatgtatatgttgttatggaattatgcaaaggaggtgaactgctggacagaattttggctagaggtggcaaatattctgagggcgatgctaaggttattattcaccaaattctaagtgttgcttcattttgccatcttcagggtgttgttcaccgggatctgaaaccagagaattttcttttcatgtcaaaggatgagaattctgccttgaaagtcatagactttggtttatctgactttgttaaaccagacggcagacttaatgacattgttggaagtgcatattatgttgctcctgaagttctccatcgatcttatggcactgaggcagatatgtggagcattggagtaattgcatatattttgctttgtggaagccgccctttctgggcaagaaccgagtcaggaatttttagagctgtcctaaaagcagatcctagttttgatgaaatcccatggcctaccctttctgctgaagcgaaagacttcgtaaggaggctgctcaataaggattaccgcaagcggatgactgctgcacaagccctctgtcatccatggatccgtggtacacaggaagttaagatttatctagacatgataatctacaggcttatgagggcttacataagttcatcttctctacggaagtctgctttgagggctcttgcaaaggcactgacgacagatcaactcttctacctaagagagcagtttacattgttagatccaaacaagagtggccatatatccttgcaaaatatgaaggcggccttgatgaaaaattcctcgggtgcaatgaacgattctagggttcttgactttgttaactcaatatgcaatatccaatatggaaatattgattttgaagagttttctgctgcggccattagtgtatatcaaatggaaggcctggagacatggcaacaacatgctcaacaagcatatgaattgtttgacagggagggcaaccgcccgattgtgatcgaagaacttgcatcggaactcggacttggcccttcggttccacttcatgttgttctccaagactggatcagacattcagacggaaacctcagtttcctcggcttcataaaactattgcatggagtttcttcacgcacattccctaaagtccaagataaccgtttgcattga

SEQ ID NO: 4845 - protein, 592 aa, Zea mays
MGLCLGKSAAVQEPAVAEDNSVADGAAAGRGDGPPVKAPRTPKQPKFSFYLPSPLQPSSYKGSPANSSAASTPARGGFKRPFPPPSPAKHIRALLARRHGSVKPNEASIPEGGELDLGLDKSFGYSRHFAAKYDLGREVGRGHFGFTCAAKCKKGELKGEDVAVKVLPKAKMTTAIAIEDVRREVRILSSLAGHINLVQFYDAFEDEENVYVVMELCKGGELLDRILARGGKYSEGDAKVIIHQILSVASFCHLQGVVHRDLKPENFLFMSKDENSALKVIDFGLSDFVKPDGRLNDIVGSAYYVAPEVLHRSYGTEADMWSIGVIAYILLCGSRPFWARTESGIFRAVLKADPSFDEIPWPTLSAEAKDFVRRLLNKDYRKRMTAAQALCHPWIRGTQEVKIYLDMIIYRLMRAYISSSSLRKSALRALAKALTTDQLFYLREQFTLLDPNKSGHISLQNMKAALMKNSSGAMNDSRVLDFVNSICNIQYGNIDFEEFSAAAISVYQMEGLETWQQHAQQAYELFDREGNRPIVIEELASELGLGPSVPLHVVLQDWIRHSDGNLSFLGFIKLLHGVSSRTFPKVQDNRLH

SEQ ID NO: 4846 - DNA, 1614 bp, Zea mays
  CDS (1)..(1614)
atgggcaactgcttcaccaggaaatacgacgagcacgagcacgagataccaatcaccacggacccgccgcggcggacgtcgatgccggtgtaccggccgccccggccccgcgatgacaaggcgcaggaggtgccgctatactcgggctcggaccgccggccgtcctaccgtccgccgcggcttccggtcttcccgtcgggcccgggatcgacgggccggcggcggccgcccaccggccagacgggcacggtcctggaccggcacacggtggacgtgcggacgctgttccacctggagcggaagctggggagcgggcagttcggcaccacgtacctgtgcacggagcgcgcgacggggaagaagtacgcgtgcaagtcggtgtccaagcgcaagctggtgcggcgcgccgacatcgcggacatgcgccgggagatcaccatcctgcagcacctcagcggccagcccaacgtggcggagttcaagggcgcgttcgaggaccgcgacgacgtgcacgtcgtcatggagctctgctccggcggcgagctcttcgaccgcatcaccgccaaggggagctactccgagcgccaggccgccgccgtgtgccgcgacgtcctcaccgtcgtcaacgtctgccacttcatgggggtcatgcaccgcgacctcaagcccgagaacttcctgctcgccagccccgccgacgacgcgccgctcaaggccatcgacttcggcctgtccgtcttcatcgaagaaggcaaagtttacaaggacgtggtggggagcgcgtactacgtggcgcccgaggtgttgcgccggaactacggcagggagatcgacgtctggagtgctggcgtgatcctatacatccttctatgcgggtcgccgcctttctgggaagaaacgcagaaaggcatatttgacgcaatattggccgacgagctcgatctggtctcctccccgtggccctccatatctgaaagcgcgaaggatctcattagaaaaatgctgaacaaggaccctcagaggcgcattacggcttcacaggccctagaacatccatggctcaaaggtggtgcacctgacaggcctatcgacagcgcggtcctgtcaagaatgaagcagttcaaggcgatgaacaagctaaagcaacttgcactgaaggtaatcgcagagaacctaacagaggacgagatcaaggggctgaagcagatgttcaacaacatggatacagacaggagcggcacgatcacggtcgaggaactcaaggacgggctggcgaagctcgggtccaagattagcgaagcggaggttcagaagcttatggaagcagttgacgtggacaagagtggcagcattgactacaccgagttcctcactgccatgatgaacaggcataaactggagaaggaggaggatttgttccttgcttttcaacacttcgacaaagacgatagcgggtacataacaagagacgaactggaacaagccatggcggagtatggggtgggtgatgaagcaagcattaaggaagtgctggacgaagttgataaagacaaggatgggagaatcgactacgaagagtttgtagaaatgatgaggaagggaagttatacctga

SEQ ID NO: 4847 - protein, 537 aa, Zea mays
MGNCFTRKYDEHEHEIPITTDPPRRTSMPVYRPPRPRDDKAQEVPLYSGSDRRPSYRPPRLPVFPSGPGSTGRRRPPTGQTGTVLDRHTVDVRTLFHLERKLGSGQFGTTYLCTERATGKKYACKSVSKRKLVRRADIADMRREITILQHLSGQPNVAEFKGAFEDRDDVHVVMELCSGGELFDRITAKGSYSERQAAAVCRDVLTVVNVCHFMGVMHRDLKPENFLLASPADDAPLKAIDFGLSVFIEEGKVYKDVVGSAYYVAPEVLRRNYGREIDVWSAGVILYILLCGSPPFWEETQKGIFDAILADELDLVSSPWPSISESAKDLIRKMLNKDPQRRITASQALEHPWLKGGAPDRPIDSAVLSRMKQFKAMNKLKQLALKVIAENLTEDEIKGLKQMFNNMDTDRSGTITVEELKDGLAKLGSKISEAEVQKLMEAVDVDKSGSIDYTEFLTAMMNRHKLEKEEDLFLAFQHFDKDDSGYITRDELEQAMAEYGVGDEASIKEVLDEVDKDKDGRIDYEEFVEMMRKGSYT

SEQ ID NO: 4848 - DNA, 1542 bp, Triticum aestivum
  CDS (1)..(1542)
atgcagccggacgcgagcggcaacgctggcggcggcgcgaatccgaggccgaagctgccgccggtggccgccgcgccggcgccgtccgggcggccggcgtccgtgctgccgcacaagacggccaacgtgcgggaccactaccgcatcgggaagaagctggggcaggggcagttcggcaccacctacctgtgcgtggccaaggaggacggcggcgagttcgcgtgcaagtccatccccaagcgcaagctgctgtgccgcgaggactacgaggacgtctggcgcgagatccagatcatgcaccacctctccgagcaccccaacgtcgtccgcatccgtggcgcctacgaggacgcgctcttcgtgcacattgtcatggagctctgcgccggcggggagctcttcgaccgcatcgtggccaaggggcactacaccgagcgtgctgcagcgcagctcatcaggacgatcgttggggtcgtagaggcatgccactcgctcggcgtcatgcaccgggatctcaagccggagaacttcctgtttgccagcactgccgaggacgccccgctcaagaccaccgattttgggctatccatgttctacaagcccggtgacaaattctctgatgttgttgggagcccctactatgttgcacctgaggtgcttcagaaatgctatggtccagaagctgatgtctggagtgctggggtgattctgtacattttgctatgtggcgtcccccctttctgggcagaaactgaagcaggaatcttcagacagatccttcgaggcaaacttgattttgagtctgagccctggcctagtatctctgacagcgctaaagatctagtccgtactatgctttgcagggatcctacaaagcgactctctgctcatgaggttctctgtcacccatggattgttgatgattctgtggcgcctgataagcctatagattctgctgttctgtcaagactgaagcatttttctgcaatgaacaagctcaagaagatggcattgagggttattgctgaaagcctatctgaggaagagattggaggtctaagggagctgttcaaaatgattgatgccgacaatagtggaactataacatttgatgagctgaaagatggcttgaaaagggtgggctcagagctaaccgaacatgaaatccaggctttaatggatgcggcggacatcgacaacagcggaacgattgattatggtgaattcatcgcagctacattgcacatgaacaaactagagagggaggagaacttggtgtcagcattctcgttttttgacaaggatggaagtggatttatcaccatcgatgagctatcacaagcatgccgtcaatttggcctggatgacgttcaccttgaggatatgatcaaagatgtcgatcagaacaatgatgggcaaatcgattacagtgagttcacagcgatgatgagaaagggcaatgcgggtgcaacagggaggcgaaccatgaggaacagcttgaatctgaatctcggtgacatcttgaatcccagcaacagctaa

SEQ ID NO: 4849 - protein, 513 aa, Triticum aestivum
MQPDASGNAGGGANPRPKLPPVAAAPAPSGRPASVLPHKTANVRDHYRIGKKLGQGQFGTTYLCVAKEDGGEFACKSIPKRKLLCREDYEDVWREIQIMHHLSEHPNVVRIRGAYEDALFVHIVMELCAGGELFDRIVAKGHYTERAAAQLIRTIVGVVEACHSLGVMHRDLKPENFLFASTAEDAPLKTTDFGLSMFYKPGDKFSDVVGSPYYVAPEVLQKCYGPEADVWSAGVILYILLCGVPPFWAETEAGIFRQILRGKLDFESEPWPSISDSAKDLVRTMLCRDPTKRLSAHEVLCHPWIVDDSVAPDKPIDSAVLSRLKHFSAMNKLKKMALRVIAESLSEEEIGGLRELFKMIDADNSGTITFDELKDGLKRVGSELTEHEIQALMDAADIDNSGTIDYGEFIAATLHMNKLEREENLVSAFSFFDKDGSGFITIDELSQACRQFGLDDVHLEDMIKDVDQNNDGQIDYSEFTAMMRKGNAGATGRRTMRNSLNLNLGDILNPSNS

SEQ ID NO: 4850 - DNA, 1671 bp, Zea mays
  CDS (1)..(1671)
atgggcaacgcatgcggcggcgcccttagatccaagtaccagcacagcttcaagcacgccgcgtcgtcgcagcgccgcgcctcctccgagtacagcgccagcgccgtggccgacgactcgcccaggaagcccacgcagccgcccgccaccacggacgcccacgcgccgccaccgccgcccgccaccgccgcagccgccatgaggcgcggcggggccggcgcgccgccggacctggggtccgtgctcggccaccccacccccaacctccgcgacctctacgcgctcggcaggaagctcgggcaggggcagttcggcaccaccttcctctgcaccgagctcgccacgggggtcgactacgcctgcaagtccatctccaagcgcaagctcatcaccagggaggacgtcgacgacgtgcgccgcgagatccagatcatgcaccacctctccggccacaccaacgtcgtcgccatcaagggcgcctacgaggaccagctctacgtccacatcgtcatggagctctgcgccgggggcgagctcttcgaccggatcatacagcgcggacactacagcgagcgcaaggccgccgcgctcacaaggatcatcgtcggggtcgtcgaggcctgccactcgctcggggtcatgcaccgggacctcaagcccgagaacttcctgctcgccaacagggacgatgacctctcgctcaaggccatcgatttcggtctctctgtcttcttcaagcctggtcaagttttcaccgatgtagttggtagcccatattatgtagctccagaagttctgttgaaaagttatggacccgcagctgatgtatggacagccggtgtcattctttacattctactgagtggtgtgcctccattttgggcagaaacacaacaaggaatatttgatgctgtattgaagggtgccattgattttgattctgatccgtggcctgtcatatctgatagtgcaaaagatcttatcagacgaatgctgaatcctcgctctgccgagcgcttaacagcacatgaagttctatgccatccatggattcgtgatcatggagtagctcctgaccgtccactggatccagctgtcttatctcgcattaagcaattctctgcaatgaataagttgaagaaaatggctttacgagtaatagctgagagcctatcagaagaggaaattgcggggttgaaggaaatgttccagatcatggacactgacaacagtggcgcaatcacttatgatgagctaaaagaaggattgagaaaatatggctccacactaaaggacactgagattcgtgatcttatggaagcagctgatattgacaacagtggaacaattgactacatagaattcattgctgcaactttgcatctcaataagctggagcgtgaggaacatctcgtggcagccttttcatatttcgacaaagatggtagtggctatatcacagtggacgaactacagcaagcttgcaaagagcataacatgccggatgcttttcttgatgatgtcatcaacgaagctgatcaggacaatgatggccgcattgactatggagaatttgttgccatgatgaccaagggcaatatgggagtcggtcgaagaacaatgagaaacagcttgaatatcagcatgagggacgcacctggtgcgttctga

SEQ ID NO: 4851 - protein, 556 aa, Zea mays
MGNACGGALRSKYQHSFKHAASSQRRASSEYSASAVADDSPRKPTQPPATTDAHAPPPPPATAAAAMRRGGAGAPPDLGSVLGHPTPNLRDLYALGRKLGQGQFGTTFLCTELATGVDYACKSISKRKLITREDVDDVRREIQIMHHLSGHTNVVAIKGAYEDQLYVHIVMELCAGGELFDRIIQRGHYSERKAAALTRIIVGVVEACHSLGVMHRDLKPENFLLANRDDDLSLKAIDFGLSVFFKPGQVFTDVVGSPYYVAPEVLLKSYGPAADVWTAGVILYILLSGVPPFWAETQQGIFDAVLKGAIDFDSDPWPVISDSAKDLIRRMLNPRSAERLTAHEVLCHPWIRDHGVAPDRPLDPAVLSRIKQFSAMNKLKKMALRVIAESLSEEEIAGLKEMFQIMDTDNSGAITYDELKEGLRKYGSTLKDTEIRDLMEAADIDNSGTIDYIEFIAATLHLNKLEREEHLVAAFSYFDKDGSGYITVDELQQACKEHNMPDAFLDDVINEADQDNDGRIDYGEFVAMMTKGNMGVGRRTMRNSLNISMRDAPGAF

SEQ ID NO: 4852 - DNA, 1653 bp, Zea mays
  CDS (1)..(1653)
atgggtggctgccactccgccatcgcggccaccaagctgaagattctgcgccgcggaggccggggtgccgctgccgtcctccccgtcaccaaccacgacggcccgtgctgctcctccgaccacggcagcaaggagaagaagaagaaaaagaagggcgccaggaagggcaggaaacgcgcctccatcctgggcgacgccggcaccttcgacccggacttctcgcggcggtaccggctcggcgcggagctcgggcgcggcgagttcggcgtcacgcggcggtgcgaggacgccgccacgggggaggccctggcgtgcaagacgatccggcggaagcggctgctcctgcgcctcgccgggcccgacgcgaccgacgtgcagcgcgaggtggagatcacgcggcgcatgtcggaggtgagcgggggcagggtcgcgtgcctgcgcgaggcgtgcgaggacgacgacggtgtgcacctcgtcatggagctctgcgagggcggcgagctcttcgaccgcatcttcgagcggaagcactactccgagcgcgccgccgccaagctcgcccgcaccatcgtcgaggtcgtgcagctgtgccacgagaacggagtgatgcacagggacctgaagccggagaacttcctgttcgtgaacaagtcggaggagtcacctctcaaggccatcgacttcggcctctccgtgttcttcaagcctggagatcggttcaccgaagtggttggcagcgggtgttacatggctccagaggttctcaagagaagctatgggccagagatagacgtgtggagcgctggtgtcatcctgcacatccttctctgcgggttccctccgttttggggaggctccgatgagaaaattgcacagtcgatactccgtggggtaattaacttacagaaggatccatggcccaaggtctcccagagcgcaaaggatcttgtcacgaggatgcttgacccagatccttgtacacggttgacggcaaagcaagtccttgagcacccttggctcaagaatgctgataaggcttcaaatgtgtcactcggagaggttgttcggtcgaggctgaagcagttgtcgtctatgaacaagcttaagaagaaggcacttggagtcgtcgccatgaatttaccgatggaagagattggcaaattcaaagagatgttccatacaatggacaaaaacaaggacggtagtttgtcacttgaagagctgaaggagggtttccggataaacgatcatcctgttccagaggaagagataaagatgttgttacaagcgggcgatatacatggaactgacacattagattgtgaggaatttgtgacagtcttgcttcacattaaaaagatgagtaatgacgagtatctacctaaagctttcgagttcttcgacaaagacgggaatggttttattgaaatgtccgagttaatggagactctaagtgatggtgaactaaagcctgatgagcaattggttaacgacattattcaagaggttgacaaggataaggatggtcgcatcagttacccagagtttgaattgatgatgaaaagtggatcggactggaggaacgcctctagacgttactcaacagagaatttcagcagcctcagtcaaaaactgtgcaaagatactttatga

SEQ ID NO: 4853 - protein, 550 aa, Zea mays
MGGCHSAIAATKLKILRRGGRGAAAVLPVTNHDGPCCSSDHGSKEKKKKKKGARKGRKRASILGDAGTFDPDFSRRYRLGAELGRGEFGVTRRCEDAATGEALACKTIRRKRLLLRLAGPDATDVQREVEITRRMSEVSGGRVACLREACEDDDGVHLVMELCEGGELFDRIFERKHYSERAAAKLARTIVEVVQLCHENGVMHRDLKPENFLFVNKSEESPLKAIDFGLSVFFKPGDRFTEVVGSGCYMAPEVLKRSYGPEIDVWSAGVILHILLCGFPPFWGGSDEKIAQSILRGVINLQKDPWPKVSQSAKDLVTRMLDPDPCTRLTAKQVLEHPWLKNADKASNVSLGEVVRSRLKQLSSMNKLKKKALGVVAMNLPMEEIGKFKEMFHTMDKNKDGSLSLEELKEGFRINDHPVPEEEIKMLLQAGDIHGTDTLDCEEFVTVLLHIKKMSNDEYLPKAFEFFDKDGNGFIEMSELMETLSDGELKPDEQLVNDIIQEVDKDKDGRISYPEFELMMKSGSDWRNASRRYSTENFSSLSQKLCKDTL

SEQ ID NO: 4854 - DNA, 1596 bp, Zea mays; identical to SEQ ID NO: 2307
  CDS (1)..(1596)

SEQ ID NO: 4855 - protein, 531 aa, Zea mays; identical to SEQ ID NO: 2308

SEQ ID NO: 4856 - DNA, 1614 bp, Zea mays
  CDS (1)..(1614)
atgggcaactgctgccgctcgccggccgccgtcgcgcgggaggacgtcagctcctcgcacttccccgcatccaacgcgaagaagaagccgcaccaagcgcggaacggcggcgccggcggcgggcagaagcggctctcggttctgggcgacgaggggtgcgaggtcgtcgggatcgacgacaagtacgtcctggacagggagctcggccgcggggagttcggggtcacgtacctgtgtatggatcgggacaccaaggagctgctcgcctgcaagtccatctccaagcgcaagctgcggacggccgtcgacgtggaggacgtgcgccgggaggtggccatcatgcgccacctgcccaagagccccagcgtcgtgtccctgcgggaggcgtgcgaggacgacggcgccgtccacctcgtcatggagctctgcgagggcggcgagctcttcgaccgcatcgtcgcgcggggccactacaccgagcgcgccgccgccagtgtcacccgcaccatcctcgaggtcgtccagctctgccaccgccacggcgtcatccaccgcgacctcaagccggagaacttcctcttcgccaataagaaggagaactcgccgctcaaggccatcgacttcggtctctccatcttcttcaagcctggtgaaaagttttcagaaattgtgggaagcccctattacatggctcctgaagtattgaagagaaactatgggccagaaatagacatatggagtgcgggagttatcctgtatattttattatgtggagtccctccattttgggctgagactgaacaaggggtggcgcaggctattcttcgtggaaatatcgattttaagcgggaaccctggcctaatgtttcggaaaatgcaaaagatttagttcgacacatgttggagcctgatccaaagctcaggctaactgcaaagcaggttcttgaacatcattggcttcaaaatgcaaagaaggctcctaatgtccctcttggagatattgtaaagtcaaggctcaaacaattttctaggatgaatagattcaaaagaagggctctaagggtcattgctgatcatttgtctgctgaggaagttgaggatataaaggatatgttcaagactatggatactgacaatgatggaattgtatcttatgaagaactgaagactggaatagcaaaacttggttctcatcttgcggaatcagaagtacagatgctcattgaagctgtggacacaaacgggaggggggcactagactacggggaatttctggccgtctcgctccacctgcagaggatggcgaacgacgagcatctccggcgggccttcctgttcttcgacaaggacggcaacggtttcatcgagcccgaggagcttcgagaggctctggtggacgacggggcggccgacagcatggaggaagtggtgaacgacatactgcaagaagtcgacaccgacaaggacggcaagatcagctacgaggagtttgtggcgatgatgaagaccggcacggactggagaaaggcgtcccggcactactcgagagggaggttcaacagcctcagcatgaagcttataaaggacgggtcggtaaagctgggtgtcgagtga

SEQ ID NO: 4857 - protein, 537 aa, Zea mays
MGNCCRSPAAVAREDVSSSHFPASNAKKKPHQARNGGAGGGQKRLSVLGDEGCEVVGIDDKYVLDRELGRGEFGVTYLCMDRDTKELLACKSISKRKLRTAVDVEDVRREVAIMRHLPKSPSVVSLREACEDDGAVHLVMELCEGGELFDRIVARGHYTERAAASVTRTILEVVQLCHRHGVIHRDLKPENFLFANKKENSPLKAIDFGLSIFFKPGEKFSEIVGSPYYMAPEVLKRNYGPEIDIWSAGVILYILLCGVPPFWAETEQGVAQAILRGNIDFKREPWPNVSENAKDLVRHMLEPDPKLRLTAKQVLEHHWLQNAKKAPNVPLGDIVKSRLKQFSRMNRFKRRALRVIADHLSAEEVEDIKDMFKTMDTDNDGIVSYEELKTGIAKLGSHLAESEVQMLIEAVDTNGRGALDYGEFLAVSLHLQRMANDEHLRRAFLFFDKDGNGFIEPEELREALVDDGAADSMEEVVNDILQEVDTDKDGKISYEEFVAMMKTGTDWRKASRHYSRGRFNSLSMKLIKDGSVKLGVE

SEQ ID NO: 4858 - DNA, 1593 bp, Zea mays
  CDS (1)..(1593)
atgggcaaccgtgcgtcgcgccaccaccgccaagccgccgagcagcaaccggcgacgccgaccctgccgaagccccagccccagatccagccgccgcctccgcctccgccgacgcagacgcagcagtaccagcaggcgccgccgcagtcgcagcagaagccgaagccggcggcggacgtgggggcggtggggcgcgtgctggggcggcccatggaggacgtgcgcgcgacctacactttcggccgcgagctcgggcggggccagttcggggtcacctacctcgtcacgcactcggagaccgggcagcgcttcgcctgcaagtccatcgccacgcggaagctcgtccaccgcgacgacattgaggacgtgcgccgggaggtgcagatcatgcaccacctcacgggccaccgcaacatcgtcgagctccggggagcatacgaggacaggcactcggtcaaccttgttatggagctctgcgagggcggggagctcttcgaccgcatcatagccaagggccactacaccgagcgagccgccgcctcgctctgccgcgagatcgtcgccgtcgtccacagctgccactccatgggggtcttccatcgggatctcaagcccgagaacttcctgttcctcaataacaaggaggactccccgctcaaggccacggacttcggtctctccgtcttcttcaagcacggggagacgtttaaggatcttgtgggaagtgcatattatgttgctcctgaggtactgaaacggaaatatggggcagaggctgacatatggagtgctggggtcattctttacatccttctgtctggtgttcctcctttttgggcagagaatgaggatggcatatttgatgctgtcttgcgcggtcacatcgatttctcttctgacccttggccttcaatatccaatggtgcaaaggatttggttaagaagatgctgcgacaagacccaaaagaacgcctgactgctgctgaaattttgaaccacccatggattagagaggatggagaggccccagataagccacttgacattactgtcattggtagaatgaaacagttcagggcaatgaacaagctcaagaaagttgcattgaaggttgtggctgagaacttatcagatgaagagattatgggcctaaaagaaatgttcagatccctggatacagataacagtgggacaattactcttgaagagctaagatctggtttaccaaaacttggtacaaaaatttctgaatcagaaattaaacaattgatggaggcggctgatgttgatggaaatggtaccattgattatgcggagtttatatcagccacaatgcatttgaatagattggagaaggaagaccacatactcaaagcttttgaatatttcgataaggatcacagcggatacataaccgtagatgagttggaagaagctttgaagaagtatgatatgggagatgacaaaactataaaagaaatcattgctgaagtagatacagatcatgatggaagaattaattaccaggagtttgttgccatgatgaggaacaacagccctgagattgttccaaatcggaggcgcatgttctaa

SEQ ID NO: 4859 - protein, 530 aa, Zea mays
MGNRASRHHRQAAEQQPATPTLPKPQPQIQPPPPPPPTQTQQYQQAPPQSQQKPKPAADVGAVGRVLGRPMEDVRATYTFGRELGRGQFGVTYLVTHSETGQRFACKSIATRKLVHRDDIEDVRREVQIMHHLTGHRNIVELRGAYEDRHSVNLVMELCEGGELFDRIIAKGHYTERAAASLCREIVAVVHSCHSMGVFHRDLKPENFLFLNNKEDSPLKATDFGLSVFFKHGETFKDLVGSAYYVAPEVLKRKYGAEADIWSAGVILYILLSGVPPFWAENEDGIFDAVLRGHIDFSSDPWPSISNGAKDLVKKMLRQDPKERLTAAEILNHPWIREDGEAPDKPLDITVIGRMKQFRAMNKLKKVALKVVAENLSDEEIMGLKEMFRSLDTDNSGTITLEELRSGLPKLGTKISESEIKQLMEAADVDGNGTIDYAEFISATMHLNRLEKEDHILKAFEYFDKDHSGYITVDELEEALKKYDMGDDKTIKEIIAEVDTDHDGRINYQEFVAMMRNNSPEIVPNRRRMF

SEQ ID NO: 4860 - DNA, 1539 bp, Zea mays
  CDS (1)..(1539)
atgggcctctgctcctcctccaccgccgcccgggccgcctccgaccccggcgccgcagccgcgggtgatgccgccgcggcaaagaaggggcgcgggatcgtcgcgtgcgggaagcggaccgacttcggatacgacaaggatttcgaggtgcgctactcgcttgggaagcttttgggccacggccagttcggctacacctttgccgccgtcgatcgcgcctccaccgagcgcgtcgccgtcaagcgcatcgacaagaataagatggtccttcctgttgctgttgaagacgtaaagagagaagttaaaatcttaaaggcattacaagggcacgaaaatgttgtacacttttacaatgcattcgaagatgacaactatgtttatatagtcatggaattatgtgagggtggcgagctacttgatcggatattagccaagaaagatagtcgttacagcgagaaagatgctgcagtagttgtccgacagatgctcaaggttgcagctgagtgccacctgcatggtttggttcatcgggacatgaaacctgagaacttcctattcaaatcaaaaaaggaggactcgccccttaaggctacagattttggtctttcagacttcataaaaccagggaggcaattccgtgacattgttggaagtgcctactacgtagcaccagaagtactcaaacgcaggtcagggccagaatccgatgtttggagtataggtgttataacctatattttgctgtgtggaagacgaccattctgggacaaaacagaagatgggatatttaaagaggtcttaaaaaagaagccagatttccgccgcaagccttggtcaaacattacttcgagtgcaaaagattttgtacaaaaattactagttaaggatccccgtgcaagactaactgctgcacaggcattatcacatgattgggtgagagaaggaggaaaggcatctgaaatacccttggatatatcagtattacataatatgcgtcagtttgtgaaatacagtcgtttcaagcaatttgctttaagggcattagcatctacattaaactcagaagagatgtctgatcttcgtgatcaattcaatgccattgatgttgacaaaaatggaacgattagtcttgaggaactgaagcaggctcttgcaaaggatgttccatggagattaaagggtccacgtgttttagagatcattgaagcgattgacagtaatacagatgggctagttgattttgaggagtttgttgctgcaacactacacgtgcatcagctggtggaacatgatactgagaagtggaaatcattgtctcaagctgcatttgataaatttgatgttgacagagatggctacatcacacctgatgaacttagaatgcatacaggaatgaagggttctattgatcccctcctggaggaggctgacattgacaaagatggcaagataagcctagatgaatttcgccggctcttgaagactgcaagcatgagcgcacgcaatgtacaaactcctaggggtgttcgcaagtcatag

SEQ ID NO: 4861 - protein, 512 aa, Zea mays
MGLCSSSTAARAASDPGAAAAGDAAAAKKGRGIVACGKRTDFGYDKDFEVRYSLGKLLGHGQFGYTFAAVDRASTERVAVKRIDKNKMVLPVAVEDVKREVKILKALQGHENVVHFYNAFEDDNYVYIVMELCEGGELLDRILAKKDSRYSEKDAAVVVRQMLKVAAECHLHGLVHRDMKPENFLFKSKKEDSPLKATDFGLSDFIKPGRQFRDIVGSAYYVAPEVLKRRSGPESDVWSIGVITYILLCGRRPFWDKTEDGIFKEVLKKKPDFRRKPWSNITSSAKDFVQKLLVKDPRARLTAAQALSHDWVREGGKASEIPLDISVLHNMRQFVKYSRFKQFALRALASTLNSEEMSDLRDQFNAIDVDKNGTISLEELKQALAKDVPWRLKGPRVLEIIEAIDSNTDGLVDFEEFVAATLHVHQLVEHDTEKWKSLSQAAFDKFDVDRDGYITPDELRMHTGMKGSIDPLLEEADIDKDGKISLDEFRRLLKTASMSARNVQTPRGVRKS

SEQ ID NO: 4862 - DNA, 1602 bp, Zea mays
  CDS (1)..(1602)
atggggcagtgttgtagcagagctcccgccccggactctggacggggaggcaccaatggttatggctattctaaccaggcaaagccagcgcaaacaccttcgagttacaaccctcctcagcagccggccgaggtgaggtacacgccgccggcgacgaaccctccggtagtcccacctgtgcctgtgcctgtgccaccgaagcccacggcggacacgattcttggcaaacagtacgaggacgtacgctctgtctactccctcggaaaggagcttggccggggccagttcggggtgacatacctctgcacagaggttgcctctggtaagcagtacgcctgcaagtccatctccaagcgcaagcttaccagcaaggcagacagggaggacattcgaagagagatccagatcatgcagcatctgtctggacagccaaacattgttgagttccggggagcatacgaggacaagagcaatgtccatgtggtgatggagctctgcgcaggtggggagctcttcgatcgcatcattgccaaggggcactacacagagcgtgcagctgctacaatctgcagagcagttgtgaatgttgtcaacatttgccacttcatgggtgtgatgcaccgtgacctgaaaccggagaacttcttgcttgcgagcaaggaggagaatgcaatgctcaaggccactgattttgggctttccgtcttcatcgaagaaggaaagatgtacagggacatcgttggaagtgcttattatgttgcgcctgaagtccttaagcggagctatggaaaagagatagatgtttggagcgcaggtgttattttgtacattcttctcagtggtgtgcctccattttgggctgaaactgaaaaggggatatttgatgctattctgcatgaggagattgactttgaaagtcaaccttggccatcaatttctgagagtgctaaagacttggttagaaagatgttgacacgagatccaaagaaaagactgacttcagctcaagttcttcaacattcatggctcagagaaggtggaggtgcatctgataagcctatcgacagtgctgttctttctagaatgaagcagttcagagcaatgaataagctgaaaaagatggccctaaaggttattgcctcaaaccttaacgaggaagagatcaaggggctaaagcaaatgttcatgaacatggacacagacaatagtggcacaatcacgtatgaagaactcaaagcaggactagccaaacttggatcaaagctgtcggaagctgaagtaaagcagttgatggaggctgctgatgttgatgggaatggatccatcgactatgttgagttcatcactgccacaatgcatagacacaagctcgaaagagacgagtatttgtttaaggcattccagtacttcgataaagataacagcggtttcatcacaagagatgagctggagtctgctttgatcgagcatgagatgggtgacacgagtacaataaaggagatcatatcagaagtggacacagacaatgatgggaggattaactatgaggagttctgcgcaatgatgagaggagggatgcagcagccaatgaggctcaagtag

SEQ ID NO: 4863 - protein, 533 aa, Zea mays
MGQCCSRAPAPDSGRGGTNGYGYSNQAKPAQTPSSYNPPQQPAEVRYTPPATNPPVVPPVPVPVPPKPTADTILGKQYEDVRSVYSLGKELGRGQFGVTYLCTEVASGKQYACKSISKRKLTSKADREDIRREIQIMQHLSGQPNIVEFRGAYEDKSNVHVVMELCAGGELFDRIIAKGHYTERAAATICRAVVNVVNICHFMGVMHRDLKPENFLLASKEENAMLKATDFGLSVFIEEGKMYRDIVGSAYYVAPEVLKRSYGKEIDVWSAGVILYILLSGVPPFWAETEKGIFDAILHEEIDFESQPWPSISESAKDLVRKMLTRDPKKRLTSAQVLQHSWLREGGGASDKPIDSAVLSRMKQFRAMNKLKKMALKVIASNLNEEEIKGLKQMFMNMDTDNSGTITYEELKAGLAKLGSKLSEAEVKQLMEAADVDGNGSIDYVEFITATMHRHKLERDEYLFKAFQYFDKDNSGFITRDELESALIEHEMGDTSTIKEIISEVDTDNDGRINYEEFCAMMRGGMQQPMRLK

SEQ ID NO: 4864 - DNA, 1614 bp, Zea mays
  CDS (1)..(1614)
atgggcaactgctgccgctcgccggccgccgtcgcgcgggaggacgtcagctcctcgcacttccccgcatccaacgcgaagaagaagccgcaccaagcgcgcaacggcggcgccggcggcgggcagaagcggctctcggttctgggcgacgaggggtgcgaggtcgtcgggatcgacgacaagtacgtcctggacagggagctcggccgcggggagttcggggtcacgtacctgtgtatggatcgggacaccaaggagctgctcgcctgcaagtccatctccaagcgcaagctgcggacggccgtcgacgtggaggacgtgcgccgggaggtggccatcatgcgccacctgcccaagagccccagcgtcgtgtccctgcgggaggcgtgcgaggacgacggcgccgtccacctcgtcatggagctctgcgagggcggcgagctcttcgaccgcatcgtcgcgcggggccactacaccgagcgcgccgccgccagtgtcacccgcaccatcctcgaggtcgtccagctctgccaccgccacggcgtcatccaccgcgacctcaagccggagaacttcctcttcgccaataagaaggagaactcgccgctcaaggccatcgacttcggtctctccatcttcttcaagcctggtgaaaagttttcagaaattgtgggaagcccctattacatggctcctgaagtattgaagagaaactatgggccagaaatagacatatggagtgcgggagttatcctgtatattttattatgtggagtccctccattttgggctgagactgaacaaggggtggcgcaggctattcttcgtggaaatatcgattttaagcgggaaccctggcctaatgtttcggaaaatgcaaaagatttagttcgacacatgttggagcctgatccaaagctcaggctaactgcaaagcaggttcttgaacatcattggcttcaaaatgcaaagaaggctcctaatgtccctcttggagatattgtaaagtcaaggctcaaacaattttctaggatgaatagattcaaaagaagggctctaagggtcattgctgatcatttgtctgctgaggaagttgaggatataaaggatatgttcaagactatggatactgacaatgatggaattgtatcttatgaagaactgaagactggaatagcaaaacttggttctcatcttgcggaatcagaagtacagatgctcattgaagctgtggacacaaacgggaggggggcactagactacggggaatttctggccgtctcgctccacctgcagaggatggcgaacgacgagcatctccggcgggccttcctgttcttcgacaaggacggcaacggtttcatcgagcccgaggagcttcgagaggctctggtggacgacggggcggccgacagcatcgaggaagtggtgaacgacatactgcaagaagtcgacaccgacaaggacggcaagatcagctacgaggagtttgtggcgatgatgaagaccggcacggactggagaaaggcgtcccggcactactcgagagggaggttcaacagcctcagcatgaagcttataaaggacgggtcggtaaagctgggtgtcgagtga

SEQ ID NO: 4865 - protein, 537 aa, Zea mays
MGNCCRSPAAVAREDVSSSHFPASNAKKKPHQARNGGAGGGQKRLSVLGDEGCEVVGIDDKYVLDRELGRGEFGVTYLCMDRDTKELLACKSISKRKLRTAVDVEDVRREVAIMRHLPKSPSVVSLREACEDDGAVHLVMELCEGGELFDRIVARGHYTERAAASVTRTILEVVQLCHRHGVIHRDLKPENFLFANKKENSPLKAIDFGLSIFFKPGEKFSEIVGSPYYMAPEVLKRNYGPEIDIWSAGVILYILLCGVPPFWAETEQGVAQAILRGNIDFKREPWPNVSENAKDLVRHMLEPDPKLRLTAKQVLEHHWLQNAKKAPNVPLGDIVKSRLKQFSRMNRFKRRALRVIADHLSAEEVEDIKDMFKTMDTDNDGIVSYEELKTGIAKLGSHLAESEVQMLIEAVDTNGRGALDYGEFLAVSLHLQRMANDEHLRRAFLFFDKDGNGFIEPEELREALVDDGAADSIEEVVNDILQEVDTDKDGKISYEEFVAMMKTGTDWRKASRHYSRGRFNSLSMKLIKDGSVKLGVE

SEQ ID NO: 4866 - DNA, 1590 bp, Zea mays
  CDS (1)..(1590)
atgggcaactgctgcgccgcgccgtcgacggagggaagcggcaagacccgccccaagaagcagaaggagaacccctacaacgtcgcgtacaaccgcggggcggcgccggcgcgcccgggcctggtggtgctgcgggacccgacggggcgggacctcggcgcggagtacgagctgggcggcgagctggggcgcggcgagttcggcgtcacgtacctgtgcacggagcccgccacgggggcgcgctacgcgtgcaagtccatatccaagcgcaagctgcgcacgcccgtggacgtggaggacgtgcgccgggaggtggacatcatgcgccacatgccgccgcaccccaacatcgtcagcctccgcgccgcctacgaggaccgagacgccgtgcacctcgtcatggagctctgcgagggaggggagctcttcgacaggatcgtcgcccgcggacactacaccgagcgcgccgccgccgccgtcatgcgaaccatcgttgaggtcgtccagaagtgccacaggcatggcgtcatgcaccgggatcttaaaccagagaactttttatatgcaagcaaggacagttcccctctaaaagcaattgattttggcctgtctgtgttcttcaggcctggtgagcgatttacggaaattgtaggcagtccatactacatggccccagaggttctgaagcgaaactatggccctgaagttgatgtctggagtgctggagtgatactttacatacttctttgtggtgtaccaccattttgggcagaaaccgaacagggagtagcgcaggcaatcatacgatctgtggtagatttcaaaagagaaccatggcccagagtatctgagcctgctaaagatcttgtcaggcgcatgcttgacccaaatccattgacacggtttactgcagcacaagtacttgagcatccatggctacatgactctaaaaacacgccagacgtttctcttggcgatactgtccgagcaagactgcagcaatttgctgcgatgaacaagttaaagaagaaagcactaagggtgattgccgagcatctgtctgcggaggaagtagctgacataaagcaaatgttcgataagatggacgtgaacaagaacggcaagctaacattcgaggaattcaaggccggcctccgtaagctgggaaaccaaatgcatgattcagaccttcagatactgatggatgctgccgacgtcgacagaaacgggaccttagattacgaggaattcgtcacggtgtctgtccacgtgaggaagataggcaacgacgaacacatccagaaggccttcgcatacttcgaccggaataagagtgggtacatagagatcgaggagcttagagaggcactggctgatgaactggatggcagtgatgaagacatcatcggtggcatcatccgggacgtggacacagataaggacgggaagataggctacgacgagttcgcggcgatgatgaaggccggcactgactggaggaaggcctcccggcagtactcgcggcagcggttcagcaacctgagcctgaagctccagaaggacgggtccctcggcgccgacacacggtag

SEQ ID NO: 4867 - protein, 529 aa, Zea mays
MGNCCAAPSTEGSGKTRPKKQKENPYNVAYNRGAAPARPGLVVLRDPTGRDLGAEYELGGELGRGEFGVTYLCTEPATGARYACKSISKRKLRTPVDVEDVRREVDIMRHMPPHPNIVSLRAAYEDRDAVHLVMELCEGGELFDRIVARGHYTERAAAAVMRTIVEVVQKCHRHGVMHRDLKPENFLYASKDSSPLKAIDFGLSVFFRPGERFTEIVGSPYYMAPEVLKRNYGPEVDVWSAGVILYILLCGVPPFWAETEQGVAQAIIRSVVDFKREPWPRVSEPAKDLVRRMLDPNPLTRFTAAQVLEHPWLHDSKNTPDVSLGDTVRARLQQFAAMNKLKKKALRVIAEHLSAEEVADIKQMFDKMDVNKNGKLTFEEFKAGLRKLGNQMHDSDLQILMDAADVDRNGTLDYEEFVTVSVHVRKIGNDEHIQKAFAYFDRNKSGYIEIEELREALADELDGSDEDIIGGIIRDVDTDKDGKIGYDEFAAMMKAGTDWRKASRQYSRQRFSNLSLKLQKDGSLGADTR

SEQ ID NO: 4868 - DNA, 1824 bp, Zea mays
  CDS (1)..(1824)
atggggcagtgctacgggaaggcaggcggcgcgtcgtcgcggcgggcggaccacgacgacgcggtcgcgccgccgtccccgctgccggccaacggcgcgccgacgccgccgcagcagcccgccacgcccgggcgccgcaagtccggatcggccacgccggtgcaccaccaggcggcgacgaccgcctggcccagcccgtaccccgccggcggggccagcccgctccccgcgggcgtgtcgccgtcgcccgccaggtccacgccccgcaggttcttcaagcggcccttcccgccgccctcgcccgccaagcacatcaaggccacgctcgccaagcgcctcggcgggggcaagcccaaggagggcaccataccggaggagggcggcgccggcgtcgccgccgactccgccgaggccgagcgcccgttggacaagacgttcggcttcgccaacaacttcggggccaagtacgacctcgggaaggaggtcgggaggggacactttggccacacctgctccgccctggtcaagaagggcgagtacaagggccatgccgtagccgtcaagatcatctccaaagctaagatgacgacagccatttccattgaagatgttcgtagggaagtcaagattttgaaagctctatcagggcacaataatctcgtcaaattctatgatgcatgtgaggacgccctcaatgtctacattgtcatggaattatgtgaaggtggagagttgctagatagaattttggctagaggcgggagatatacagaagaagatgccaaagctatcgttgtacagattttgagtgtagtgtccttctgtcatcttcagggagtagttcatcgtgatttgaagccagagaattttcttttcgcaacaagagatgaaagtgctcctatgaagttaattgactttggtctgtctgattttattagaccagatgaaaggctcaatgatattgttgggagcgcatattatgtcgctccagaggttctacacagatcgtacagtatggaagcagacatttggagtataggtgtcataacatacattctgctctgtggcagtcggccattttgggcaaggacagaatctgggatctttcggtccgtattaagggctgatcccaactttgacgattcaccatggccttcagtatcggctgaagctaaggattttgtgaagagatttctgaacaaggattaccgtaaaagaatgactgctgtccaagcactgactcacccttggttacgagatgaacaaaggcaaattccattggacatactcgttttcagattagttaagcaatatcttcgtgctactcctcttaaacgtttggcattaaaggcactatctaaggctttaagggaggatgaactgttgtatcttagattgcagtttaagctgctcgagcccagagacgggctcgtatcgctcgacaactttcggacggctctgacgagatacgtaactgatgctatgagagaatcaagggttcttgagtttttgcacgcgttggacccgcttgcgtacagaaagatggacttggaagaattctgtgcggcagcaatcagcccgtaccagctggaggctttggaaagctgggaagaaatcgctggaacggcttttcagcacttcgaacaggagggcaaccgagttatatctgtggaggagttggcgcaggaactaagcctcgccccgactcactactccatcgtgcaagactggatcagaaagtccgacggcaagcttaactttcttgggttcaccaaatttttgcacggtgtcacgatacggggctcaaacacgagacgacactaa

SEQ ID NO: 4869 - protein, 607 aa, Zea mays
MGQCYGKAGGASSRRADHDDAVAPPSPLPANGAPTPPQQPATPGRRKSGSATPVHHQAATTAWPSPYPAGGASPLPAGVSPSPARSTPRRFFKRPFPPPSPAKHIKATLAKRLGGGKPKEGTIPEEGGAGVAADSAEAERPLDKTFGFANNFGAKYDLGKEVGRGHFGHTCSALVKKGEYKGHAVAVKIISKAKMTTAISIEDVRREVKILKALSGHNNLVKFYDACEDALNVYIVMELCEGGELLDRILARGGRYTEEDAKAIVVQILSVVSFCHLQGVVHRDLKPENFLFATRDESAPMKLIDFGLSDFIRPDERLNDIVGSAYYVAPEVLHRSYSMEADIWSIGVITYILLCGSRPFWARTESGIFRSVLRADPNFDDSPWPSVSAEAKDFVKRFLNKDYRKRMTAVQALTHPWLRDEQRQIPLDILVFRLVKQYLRATPLKRLALKALSKALREDELLYLRLQFKLLEPRDGLVSLDNFRTALTRYVTDAMRESRVLEFLHALDPLAYRKMDLEEFCAAAISPYQLEALESWEEIAGTAFQHFEQEGNRVISVEELAQELSLAPTHYSIVQDWIRKSDGKLNFLGFTKFLHGVTIRGSNTRRH

SEQ ID NO: 4870 - DNA, 1575 bp, Zea mays
  CDS (1)..(1575)
atgggcaaccgtgcgtcgcgccaccaccgccacgccaccgagcagcagccagagacgccgacccttcccaagccccagatccagccgccgccgccgccgacgcagacgcagcagtaccagcaggccccgccgccgccgaagccgaagccggcggcggacgcgagggcggtggggcgcgtgctggggcggcccatggaggacgtcaaggcgacctacaccttcggccgcgagctcgggcggggccagttcggggtcacctacctcgtcacgcaccgggagactgggcagcgcttcgcctgcaagtccatagccacgcggaagctcgtccaccgcgacgacatcgaggacgtgcgccgggaggtgcagatcatgcaccacctcaccggccaccggaacatcgtcgagctccggggagcctacgaggacaggcgctcggtcaacctcgctatggagctctgcgagggcggggagctcttcgaccgcatcattgccaggggccactacaccgagcgcgctgccgccgcgctttgccgggagatcgtcgccgtcgtccacagctgccactccatgggggtcttccaccgggacctcaagcccgagaacttcctgttcctcaataacaaggaggactccccgctcaaggccacggacttcggcctctccgtcttcttcaagcccggggacacgtttaaggatcttgtgggaagtgcatattatgttgctcccgaggtattgaagcggcactatggggcagaggctgacatatggagtgctggggttattctttacatccttttatctggtgttcctcctttttgggcagagaatgaggatggcatatttgatgctgtcttgcacagtcacattgatttctcttctgatccttggccttcaatatctaatggtgcaaaagatttggttaagaagatgctgcgacaagacccaaaagaacgcctgactgctgctgaaattttgaaccacccatggattagagaggatggagaggccccagataagccacttgacattacggtcatcagtagaatgaaacagttcagggcaatgaacaagctcaagaaagttgcattgaaggttgtggcagagaacttatcagatgaagagattatgggcctaaaagaaatgttcagatccctggatactgataacagtgggacaattactcttgaagagctaagatctggtttaccaaaacttggtactaaaatttctgaatcagaaatcaaacagttgatggaggcggctgatgttgatggaaatggtaccattgattacgcggagttcatatcagccacaatgcatttgaatagattggagaaggaagaccgtatactcaaagcttttgaatattttgataaggaccatagcgggtacataacagtagatgagttggaagaagctctgaagaagtatgatatgggagatgataaaacaataaaagagatcattgctgaagtagatacagatcatgatggaagaattaattaccaggagtttgttgccatgatgaggaacaatacccctgagattgttccaaaccggagacgcatgttctaa

SEQ ID NO: 4871 - protein, 524 aa, Zea mays
MGNRASRHHRHATEQQPETPTLPKPQIQPPPPPTQTQQYQQAPPPPKPKPAADARAVGRVLGRPMEDVKATYTFGRELGRGQFGVTYLVTHRETGQRFACKSIATRKLVHRDDIEDVRREVQIMHHLTGHRNIVELRGAYEDRRSVNLAMELCEGGELFDRIIARGHYTERAAAALCREIVAVVHSCHSMGVFHRDLKPENFLFLNNKEDSPLKATDFGLSVFFKPGDTFKDLVGSAYYVAPEVLKRHYGAEADIWSAGVILYILLSGVPPFWAENEDGIFDAVLHSHIDFSSDPWPSISNGAKDLVKKMLRQDPKERLTAAEILNHPWIREDGEAPDKPLDITVISRMKQFRAMNKLKKVALKVVAENLSDEEIMGLKEMFRSLDTDNSGTITLEELRSGLPKLGTKISESEIKQLMEAADVDGNGTIDYAEFISATMHLNRLEKEDRILKAFEYFDKDHSGYITVDELEEALKKYDMGDDKTIKEIIAEVDTDHDGRINYQEFVAMMRNNTPEIVPNRRRMF

SEQ ID NO: 4872 - DNA, 1620 bp, Zea mays
  CDS (1)..(1620)
atgggcaactgctgcgtgacgccgaaagcagccgacgacgccggcggcggcaagaagcccaaggagccgaagcagaagaagggtaagaagccgaaccccttctcgatcgagtacaaccgctcggggcaggcgagcgcgccaaagctggtggtgctgcgggatcccacggggcgggacatcgcggcgcggtacgagctcggcgcggagctcgggcgcggcgagttcggggttacctacctctgcacagaccgcgcctcaggggaggcgctggcctgcaagtccatctccaagaagaagctccgcaccgccgtcgacctcgaggacgtgcgccgggaggtcgagatcatgcgccacctccccaagcaccccaacgtcgtcacgctcagggacacgtacgaggacgacaatgccgtgcacctcgtcatggagctctgcgagggcggtgagctcttcgaccgcatcgtggcgcggggacactacactgagcgtgctgccgccttggtcttacgcactatcgttgaggtcgtgcagatgtgccataagcatggagtgatgcacagggatctcaaaccagaaaatttcttgtttgcaaacaagaaagaatcagcggcacttaaggccattgattttggcctgtctgtatttttcacaccaggcgaacggttttctgagattgttggaagtccttattacatggctccagaggtgctaaagagaaactatggcccagaggttgatgtttggagtgcaggagtgattctgtacattcttctttgtggtgtccccccattctgggcagaaacggaacagggtgttgctcaggcaatcattcgatctgtcattgatttcaaaagagatccatggccaagggtgtctgataacgccaaagaccttgtcagaggaatgctgaatccggacccaaaacgacgattgacagctcaccaagtgcttggtcacccatggttgcagaacattaagaaggctccaaatgtcaatttgggtgaaactgttaaggccagactccaacaattctctgtgatgaacaagttcaagaagcatgcacttagggttatagctgagcatctttcggtagaagaggctgctgacataaaggatatgtttgagaagatggatcttaacaaggatcaaatgcttagtttcgaggagctgaagcttggtctgcataagtttggtcaccaaatgcctgatgcagatgttcaaacactaatggaagcggcggatgctgatggaaatgggtccttgaattatggagaatttgttacattatttgttcatctaagaaagattggaaatgatgagcatctgcataaggcatttgcatacttcgaccggaaccagagtggttatattgaaattgatgaactccgtgagtcattagctgatgaccttggacaaaaccgtgaagagattatcaatgccatcatccgtgatgtagacaccgataaggatggcaagataagctacgatgagtttgcgacgatgatgaaggccggaacagactggaggaaagcatccagacagtactcgagagagcggttcacgagcctgagccttaagctgcaaaaggatggatcgctgcagatgacgagtacacggtag

SEQ ID NO: 4873 - protein, 539 aa, Zea mays
MGNCCVTPKAADDAGGGKKPKEPKQKKGKKPNPFSIEYNRSGQASAPKLVVLRDPTGRDIAARYELGAELGRGEFGVTYLCTDRASGEALACKSISKKKLRTAVDLEDVRREVEIMRHLPKHPNVVTLRDTYEDDNAVHLVMELCEGGELFDRIVARGHYTERAAALVLRTIVEVVQMCHKHGVMHRDLKPENFLFANKKESAALKAIDFGLSVFFTPGERFSEIVGSPYYMAPEVLKRNYGPEVDVWSAGVILYILLCGVPPFWAETEQGVAQAIIRSVIDFKRDPWPRVSDNAKDLVRGMLNPDPKRRLTAHQVLGHPWLQNIKKAPNVNLGETVKARLQQFSVMNKFKKHALRVIAEHLSVEEAADIKDMFEKMDLNKDQMLSFEELKLGLHKFGHQMPDADVQTLMEAADADGNGSLNYGEFVTLFVHLRKIGNDEHLHKAFAYFDRNQSGYIEIDELRESLADDLGQNREEIINAIIRDVDTDKDGKISYDEFATMMKAGTDWRKASRQYSRERFTSLSLKLQKDGSLQMTSTR

SEQ ID NO: 4874 - DNA, 1674 bp, Zea mays
  CDS (1)..(1674)
atgggcaacgcatgcggcggcgcccttagatccaagcaccagcacagcttcaagcacgccgcgtcgtcgcagcgccaccacgcctcctccgagtacagcgccagcgccgcggccgacgactcgcccaggaagccgccacagccgcccgccaccacggacgcccacgcgccgccgcccgccaccgccaccgccaccgccgccatgaggcgcggcggggccggcgcgccgccggacctggggtccgtgctcggccaccccacccccaacctccgcgacctctacgcgctcggcaggaagctcgggcaggggcagttcggcaccaccttcctctgcaccgagctcgccacgggggtcgactacgcctgcaagtccatctccaagcgcaagctcatcaccagggaggacgtcgacgacgtgcgccgcgagatccagatcatgcaccacctctccggccacaccaacgtcgtcgccatcaagggcgcctacgaggaccagctctacgtccacatcgtcatggagctctgcgccgggggcgagctcttcgaccggatcatacagcgcggccactacagcgagcgcaaggccgccgagctcaccaggatcatcgtcggcgtcgtcgaggcctgccactccctcggtgtcatgcaccgggacctcaagcccgagaacttcctgctcgtcaacaaggacgacgacctctcgctcaaggccatcgatttcggactctctgtcttcttcaagcctggtcaagttttcaccgatgttgttggtagcccatattatgtagctccagaagttttgttgaaaaattatggaccagcagctgatgtatggacagctggtgtcattctttacattctactaagtggcgtgcctccgttttgggcagaaacacaacaaggaatatttgatgctgtattgaaaggtgtcattgattttgattctgatccgtggcctgtcatatctgatagtgcaaaagatcttataagacggatgctgaatcctcgctctgccgagcgcttaacagcacatgaagttctatgccatccatggattcgtgaccatggagtagctcctgaccgtccactggatccagctgtcttatctcgcattaagcaattctctgcaatgaataagttgaagaaaatggctttgcgagtaatagctgagagcctatcagaagaggaaattgcggggttgaaggaaatgttccagaccatggacactgacaacagtggcgcaattacctacgatgaactaaaagaaggattgagaaaatatggttccacactgaaggacactgagattcgtgatcttatggatgcagctgatatcgacaacaatggaacaattgactacattgaattcattgctgcaactttgcatctcaataagctggagcgcgaagaacatctcgtggcagccttttcatatttcgacaaagatggtagtggctatatcacagtggacgaactacagcaagcttgcaaagagcataacatgccggatgcttttcttgatgatgtcatcaacgaagctgatcaggataacgatggccgcattgactatggagagtttgttgccatgatgaccaagggcaatatgggagttggtcgacggacaatgagaaacagcttgaatatcagcatgagggacgcacctggtgcattctga

SEQ ID NO: 4875 - protein, 557 aa, Zea mays
MGNACGGALRSKHQHSFKHAASSQRHHASSEYSASAAADDSPRKPPQPPATTDAHAPPPATATATAAMRRGGAGAPPDLGSVLGHPTPNLRDLYALGRKLGQGQFGTTFLCTELATGVDYACKSISKRKLITREDVDDVRREIQIMHHLSGHTNVVAIKGAYEDQLYVHIVMELCAGGELFDRIIQRGHYSERKAAELTRIIVGVVEACHSLGVMHRDLKPENFLLVNKDDDLSLKAIDFGLSVFFKPGQVFTDVVGSPYYVAPEVLLKNYGPAADVWTAGVILYILLSGVPPFWAETQQGIFDAVLKGVIDFDSDPWPVISDSAKDLIRRMLNPRSAERLTAHEVLCHPWIRDHGVAPDRPLDPAVLSRIKQFSAMNKLKKMALRVIAESLSEEEIAGLKEMFQTMDTDNSGAITYDELKEGLRKYGSTLKDTEIRDLMDAADIDNNGTIDYIEFIAATLHLNKLEREEHLVAAFSYFDKDGSGYITVDELQQACKEHNMPDAFLDDVINEADQDNDGRIDYGEFVAMMTKGNMGVGRRTMRNSLNISMRDAPGAF

SEQ ID NO: 4876 - DNA, 1608 bp, Zea mays
  CDS (1)..(1608)
atgggcaactgctgcgccacgccgtcgacgacggaggagagcggcaagagccgccagaagaaaccgaagcagaagacgaacccctacaacgtggcgtacaaccgcggggcggcgccggcgccggcgcgcccgggcctggtggtgcttcgggacccgacggggcgggacctcggcgcgcagtacgagctgggcggcgagctgggccgcggcgagttcggcgtcacgtacctgtgcacggagtccgccacgggggcgcgctacgcgtgcaagtccatctccaagcgcaagctgcgcacgcccgtggacgtggaggacgtgcgccgggaggtggacatcatgcgccacatgccgccgcaccccaacatcgtcagcctccgcgccgcctacgaggacgaggacgccgtgcacctcgtcatggagctctgcgagggaggcgagctcttcgacaggatcgtcgcccggggccactacaccgagcgcgccgccgccgccgtcacgcgcaccatcgtcgaggtcgtccagatgtgccacaggcatggcgtcatgcaccgggatcttaaaccagagaactttttatatgcaaacaagaaggagagttcccctctgaaagcaatcgattttgggctgtcagtgttcttcaggcctggtgagcgatttactgaaatcgtaggcagtccatactacatggctccagaggttctaaagcgaaactatggccctgaagttgatgtttggagtgctggagtgatactttacatacttctctgtggtgtaccaccattttgggcagaaactgaacagggagtagcacaggcaattatacgatctgtggtagatttcaaaagagaaccatggcccagagtatctgagcctgctaaagatcttgtcaggcggatgctggacccaaatccattgacacggtttactgcagcacaagtacttgagcatccatggttacatgactctaaaaagatgccagacatttctcttggtgatactgtccgagcaagactgcaacaatttgctgcgatgaacaagttaaagaagaaagcattaagggtgattgccgagcatctgtcagtggaggaagtagctgacataaagcaaatgtttgacaagatggacgtgagcaagaatggcaagctaacattcgaggaattcaaggcgggccttcgtaaactggggaaccaaatgcctgattcagatcttcagataatgatggatgccgctgacatcgataaaaacgggaccctagattacgaggaattcgtcaccgtgtctgttcatgtgagaaaaataggcaacgatgagcacatccaaaaggccttcacatacttcgaccggaacaagagcgggtacatagagatcgaagagcttagagaggcactggctgatgaactggagggaaccgatgaagacatcatcaatggcatcatccgagacgtggacacggataaggacgggaaaataagctacgacgagttcgcggcgatgatgaaggccggcactgactggaggaaggcatcccggcagtactcgaggcagcggttcagcaacctgagcctgaagcttcagaaggacgggtccctcggcgccgagacacggtag

SEQ ID NO: 4877 - protein, 535 aa, Zea mays
MGNCCATPSTTEESGKSRQKKPKQKTNPYNVAYNRGAAPAPARPGLVVLRDPTGRDLGAQYELGGELGRGEFGVTYLCTESATGARYACKSISKRKLRTPVDVEDVRREVDIMRHMPPHPNIVSLRAAYEDEDAVHLVMELCEGGELFDRIVARGHYTERAAAAVTRTIVEVVQMCHRHGVMHRDLKPENFLYANKKESSPLKAIDFGLSVFFRPGERFTEIVGSPYYMAPEVLKRNYGPEVDVWSAGVILYILLCGVPPFWAETEQGVAQAIIRSVVDFKREPWPRVSEPAKDLVRRMLDPNPLTRFTAAQVLEHPWLHDSKKMPDISLGDTVRARLQQFAAMNKLKKKALRVIAEHLSVEEVADIKQMFDKMDVSKNGKLTFEEFKAGLRKLGNQMPDSDLQIMMDAADIDKNGTLDYEEFVTVSVHVRKIGNDEHIQKAFTYFDRNKSGYIEIEELREALADELEGTDEDIINGIIRDVDTDKDGKISYDEFAAMMKAGTDWRKASRQYSRQRFSNLSLKLQKDGSLGAETR

SEQ ID NO: 4878 - DNA, 1635 bp, Zea mays
  CDS (1)..(1635)
atggggaaccaatgcccaaacgggacccttgggagtgactactacaaccgcccgacgtccaggttcgctgatggttgtcttgaggacgatcgctactctgacttgaagaagtttgacaagccatggcctgaggtgaactcgtttaagcccactgctgttggtattttgaagaggggattggatccaacgtcaatcactgtccttgaaaggaagacggccgacataagggaacattatatcattggtcggaggcttggtcaaggccagtttggcacaacattcctctgcaccgagatcagtacagggtgtgagtatgcatgcaagacaatcccaaagcgaaagctcatcaccaaggaggatgttgaggatgtgcgccgtgagatccagataatgcaccatttgtcaggccacaagaatgttgtttccatcaaggatgtatacgaggatgggcaggcggtgtatattgtgatggagctctgcgccggtggggagctctttgatcgaattcaggagaaagggcattatagcgaacagaaggctgcagagctcataagaatcattattagccttgtggctatgtaccattcacttggggttatgcaccgtgatctaaagccagaaaacttcctcctttgggataaagaagatgacctgtcaataaaagcaatcgattttggtctatctgtgttcttcaaaccaggtcaggttttcactgagctggttggaagtccatactacgttgctcctgaggtactacacaaacggtatggaccagaagcggatgtgtggtcagctggagtgatactgtatgttttgcttagtggggtgccacctttttgggcagagacgcaacaaggtatatttgatgctgtcttgaaggggcacattgattttgactcggacccatggcctaagatatctgaaagcgcaaagaatctcataaggaagatgctctgcccttgtccttcagagcgtctgaaagcccatgaagtactacgccatccttggatctgtgaaaatggagtggctactgatcaggctcttgatcccggtgttctctctcgtctcaaacaattctccacaatgaacaaattaaagaagttggctctgagagtgatagctgaacgactttctgaggaggagattgctgggttaagacaaatgttcaaggcagttgacgttcaaaatagaggcgtaattacttttggtgaacttagacaaggtttaaaaagatatggtagcgaattggagaatagagaaattagtgatataatggaagtggctgataatgacaataatgtgaccatcaattatgaagaatttatcgctgcaactgtgcctcttaacaaaatagaacgtgaggagcacctgatggcagcttttacctacttcgacaaagatggaagtggttatatcacagttgacaagctgcaacgagcttgtggagaacatgacatggatgacactttccttgaagagataattttagaagttgaccaaaacaatgacggtcagattgactacgccaaattcgtagccatgatgcaaggcaacaaagttggacttgggtggcaacaaatggaaaccactctgaatgtaaccttgagagatgcacctcaagtacactgtcactga

SEQ ID NO: 4879 - protein, 544 aa, Zea mays
MGNQCPNGTLGSDYYNRPTSRFADGCLEDDRYSDLKKFDKPWPEVNSFKPTAVGILKRGLDPTSITVLERKTADIREHYIIGRRLGQGQFGTTFLCTEISTGCEYACKTIPKRKLITKEDVEDVRREIQIMHHLSGHKNVVSIKDVYEDGQAVYIVMELCAGGELFDRIQEKGHYSEQKAAELIRIIISLVAMYHSLGVMHRDLKPENFLLWDKEDDLSIKAIDFGLSVFFKPGQVFTELVGSPYYVAPEVLHKRYGPEADVWSAGVILYVLLSGVPPFWAETQQGIFDAVLKGHIDFDSDPWPKISESAKNLIRKMLCPCPSERLKAHEVLRHPWICENGVATDQALDPGVLSRLKQFSTMNKLKKLALRVIAERLSEEEIAGLRQMFKAVDVQNRGVITFGELRQGLKRYGSELENREISDIMEVADNDNNVTINYEEFIAATVPLNKIEREEHLMAAFTYFDKDGSGYITVDKLQRACGEHDMDDTFLEEIILEVDQNNDGQIDYAKFVAMMQGNKVGLGWQQMETTLNVTLRDAPQVHCH

SEQ ID NO: 4880 - DNA, 1662 bp, Zea mays
  CDS (1)..(1662)
atgggcaacgcatgcggcggcgcccttagatccaagtaccagcacagcttcaagcacgccgcgtcgtcgcagcgccacgcctcctccgagtacagcgccagcgccgtggccgacgactcgcccaggaagcccacacagccgcccgccaccacggacgcccacgcgccgccaccgccgcccgccaccgccatgaggcgcggcggggccggcgcgccgccggacctggggtccgtgctcggccacccaacccccaacctccgcgacctctacgcgctcggcaggaagctcgggcaggggcagttcggcaccacctacctctgcaccgagctcgccacggggatcgactacgcctgcaagtccatctccaagcgcaagctcatcaccaaggaggacgtcgacgacgtgcgccgcgagatccagatcatgcaccacctctccggccacaagaacgtcgtcgctatcaagggcgcgtacgaggaccaggtctacgtccacatcgtcatggagctctgtgccgggggcgagctcttcgaccggatcatacagcgcggacactacagcgagcgcaaggccgccgcgctcacaaggatcatcgtcggggtcgtcgaggcctgccactcgctcggggtcatgcaccgggacctcaagcccgagaacttcctgctcgccaacagggacgatgacctctcgctcaaggccatcgatttcggactctctgtcttcttcaagcctggtcaagttttcaccgatgtagttggtagcccatattatgtagctccagaagttctgttgaaaagttatggaccagcagctgatgtatggacagccggtgtcattctttacattctactgagtggtgtgcctccattttgggcagaaacacaacaaggaatatttgatgctgtattgaagggtgccattgattttgattctgatccgtggcctgtcatatctgatagtgcaaaagatcttatcagacgaatgctgaatcctcgctctgccgagcgcttaacagcacatgaagttctatgccatccatggattcgtgatcatggagtagctcctgaccgtccactggatccagctgtcttatctcgcattaagcaattctctgcaatgaataagttgaagaaaatggctttacgagtaatagctgagagcctatcagaagaggaaattgcggggttgaaggaaatgttccagaccatggacactgacaacagtggcgcaatcacttatgatgagctaaaagaaggattgagaaaatatggctccacactaaaggacactgagattcgtgatcttatggaagcagctgatattgacaacagtggaacaattgactacatagaattcattgctgcaactttgcatctcaataagctggagcgtgaggaacatctcgtggcagccttttcatatttcgacaaagatggtagtggctatatcacagtggacgaactacagcaagcttgcaaagagcataacatgccggatgcttttcttgatgatgtcatcaacgaagctgatcaggacaatgatggccgcattgactatggagaatttgttgccatgatgaccaagggcaatatgggagtcggtcgaagaacaatgagaaacagcttgaatatcagcatgagggacgcacctggtgcgttctga

SEQ ID NO: 4881 - protein, 553 aa, Zea mays
MGNACGGALRSKYQHSFKHAASSQRHASSEYSASAVADDSPRKPTQPPATTDAHAPPPPPATAMRRGGAGAPPDLGSVLGHPTPNLRDLYALGRKLGQGQFGTTYLCTELATGIDYACKSISKRKLITKEDVDDVRREIQIMHHLSGHKNVVAIKGAYEDQVYVHIVMELCAGGELFDRIIQRGHYSERKAAALTRIIVGVVEACHSLGVMHRDLKPENFLLANRDDDLSLKAIDFGLSVFFKPGQVFTDVVGSPYYVAPEVLLKSYGPAADVWTAGVILYILLSGVPPFWAETQQGIFDAVLKGAIDFDSDPWPVISDSAKDLIRRMLNPRSAERLTAHEVLCHPWIRDHGVAPDRPLDPAVLSRIKQFSAMNKLKKMALRVIAESLSEEEIAGLKEMFQTMDTDNSGAITYDELKEGLRKYGSTLKDTEIRDLMEAADIDNSGTIDYIEFIAATLHLNKLEREEHLVAAFSYFDKDGSGYITVDELQQACKEHNMPDAFLDDVINEADQDNDGRIDYGEFVAMMTKGNMGVGRRTMRNSLNISMRDAPGAF

SEQ ID NO: 4882 - DNA, 1596 bp, Zea mays; identical to SEQ ID NO: 2351
  CDS (1)..(1596)

SEQ ID NO: 4883 - protein, 531 aa, Zea mays; identical to SEQ ID NO: 2352

SEQ ID NO: 4884 - DNA, 1635 bp, Zea mays
  CDS (1)..(1635)
atggggaaccaatgcccaaacgggacccttgggagtgactactacaaccgcccgacgtccaggttcgctgatggttgtcttgaggacgatcgctactctgacttgaagaagtttgacaagccatggcctgaggtgaactcgtttaagcccactgctgttggtattttgaagaggggattggatccaacgtcaatcactgtccttgaaaggaagacggccgacataagggaacattatatcattggtcggaggcttggtcaaggccagtttggcacaacattcctctgcaccgagatcagtacagggtgtgagtatgcatgcaagacaatcccaaagcgaaagctcatcaccaaggaggatgttgaggatgtgcgccgtgagatccagataatgcaccatttgtcaggccacaagaatgttgtttccatcaaggatgtatacgaggatgggcaggcggtgtatattgtgatggagctctgcgccggtggggagctctttgatcgaattcaggagaaagggcattatagcgaacagaaggctgcagagctcataagaatcattattagccttgtggctatgtgccattcacttggggttatgcaccgtgatctaaagccagaaaacttcctcctttgggataaagaagatgacctgtcaataaaagcaatcgattttggtctatctgtgttcttcaaaccaggtcaggttttcactgagctggttggaagtccatactacgttgctcctgaggtactacacaaacggtatggaccagaagcggatgtgtggtcagctggagtgatactgtatgttttgcttagtggggtgccacctttttgggcagagacgcaacaaggtatatttgatgctgtcttgaaggggcacattgattttgactcggacccatggcctaagatatctgaaagcgcaaagaatctcataaggaagatgctctgcccttgtccttcagagcgtctgaaagcccatgaagtactacgccatccttggatctgtgaaaatggagtggctactgatcaggctcttgatcccggtgttctctctcgtctcaaacaattctccacaatgaacaaattaaagaagttggctctgagagtgatagctgaacgactttctgaggaggagattgctgggttaagacaaatgttcaaggcagttgacgttcaaaatagaggcgtaattacttttggtgaacttagacaaggtttaaaaagatatggtagcgaattggagaatagagaaattagtgatataatggaagtggctgataatgacaataatgtgaccatcaattatgaagaatttatcgctgcaactgtgcctcttaacaaaatagaacgtgaggagcacctgatggcagcttttacctacttcgacaaagatggaagtggttatatcacagttgacaagctgcaacgagcttgtggagaacatgacatggatgacactttccttgaagagataattttagaagttgaccaaaacaatgacggtcagattgactacgccaaattcgtagccatgatgcaaggcagcaaagttggacttgggtggcaacaaatggaaaccactctgaatgtaaccttgagagatgcacctcaagtacactgtcactga

SEQ ID NO: 4885 - protein, 544 aa, Zea mays
MGNQCPNGTLGSDYYNRPTSRFADGCLEDDRYSDLKKFDKPWPEVNSFKPTAVGILKRGLDPTSITVLERKTADIREHYIIGRRLGQGQFGTTFLCTEISTGCEYACKTIPKRKLITKEDVEDVRREIQIMHHLSGHKNVVSIKDVYEDGQAVYIVMELCAGGELFDRIQEKGHYSEQKAAELIRIIISLVAMCHSLGVMHRDLKPENFLLWDKEDDLSIKAIDFGLSVFFKPGQVFTELVGSPYYVAPEVLHKRYGPEADVWSAGVILYVLLSGVPPFWAETQQGIFDAVLKGHIDFDSDPWPKISESAKNLIRKMLCPCPSERLKAHEVLRHPWICENGVATDQALDPGVLSRLKQFSTMNKLKKLALRVIAERLSEEEIAGLRQMFKAVDVQNRGVITFGELRQGLKRYGSELENREISDIMEVADNDNNVTINYEEFIAATVPLNKIEREEHLMAAFTYFDKDGSGYITVDKLQRACGEHDMDDTFLEEIILEVDQNNDGQIDYAKFVAMMQGSKVGLGWQQMETTLNVTLRDAPQVHCH

SEQ ID NO: 4886 - DNA, 1644 bp, Zea mays
  CDS (1)..(1644)
atgggcaacgcatgcagcggcgcccttagatccaagtacctgcacagcttcaagcacgccgcgtcgcagcgccacgactccgagtacagcgccagcgccgacgactcgcccaggaagcccacaccgcccgccaccacggacgcccacgcgccggcgccgcccgccgccgccatgaggcgcggcgcggctggcgcgacgccggacctcgggtccgtgctcggccacccaacccccaacctccgcgacctctacgcgctcggcaggaagctcgggcaggggcagttcggcaccacctacctctgcaccgagctcgccacggggatcgactacgcctgcaagtccatctccaagcgcaagctcatcaccaaggaggacgtcgacgacgtgcgccgcgagatccagatcatgcaccacctatccggccacaagaacgtcgtcgctatcaagggcgcgtacgaggaccaggtctacgtccacatcgtcatggagctctgtgccgggggcgagctcttcgaccggatcatacagcgcggacactacagcgagcgcaaggccgccgcgctcacaaggatcatcgtcggggtcgtcgaggcctgccactcgctcggggtcatgcaccgggacctcaagcccgagaacttcctgctcgccaacagggacgatgacctctcgctcaaggccatcgatttcggtctctctgtcttcttcaagcctggtcaagttttcaccgatgtagttggtagcccatattatgtagctccagaagttctgttgaaaagttatggacccgcagctgatgtatggacagccggtgtcattctttacattctactgagtggtgtgcctccattttgggcagaaacacaacaaggaatatttgatgctgtattgaagggtgccattgattttgattctgatccgtggcctgtcatatctgatagtgcaaaagatcttatcagacgaatgctgaatcctcgctctgccgagcgcttaacagcacatgaagttctatgccatccatggattcgtgatcatggagtagctcctgaccgtccactggatccagctgtcttatctcgcattaagcaattctctgcaatgaataagttgaagaaaatggctttacgagtaatagctgagagcctatcagaagaggaaattgcggggttgaaggaaatgttccagatcatggacactgacaacagtggcgcaatcacttatgatgagctaaaagaaggattgagaaaatatggctccacactaaaggacactgagattcgtgatcttatggaagcagctgatattgacaacagtggaacaattgactacatagaattcattgctgcaactttgcatctcaataagctggagcgtgaggaacatctcgtggcagccttttcatatttcgacaaagatggtagtggctatatcacagtggacgaactacagcaagcttgcaaagagcataacatgccggatgctttttttgatgatgtcatcaacgaagctgatcaggacaatgatggccgcattgactatggagaatttgttgccatgatgaccaagggcaatatgggagtcggtcgaagaacaatgagaaacagcttgaatatcagcatgagggacgcacctggtgcgttttga

SEQ ID NO: 4887 - protein, 547 aa, Zea mays
MGNACSGALRSKYLHSFKHAASQRHDSEYSASADDSPRKPTPPATTDAHAPAPPAAAMRRGAAGATPDLGSVLGHPTPNLRDLYALGRKLGQGQFGTTYLCTELATGIDYACKSISKRKLITKEDVDDVRREIQIMHHLSGHKNVVAIKGAYEDQVYVHIVMELCAGGELFDRIIQRGHYSERKAAALTRIIVGVVEACHSLGVMHRDLKPENFLLANRDDDLSLKAIDFGLSVFFKPGQVFTDVVGSPYYVAPEVLLKSYGPAADVWTAGVILYILLSGVPPFWAETQQGIFDAVLKGAIDFDSDPWPVISDSAKDLIRRMLNPRSAERLTAHEVLCHPWIRDHGVAPDRPLDPAVLSRIKQFSAMNKLKKMALRVIAESLSEEEIAGLKEMFQIMDTDNSGAITYDELKEGLRKYGSTLKDTEIRDLMEAADIDNSGTIDYIEFIAATLHLNKLEREEHLVAAFSYFDKDGSGYITVDELQQACKEHNMPDAFFDDVINEADQDNDGRIDYGEFVAMMTKGNMGVGRRTMRNSLNISMRDAPGAF

SEQ ID NO: 4888 - DNA, 1527 bp, Zea mays
  CDS (1)..(1527)
atgcagccggacccgagcgggaacaccaatgcgaaggcgaagctgccgttgatggctccggcgccgtcgtcggggcgcccggcgtccgtgctgccgtacaagacggagaacgtgcgcgaccactatcgcatcgggaagaagctggggcaggggcagttcggcaccacgtaccagtgcgtgggcaaggcggacggcggcgagtacgcgtgcaagtccatccccaagcgcaagctgctgtgccgcgaggactacgaggacgtgtggcgcgagatccagatcatgcaccacctctccgagcaccccaacgtcgtccgcatccgcggcgcgtacgaggacgcgctcttcgtccacctcgtcatggagctctgcgccggcggcgagctcttcgaccgcatcgtcgccaagggccactacaccgagcgcgccgccgcgcagctcatcaagacgattgttggggtggtgcaggggtgccactcgcttggcgtcatgcaccgggacctgaaaccggagaacttcctcttcgcgagcacccctgaggatgccccgctcaaggccactgattttgggctttccgtgttctacaagcccggtgataaattttctgacgttgttgggagcccctattatgttgcccctgaggtgcttcaaaaatgctatggcccagaatctgatgtatggagtgctggagtgattttgtacattttgctatgtggtgtacccccattttgggcagagagtgaagcagggatcttcaggcagattttgcgaggcaaacttgatttggaatctgaaccatggccaagtatctctgatagtgctaaggatttagtccgtaagatgcttatccgcgatcctacaaagaggttcactgctcatgaggttttatgtcatccatggattgttgatgatgctgtcgcacctgataagcctattgattctgctgttttgtcaaggctgaaaaacttttctgcaatgaacaagctcaagaagatggcattgagggtgattgctgaaagtctatctgaggaggagattgggggtttgaaggagttgttcaaaatgatcgatactgacaacagcgggacgataacttatgatgaactgaaggatggtctgaaaagggttggctcggacctgatggaacctgaaatccaggctttaatggatgcagctgatatcgacaacagcggaaccattgactatggagagttcttggcggctacgttgcacatgaataaactggagagggaggaaagcttggtgtcggcgtttgcgttcttcgataaggacgggagtggcttcataacgatcgacgagctctcacaagcatgcgaacagttcggtctttctgatgtccatctcgaggatatgatcaaagatgtggaccaaaacaatgacggtcagattgattatagtgagtttgccgcgatgatgagaaagggcaatgctggcggagcaggacggcggaccatgaggaacagcttgcatgtgaatcttggcgagctcctgaagcccaccgagacctag

SEQ ID NO: 4889 - protein, 508 aa, Zea mays
MQPDPSGNTNAKAKLPLMAPAPSSGRPASVLPYKTENVRDHYRIGKKLGQGQFGTTYQCVGKADGGEYACKSIPKRKLLCREDYEDVWREIQIMHHLSEHPNVVRIRGAYEDALFVHLVMELCAGGELFDRIVAKGHYTERAAAQLIKTIVGVVQGCHSLGVMHRDLKPENFLFASTPEDAPLKATDFGLSVFYKPGDKFSDVVGSPYYVAPEVLQKCYGPESDVWSAGVILYILLCGVPPFWAESEAGIFRQILRGKLDLESEPWPSISDSAKDLVRKMLIRDPTKRFTAHEVLCHPWIVDDAVAPDKPIDSAVLSRLKNFSAMNKLKKMALRVIAESLSEEEIGGLKELFKMIDTDNSGTITYDELKDGLKRVGSDLMEPEIQALMDAADIDNSGTIDYGEFLAATLHMNKLEREESLVSAFAFFDKDGSGFITIDELSQACEQFGLSDVHLEDMIKDVDQNNDGQIDYSEFAAMMRKGNAGGAGRRTMRNSLHVNLGELLKPTET

SEQ ID NO: 4890 - DNA, 1620 bp, Zea mays
  CDS (1)..(1620)
atgggcaactgctgcgtaacaccgaacggagccgccgacgccggcggcggcaagaagcccaaggagccgaagcagaagaagggcaagaagccgaaccccttctcgatcgagtacaaccgctcgacgccggcgagcgcgccgaggctggtggtgctgcgggagcccacggggcgggacatcgcggagcggtacgagcttggagcggagctcgggcgcggcgagttcggggtcacctatctctgcacggaccgcgcctcaggggaggcgctagcctgcaagtccatctccaagaagaagctccgcacccccgtcgacgtcgaggacgtgcgccgggaggtggagatcatgcgccacctccccaagcaccccaacatcgtcacgctcagggatacctacgaggacgacaatgccgtgcacctcgtcatggagctctgtgagggtggggagctcttcgaccgcatcgtggcgcgggggcactacacggaacgcgctgccgccttggtcacacgcactatcgtcgaggtcgtgcagatgtgccataagcatggagtgatgcacagggatctcaaaccagaaaatttcttgtttgcgaacaaaaaagaatcagcagcccttaaggccattgattttggcctgtctgtatttttcactccaggcgaacggtttacagagattgttgggagtccttattacatggccccagaggtactaaagagaaattatggcccagaggttgatgtttggagtgcaggggtgattctgtacattcttctctgtggtgtccctccattctgggcagaatcggagcaaggtgttgctcaggcaattatccgatctgtcattgatttcaaaagagatccatggccaagggtgtctgataatgccaaagaccttgtaagaggaatgctcaacccagatccaaagcgacgattgacagctcagcaagtgcttgatcacccatggttgcagaacattaagaaggctccaaatgtcaatttgggcgaaactgttaaggccagactccaacaattctctgtgatgaacaagttcaagaagcatgcacttagggtcatagctgagcacctttcagtagaagaggctgctgacataaaggatatgtttgagaagatggatcttaacaaggatcaaatgcttaatttcgatgagctgaagcttggtctgcataaatttggtcaccaaatccctgatgcagatgttcaaatactaatggaagctgcggatgctgatggaaacgggtccttggattatggagaatttgttacactatctgttcatctaagaaagattggaaatgatgagcatcttcataaggcatttgcatactttgaccggaatcagagtggttatattgaaattgatgaactccgtgagtcattagctgatgaccttggacagaatcatgaagaggttatcaatgccattatccgtgacgtagacaccgataaggatggcaagataagctacgatgagtttgcagcgatgatgaaggccggaacagactggaggaaagcgtcgagacagtattcgagagagcggttcaccagcctgagccttaagctgcaaaaggatggatcgttgcagatggagagtacgcagtag

SEQ ID NO: 4891 - protein, 539 aa, Zea mays
MGNCCVTPNGAADAGGGKKPKEPKQKKGKKPNPFSIEYNRSTPASAPRLVVLREPTGRDIAERYELGAELGRGEFGVTYLCTDRASGEALACKSISKKKLRTPVDVEDVRREVEIMRHLPKHPNIVTLRDTYEDDNAVHLVMELCEGGELFDRIVARGHYTERAAALVTRTIVEVVQMCHKHGVMHRDLKPENFLFANKKESAALKAIDFGLSVFFTPGERFTEIVGSPYYMAPEVLKRNYGPEVDVWSAGVILYILLCGVPPFWAESEQGVAQAIIRSVIDFKRDPWPRVSDNAKDLVRGMLNPDPKRRLTAQQVLDHPWLQNIKKAPNVNLGETVKARLQQFSVMNKFKKHALRVIAEHLSVEEAADIKDMFEKMDLNKDQMLNFDELKLGLHKFGHQIPDADVQILMEAADADGNGSLDYGEFVTLSVHLRKIGNDEHLHKAFAYFDRNQSGYIEIDELRESLADDLGQNHEEVINAIIRDVDTDKDGKISYDEFAAMMKAGTDWRKASRQYSRERFTSLSLKLQKDGSLQMESTQ

SEQ ID NO: 4892 - DNA, 20 bp, Artificial sequence
  primer
atgggcaattcttgccgtgg

SEQ ID NO: 4893 - DNA, 27 bp, Artificial sequence
  primer
ctacgcgtctctcatgctaatgtttag

SEQ ID NO: 4894 - protein, 723 aa, Artificial sequence
  consensus sequence
  Variant (3)..(10): Xaa in position 3 to 10 is any amino acid
  Variant (11)..(174): Xaa in position 11 to 174 is any or no amino acid
  Variant (176)..(177): Xaa in position 176 to 177 is any amino acid
  Variant (178)..(236): Xaa in position 178 to 236 is any or no amino acid
  Variant (238)..(239): Xaa in position 238 to 239 is any amino acid
  Variant (241)..(242): Xaa in position 241 to 242 is any amino acid
  Variant (245)..(245): Xaa in position 245 is any amino acid
  Variant (247)..(247): Xaa in position 247 is any amino acid
  Variant (250)..(250): Xaa in position 250 is any amino acid
  Variant (252)..(263): Xaa in position 252 to 263 is any amino acid
  Variant (264)..(266): Xaa in position 264 to 266 is any or no amino acid
  Variant (268)..(268): Xaa in position 268 is any amino acid
  Variant (270)..(270): Xaa in position 270 is any amino acid
  Variant (272)..(272): Xaa in position 272 is any amino acid
  Variant (274)..(274): Xaa in position 274 is any amino acid
  Variant (276)..(282): Xaa in position 276 to 282 is any amino acid
  Variant (283)..(285): Xaa in position 283 to 285 is any or no amino acid
  Variant (289)..(289): Xaa in position 289 is any amino acid
  Variant (292)..(293): Xaa in position 292 to 293 is any amino acid
  Variant (295)..(297): Xaa in position 295 to 297 is any amino acid
  Variant (299)..(302): Xaa in position 299 to 302 is any amino acid
  Variant (303)..(304): Xaa in position 303 to 304 is any or no amino acid
  Variant (306)..(306): Xaa in position 306 is any amino acid
  Variant (307)..(310): Xaa in position 307 to 310 is any or no amino acid
  Variant (312)..(317): Xaa in position 312 to 317 is any amino acid
  Variant (320)..(322): Xaa in position 320 to 322 is any amino acid
  Variant (324)..(325): Xaa in position 324 to 325 is any amino acid
  Variant (331)..(331): Xaa in position 331 is any amino acid
  Variant (336)..(336): Xaa in position 336 is any amino acid
  Variant (340)..(343): Xaa in position 340 to 343 is any amino acid
  Variant (344)..(348): Xaa in position 344 to 348 is any or no amino acid
  Variant (350)..(350): Xaa in position 350 is any amino acid
  Variant (352)..(353): Xaa in position 352 to 353 is any amino acid
  Variant (356)..(360): Xaa in position 356 to 360 is any amino acid
  Variant (362)..(363): Xaa in position 362 to 363 is any amino acid
  Variant (366)..(367): Xaa in position 366 to 367 is any amino acid
  Variant (370)..(371): Xaa in position 370 to 371 is any amino acid
  Variant (374)..(374): Xaa in position 374 is any amino acid
  Variant (385)..(392): Xaa in position 385 to 392 is any amino acid
  Variant (393)..(394): Xaa in position 393 to 394 is any or no amino acid
  Variant (397)..(398): Xaa in position 397 to 398 is any amino acid
  Variant (404)..(404): Xaa in position 404 is any amino acid
  Variant (406)..(408): Xaa in position 406 to 408 is any amino acid
  Variant (410)..(414): Xaa in position 410 to 414 is any amino acid
  Variant (415)..(415): Xaa in position 415 is any or no amino acid
  Variant (419)..(419): Xaa in position 419 is any amino acid
  Variant (422)..(422): Xaa in position 422 is any amino acid
  Variant (428)..(430): Xaa in position 428 to 430 is any amino acid
  Variant (433)..(433): Xaa in position 433 is any amino acid
  Variant (435)..(435): Xaa in position 435 is any amino acid
  Variant (437)..(437): Xaa in position 437 is any amino acid
  Variant (440)..(440): Xaa in position 440 is any amino acid
  Variant (444)..(444): Xaa in position 444 is any amino acid
  Variant (449)..(449): Xaa in position 449 is any amino acid
  Variant (451)..(452): Xaa in position 451 to 452 is any amino acid
  Variant (457)..(458): Xaa in position 457 to 458 is any amino acid
  Variant (459)..(464): Xaa in position 459 to 464 is any or no amino acid
  Variant (466)..(466): Xaa in position 466 is any amino acid
  Variant (470)..(472): Xaa in position 470 to 472 is any amino acid
  Variant (474)..(477): Xaa in position 474 to 477 is any amino acid
  Variant (480)..(482): Xaa in position 480 to 482 is any amino acid
  Variant (486)..(487): Xaa in position 486 to 487 is any amino acid
  Variant (489)..(490): Xaa in position 489 to 490 is any amino acid
  Variant (494)..(498): Xaa in position 494 to 498 is any amino acid
  Variant (500)..(502): Xaa in position 500 to 502 is any amino acid
  Variant (504)..(505): Xaa in position 504 to 505 is any amino acid
  Variant (507)..(507): Xaa in position 507 is any amino acid
  Variant (510)..(512): Xaa in position 510 to 512 is any amino acid
  Variant (514)..(514): Xaa in position 514 is any amino acid
  Variant (518)..(521): Xaa in position 518 to 521 is any amino acid
  Variant (522)..(523): Xaa in position 522 to 523 is any or no amino acid
  Variant (525)..(529): Xaa in position 525 to 529 is any amino acid
  Variant (531)..(532): Xaa in position 531 to 532 is any amino acid
  Variant (534)..(537): Xaa in position 534 to 537 is any amino acid
  Variant (541)..(543): Xaa in position 541 to 543 is any amino acid
  Variant (545)..(546): Xaa in position 545 to 546 is any amino acid
  Variant (549)..(549): Xaa in position 549 is any amino acid
  Variant (552)..(554): Xaa in position 552 to 554 is any amino acid
  Variant (556)..(557): Xaa in position 556 to 557 is any amino acid
  Variant (559)..(560): Xaa in position 559 to 560 is any amino acid
  Variant (563)..(565): Xaa in position 563 to 565 is any amino acid
  Variant (567)..(569): Xaa in position 567 to 569 is any amino acid
  Variant (571)..(573): Xaa in position 571 to 573 is any amino acid
  Variant (575)..(577): Xaa in position 575 to 577 is any amino acid
  Variant (578)..(579): Xaa in position 578 to 579 is any or no amino acid
  Variant (581)..(581): Xaa in position 581 is any amino acid
  Variant (583)..(585): Xaa in position 583 to 585 is any amino acid
  Variant (588)..(589): Xaa in position 588 to 589 is any amino acid
  Variant (590)..(590): Xaa in position 590 is any or no amino acid
  Variant (592)..(608): Xaa in position 592 to 608 is any amino acid
  Variant (609)..(609): Xaa in position 609 is any or no amino acid
  Variant (611)..(611): Xaa in position 611 is any amino acid
  Variant (613)..(615): Xaa in position 613 to 615 is any amino acid
  Variant (616)..(616): Xaa in position 616 is any or no amino acid
  Variant (618)..(619): Xaa in position 618 to 619 is any amino acid
  Variant (621)..(622): Xaa in position 621 to 622 is any amino acid
  Variant (625)..(626): Xaa in position 625 to 626 is any amino acid
  Variant (628)..(633): Xaa in position 628 to 633 is any amino acid
  Variant (634)..(648): Xaa in position 634 to 648 is any or no amino acid
  Variant (651)..(652): Xaa in position 651 to 652 is any amino acid
  Variant (655)..(657): Xaa in position 655 to 657 is any amino acid
  Variant (658)..(658): Xaa in position 658 is any or no amino acid
  Variant (660)..(660): Xaa in position 660 is any amino acid
  Variant (662)..(664): Xaa in position 662 to 664 is any amino acid
  Variant (667)..(670): Xaa in position 667 to 670 is any amino acid
  Variant (671)..(697): Xaa in position 671 to 697 is any or no amino acid
  Variant (699)..(701): Xaa in position 699 to 701 is any amino acid
  Variant (702)..(708): Xaa in position 702 to 708 is any or no amino acid
  Variant (711)..(711): Xaa in position 711 is any amino acid
  Variant (713)..(716): Xaa in position 713 to 716 is any amino acid
  Variant (717)..(722): Xaa in position 717 to 722 is any or no amino acid
MGXXXXXXXXXXXXXXXXXXXXXXXXXXXXXXXXXXXXXXXXXXXXXXXXXXXXXXXXXXXXXXXXXXXXXXXXXXXXXXXXXXXXXXXXXXXXXXXXXXXXXXXXXXXXXXXXXXXXXXXXXXXXXXXXXXXXXXXXXXXXXXXXXXXXXXXXXXXXXXXXXXXXXXXXXXXXLXXXXXXXXXXXXXXXXXXXXXXXXXXXXXXXXXXXXXXXXXXXXXXXXXXXXXXXXXXXXXYXXGXXLGXGXFGXTXXXXXXXXXXXXXXXAXKXIXKXKXXXXXXXXXXEDVXREXXIXXXLXXXXXXNXXXXXVXXXXXXEDXXXVXXVMELCXGGELXDRIXXXXXXXXXYXEXXAAXXXXXIXXVVXXCHXXGVXHRDLKPENFLXXXXXXXXXXLKXXDFGLSXFXXXGXXXXXXVGSXYYXAPEVLXXXYGXEXDXWSXGVIXYILLXGXXPFWAXXXXXXXXEXGIFXXXLXXXXDFXXXPWPXXSXXAKDXXXXXLXXXPXXRXTAXXXLXHPWXXXXXXAXXXXXDXXVXXXXKQFXXXNXXKKXALXXXAXXLXXEEXXXLXXXFXXXDXXXXXGXIXXXELXXXLXXXXXXXXXXXXXXXXXXAXDXXXXGXXDXXEFXXAXXXXXXXXXXXXXXXXXXXXXAFXXFDXXXXGXIXXXELXXXXXXXXXXXXXXXXXXXXXXXXXXXXXXXDXXXXXXXXXXDGXIXXXXXXXXXXF

SEQ ID NO: 4895 - protein, 30 aa, Artificial sequence
  protein pattern
  Variant (4)..(4): Xaa in position 4 is Ala, Pro or Val
  Variant (7)..(7): Xaa in position 7 is Ile, Met or Val
  Variant (13)..(15): Xaa in position 13 to 15 is any amino acid
  Variant (17)..(17): Xaa in position 17 is Gly, Ser or Thr
  Variant (18)..(18): Xaa in position 18 is any amino acid
  Variant (20)..(20): Xaa in position 20 is any amino acid
  Variant (22)..(22): Xaa in position 22 is Ile, Met or Val
  Variant (24)..(24): Xaa in position 24 is Ser or Thr
  Variant (25)..(25): Xaa in position 25 is any amino acid
  Variant (27)..(27): Xaa in position 27 is Ile or Val
  Variant (28)..(28): Xaa in position 28 is Ile or Met
  Variant (29)..(29): Xaa in position 29 is any amino acid
VGSXYYXAPEVLXXXYXXEXDXWXXGXXXY

SEQ ID NO: 4896 - protein, 20 aa, Artificial sequence
  protein pattern
  Variant (3)..(5): Xaa in position 3 to 5 is any amino acid
  Variant (7)..(7): Xaa in position 7 is any amino acid
  Variant (8)..(8): Xaa in position 8 is Ile, Leu or Val
  Variant (14)..(14): Xaa in position 14 is any amino acid
  Variant (19)..(19): Xaa in position 19 is Phe or Leu
EDXXXVXXVMELCXGGELXD

SEQ ID NO: 4897 - protein, 16 aa, Artificial sequence
  protein pattern
  Variant (3)..(3): Xaa in position 3 is Ile, Met or Val
  Variant (14)..(14): Xaa in position 14 is Phe or Leu
  Variant (15)..(15): Xaa in position 15 is any amino acid
  Variant (16)..(16): Xaa in position 16 is Asp, Asn, Ser or Thr
GVXHRDLKPENFLXXX

SEQ ID NO: 4898 - protein, 60 aa, Artificial sequence
  protein pattern
  Variant (2)..(2): Xaa in position 2 is any or no amino acid
  Variant (5)..(5): Xaa in position 5 is Ala, Asp, Gly, Asn or Ser
  Variant (6)..(6): Xaa in position 6 is Asp, Glu, Lys or Arg
  Variant (7)..(7): Xaa in position 7 is any amino acid
  Variant (8)..(8): Xaa in position 8 is Asp, Glu or Gln
  Variant (9)..(9): Xaa in position 9 is any amino acid
  Variant (11)..(11): Xaa in position 11 is Ile or Val
  Variant (12)..(14): Xaa in position 12 to 14 is any amino acid
  Variant (15)..(15): Xaa in position 15 is Ile or Val
  Variant (16)..(16): Xaa in position 16 is Ile, Leu, Met or Val
  Variant (17)..(20): Xaa in position 17 to 20 is any amino acid
  Variant (21)..(21): Xaa in position 21 is Asp, Glu, Asn or Ser
  Variant (23)..(25): Xaa in position 23 to 25 is any amino acid
  Variant (29)..(29): Xaa in position 29 is any amino acid
  Variant (30)..(30): Xaa in position 30 is Ile, Leu or Val
  Variant (32)..(33): Xaa in position 32 to 33 is any amino acid
  Variant (35)..(35): Xaa in position 35 is any amino acid
  Variant (36)..(36): Xaa in position 36 is Asp, Glu, Asn or Ser
  Variant (37)..(37): Xaa in position 37 is Phe, Ile or Leu
  Variant (38)..(38): Xaa in position 38 is Ile, Leu, Met or Val
  Variant (39)..(40): Xaa in position 39 to 40 is any amino acid
  Variant (41)..(41): Xaa in position 41 is Phe, Leu, Met or Val
  Variant (43)..(48): Xaa in position 43 to 48 is any amino acid
  Variant (50)..(53): Xaa in position 50 to 53 is any amino acid
  Variant (54)..(54): Xaa in position 54 is Asp, Glu, Gln or Arg
  Variant (55)..(55): Xaa in position 55 is Ala, Ile or Val
  Variant (56)..(56): Xaa in position 56 is Leu or Met
  Variant (57)..(59): Xaa in position 57 to 59 is any amino acid
PXFWXXXXXGXXXXXXXXXXXFXXXPWPXXSXXAXXXXXXXLXXXXXXRXXXXXXXXXXW

SEQ ID NO: 4899 - protein, 20 aa, Artificial sequence
  protein pattern
  Variant (2)..(2): Xaa in position 2 is any amino acid
  Variant (3)..(3): Xaa in position 3 is any or no amino acid
  Variant (5)..(5): Xaa in position 5 is any or no amino acid
  Variant (7)..(7): Xaa in position 7 is Ile or Val
  Variant (8)..(8): Xaa in position 8 is any amino acid
  Variant (10)..(10): Xaa in position 10 is Leu or Met
  Variant (11)..(12): Xaa in position 11 to 12 is any amino acid
  Variant (14)..(14): Xaa in position 14 is Ala, Pro, Ser or Thr
  Variant (15)..(17): Xaa in position 15 to 17 is any amino acid
  Variant (18)..(18): Xaa in position 18 is Asn or Ser
  Variant (19)..(19): Xaa in position 19 is Ile, Leu or Val
  Variant (20)..(20): Xaa in position 20 is Ala, Ile, Pro or Val
DXXRXEXXIXXXLXXXXXXX

SEQ ID NO: 4900 - protein, 15 aa, Artificial sequence
  protein pattern
  Variant (3)..(3): Xaa in position 3 is Ala, Ser, Thr or Val
  Variant (4)..(4): Xaa in position 4 is any amino acid
  Variant (10)..(10): Xaa in position 10 is any amino acid
  Variant (12)..(14): Xaa in position 12 to 14 is any amino acid
  Variant (15)..(15): Xaa in position 15 is Ala, Asp, Glu, Gly or Asn
LKXXDFGLSXFXXXX

SEQ ID NO: 4901 - protein, 17 aa, Artificial sequence
  protein pattern
  Variant (2)..(3): Xaa in position 2 to 3 is any amino acid
  Variant (6)..(6): Xaa in position 6 is any amino acid
  Variant (7)..(7): Xaa in position 7 is Asp or Asn
  Variant (8)..(8): Xaa in position 8 is any amino acid
  Variant (9)..(9): Xaa in position 9 is Asp, Asn, Ser or Thr
  Variant (11)..(11): Xaa in position 11 is any amino acid
  Variant (13)..(15): Xaa in position 13 to 15 is any amino acid
  Variant (16)..(16): Xaa in position 16 is Glu or Lys
FXXFDXXXXGXIXXXXL

SEQ ID NO: 4902 - protein, 13 aa, Artificial sequence
  protein pattern
  Variant (2)..(2): Xaa in position 2 is any amino acid
  Variant (3)..(3): Xaa in position 3 is Asp or Asn
  Variant (4)..(4): Xaa in position 4 is any amino acid
  Variant (7)..(7): Xaa in position 7 is any amino acid
  Variant (8)..(8): Xaa in position 8 is Ile or Val
  Variant (9)..(9): Xaa in position 9 is Asp, Asn or Ser
  Variant (10)..(10): Xaa in position 10 is Phe or Tyr
  Variant (11)..(11): Xaa in position 11 is any amino acid
DXXXDGXXXXXEF

SEQ ID NO: 4903 - protein, 13 aa, Artificial sequence
  protein pattern
  Variant (2)..(2): Xaa in position 2 is Ser or Thr
  Variant (4)..(5): Xaa in position 4 to 5 is any amino acid
  Variant (8)..(8): Xaa in position 8 is any amino acid
  Variant (9)..(9): Xaa in position 9 is Ile, Leu, Met or Val
  Variant (10)..(10): Xaa in position 10 is any amino acid
  Variant (11)..(11): Xaa in position 11 is Lys or Arg
  Variant (12)..(12): Xaa in position 12 is any amino acid
  Variant (13)..(13): Xaa in position 13 is Ile, Met or Val
YXEXXAAXXXXXX

SEQ ID NO: 4904 - DNA, 309 bp, Arabidopsis thaliana; identical to SEQ ID NO: 2739
  CDS (1)..(309)

SEQ ID NO: 4905 - protein, 102 aa, Arabidopsis thaliana; identical to SEQ ID NO: 2740

SEQ ID NO: 4906 - DNA, 309 bp, Glycine max; identical to SEQ ID NO: 3656
  CDS (1)..(309)

SEQ ID NO: 4907 - protein, 102 aa, Glycine max; identical to SEQ ID NO: 2906

SEQ ID NO: 4908 - DNA, 603 bp, Glycine max; identical to SEQ ID NO: 2937
  CDS (114)..(419)

SEQ ID NO: 4909 - protein, 101 aa, Glycine max; identical to SEQ ID NO: 2904

SEQ ID NO: 4910 - DNA, 511 bp, Glycine max; identical to SEQ ID NO: 2575
  CDS (108)..(416)

SEQ ID NO: 4911 - protein, 102 aa, Glycine max; identical to SEQ ID NO: 2576

SEQ ID NO: 4912 - DNA, 306 bp, Glycine max; identical to SEQ ID NO: 2815
  CDS (1)..(306)

SEQ ID NO: 4913 - protein, 101 aa, Glycine max; identical to SEQ ID NO: 2816

SEQ ID NO: 4914 - DNA, 309 bp, Glycine max; identical to SEQ ID NO: 2577
  CDS (1)..(309)

SEQ ID NO: 4915 - protein, 102 aa, Glycine max; identical to SEQ ID NO: 2578

SEQ ID NO: 4916 - DNA, 309 bp, Glycine max; identical to SEQ ID NO: 2945
  CDS (1)..(309)

SEQ ID NO: 4917 - protein, 102 aa, Glycine max; identical to SEQ ID NO: 2890

SEQ ID NO: 4918 - DNA, 309 bp, Glycine max; identical to SEQ ID NO: 2579
  CDS (1)..(309)

SEQ ID NO: 4919 - protein, 102 aa, Glycine max; identical to SEQ ID NO: 2580

SEQ ID NO: 4920 - DNA, 312 bp, Sorghum bicolor; identical to SEQ ID NO: 2581
  CDS (1)..(312)

SEQ ID NO: 4921 - protein, 103 aa, Sorghum bicolor; identical to SEQ ID NO: 2582

SEQ ID NO: 4922 - DNA, 315 bp, Zea mays; identical to SEQ ID NO: 3668
  CDS (1)..(315)

SEQ ID NO: 4923 - protein, 104 aa, Zea mays; identical to SEQ ID NO: 3669

SEQ ID NO: 4924 - DNA, 315 bp, Zea mays; identical to SEQ ID NO: 2583
  CDS (1)..(315)

SEQ ID NO: 4925 - protein, 104 aa, Zea mays; identical to SEQ ID NO: 2584

SEQ ID NO: 4926 - DNA, 312 bp, Zea mays; identical to SEQ ID NO: 2585
  CDS (1)..(312)

SEQ ID NO: 4927 - protein, 103 aa, Zea mays; identical to SEQ ID NO: 2586

SEQ ID NO: 4928 - DNA, 315 bp, Zea mays; identical to SEQ ID NO: 2587
  CDS (1)..(315)

SEQ ID NO: 4929 - protein, 104 aa, Zea mays; identical to SEQ ID NO: 2588

SEQ ID NO: 4930 - DNA, 318 bp, Glycine max; identical to SEQ ID NO: 2589
  CDS (1)..(318)

SEQ ID NO: 4931 - protein, 105 aa, Glycine max; identical to SEQ ID NO: 2590

SEQ ID NO: 4932 - DNA, 351 bp, Bombyx mori; identical to SEQ ID NO: 2591
  CDS (1)..(351)

SEQ ID NO: 4933 - protein, 116 aa, Bombyx mori; identical to SEQ ID NO: 2592

SEQ ID NO: 4934 - DNA, 405 bp, Oryza sativa (japonica cultivar-group); identical to SEQ ID NO: 2593
  CDS (1)..(405)

SEQ ID NO: 4935 - protein, 134 aa, Oryza sativa (japonica cultivar-group); identical to SEQ ID NO: 2594

SEQ ID NO: 4936 - DNA, 477 bp, Oryza sativa (japonica cultivar-group); identical to SEQ ID NO: 2595
  CDS (1)..(477)

SEQ ID NO: 4937 - protein, 158 aa, Oryza sativa (japonica cultivar-group); identical to SEQ ID NO: 2596

SEQ ID NO: 4938 - DNA, 309 bp, Arabidopsis thaliana; identical to SEQ ID NO: 2597
  CDS (1)..(309)

SEQ ID NO: 4939 - protein, 102 aa, Arabidopsis thaliana; identical to SEQ ID NO: 2598

SEQ ID NO: 4940 - DNA, 480 bp, Drosophila melanogaster
  CDS (1)..(480)
atgaaccgaatttgccagagtctccgccatccgagataccagattctcgccaccacagcaccgcaatccctgctcacccgctttcttgcggcggatgcggccaccggcgcggcagtggacaaggcgacaatggacaagctggtgcgcaccaacaaggtggtcgtcttcatgaagggcaacccacaggcgccacgctgcggcttcagcaatgcggtggtgcagattatgcggatgcacggtgtccagtacgatgcccacgatgtgctgcaaaacgagtccctgcgacagggtgtcaaggactacaccgactggccgaccattccgcaggtgttcatcaatggcgaatttgtcggcggttgcgacatcctgctgcagatgcaccagagcggcgatctcatcgaggagctcaagaaggcgggcatcatttcggagctgctgaaagcggaggaggctaagcagcaggacgacaaggctaagtga

SEQ ID NO: 4941 - protein, 159 aa, Drosophila melanogaster
MNRICQSLRHPRYQILATTAPQSLLTRFLAADAATGAAVDKATMDKLVRTNKVVVFMKGNPQAPRCGFSNAVVQIMRMHGVQYDAHDVLQNESLRQGVKDYTDWPTIPQVFINGEFVGGCDILLQMHQSGDLIEELKKAGIISELLKAEEAKQQDDKAK

SEQ ID NO: 4942 - DNA, 351 bp, Drosophila melanogaster; identical to SEQ ID NO: 2599
  CDS (1)..(351)

SEQ ID NO: 4943 - protein, 116 aa, Drosophila melanogaster; identical to SEQ ID NO: 2600

SEQ ID NO: 4944 - DNA, 339 bp, Vibrio vulnificus CMCP6
  CDS (1)..(339): transl_table=11
atggaaactatcgacaaaatcaaacaacaaatcgcagaaaacccaatccttctctacatgaaaggttctccaaagctaccaagctgtggtttttcttctcaagcagctcaagcattgatggcatgtggcgaaaaatttgcttatgtagacattctacaaaacccagatattcgtgctgagttgccaaaatacgcggagtggcctactttcccacaactatgggttgaaggtgagttgattggcggttgtgatatcgtgattgagatgttccaaaaaggcgaacttcaaccattgatcaaagaagcggcagcacgcgcagcgggcagcgacgcggaataa

SEQ ID NO: 4945 - protein, 112 aa, Vibrio vulnificus CMCP6
METIDKIKQQIAENPILLYMKGSPKLPSCGFSSQAAQALMACGEKFAYVDILQNPDIRAELPKYAEWPTFPQLWVEGELIGGCDIVIEMFQKGELQPLIKEAAARAAGSDAE

SEQ ID NO: 4946 - DNA, 480 bp, Arabidopsis thaliana; identical to SEQ ID NO: 3688
  CDS (1)..(480)

SEQ ID NO: 4947 - protein, 159 aa, Arabidopsis thaliana; identical to SEQ ID NO: 3689

SEQ ID NO: 4948 - DNA, 378 bp, Vibrio vulnificus YJ016
  CDS (1)..(378): transl_table=11
gtgcgaaaaatttgcagtcattccgtgaacgaggaagcaatggaaactatcgacaaaatcaaacaacaaatcgcagaaaacccaatccttctctacatgaaaggttctccaaagctaccaagctgtggtttttcttctcaagcagctcaagcattgatggcatgtggcgaaaaatttgcttatgtagacattctacaaaacccagatattcgtgctgagttgccaaaatacgcggagtggcctactttcccacaactatgggttgaaggtgagttgattggcggttgtgatatcgtgattgagatgttccaaaaaggcgaacttcaaccattgatcaaagaagcggcagcacgcgcagcgggcagcgacgcggaataa

SEQ ID NO: 4949 - protein, 125 aa, Vibrio vulnificus YJ016
MRKICSHSVNEEAMETIDKIKQQIAENPILLYMKGSPKLPSCGFSSQAAQALMACGEKFAYVDILQNPDIRAELPKYAEWPTFPQLWVEGELIGGCDIVIEMFQKGELQPLIKEAAARAAGSDAE

SEQ ID NO: 4950 - DNA, 312 bp, Strongylocentrotus purpuratus; identical to SEQ ID NO: 2603
  CDS (1)..(312)

SEQ ID NO: 4951 - protein, 103 aa, Strongylocentrotus purpuratus; identical to SEQ ID NO: 2604

SEQ ID NO: 4952 - DNA, 381 bp, Strongylocentrotus purpuratus; identical to SEQ ID NO: 2605
  CDS (1)..(381)

SEQ ID NO: 4953 - protein, 126 aa, Strongylocentrotus purpuratus; identical to SEQ ID NO: 2606

SEQ ID NO: 4954 - DNA, 321 bp, Strongylocentrotus purpuratus; identical to SEQ ID NO: 2607
  CDS (1)..(321)

SEQ ID NO: 4955 - protein, 106 aa, Strongylocentrotus purpuratus; identical to SEQ ID NO: 2608

SEQ ID NO: 4956 - DNA, 429 bp, Nasonia vitripennis; identical to SEQ ID NO: 3311
  CDS (1)..(429)

SEQ ID NO: 4957 - protein, 142 aa, Nasonia vitripennis; identical to SEQ ID NO: 3312

SEQ ID NO: 4958 - DNA, 339 bp, Anopheles gambiae str. PEST; identical to SEQ ID NO: 2611
  CDS (1)..(339)

SEQ ID NO: 4959 - protein, 112 aa, Anopheles gambiae str. PEST; identical to SEQ ID NO: 2612

SEQ ID NO: 4960 - DNA, 438 bp, Anopheles gambiae str. PEST; identical to SEQ ID NO: 3315
  CDS (1)..(438)

SEQ ID NO: 4961 - protein, 145 aa, Anopheles gambiae str. PEST; identical to SEQ ID NO: 3316

SEQ ID NO: 4962 - DNA, 309 bp, Magnaporthe grisea 70-15; identical to SEQ ID NO: 2613
  CDS (1)..(309)

SEQ ID NO: 4963 - protein, 102 aa, Magnaporthe grisea 70-15; identical to SEQ ID NO: 2614

SEQ ID NO: 4964 - DNA, 504 bp, Magnaporthe grisea 70-15
  CDS (1)..(504)
atgatctccagcagatttatgggaggaaacatcctccgacaagcctccaggacagcctgccgcgcaccggcgcactcgatcgccgcgcccaccctcctcagacagcttcaggcgcagcagcagcgacggctgctgacgtccgaggtgcgccaggccatcgacaaggcggttgcgtcggcgcccgtggtcctcttcatgaagggcacgcccgagaccccccagtgcggcttctctcgtgccagcatccagatcctcagcatgcagggcgtcgacccggaaaagtttgccgcctacaatgtccttgaggaccagagcctgagggaaggcatcaaggagtactcggagtggcccaccatcccccaggtctacatcgacaaggagttcgtcggcggctgcgatatcctcgtctcgatgcaccagagcggcgagctcggcaagatgttggccgagaagggcgtccttgtcaagggacaggagggcgaggctgataacaagtcggagtag

SEQ ID NO: 4965 - protein, 167 aa, Magnaporthe grisea 70-15
MISSRFMGGNILRQASRTACRAPAHSIAAPTLLRQLQAQQQRRLLTSEVRQAIDKAVASAPVVLFMKGTPETPQCGFSRASIQILSMQGVDPEKFAAYNVLEDQSLREGIKEYSEWPTIPQVYIDKEFVGGCDILVSMHQSGELGKMLAEKGVLVKGQEGEADNKSE

SEQ ID NO: 4966 - DNA, 843 bp, Magnaporthe grisea 70-15; identical to SEQ ID NO: 2615
  CDS (1)..(843)

SEQ ID NO: 4967 - protein, 280 aa, Magnaporthe grisea 70-15; identical to SEQ ID NO: 2616

SEQ ID NO: 4968 - DNA, 852 bp, Gibberella zeae PH-1
  CDS (1)..(852)
atgccttctccacgccgagtacgcctactgatcctggcgacaatcggcaccttcatcttcattctcttctacacctctggttttgacggtcaccacgatgctgaaacatccaccggccaagaattcatcaagaagacccaaaatgccatgagcgcaaacgagatgcctgctcccatcgtggactttgccactggcgagaaggctggatcagcccacagcgacaaggacggagacggtgatatcgacgaggaagacaaaaagatggccgaagagatgcaacaacgtctcaaggctgctgaggcagaagccaagggcaaggcgaacgagaagggtggtctgcgaccggacccccctaagaaagtcgtgggcgtcggaagttctgccgagggacagaacaaggacaagattgtcaagccggccgctggagagaagggcgctgctgctgctcccgatgctgctgccgctgacaagaagcccgtgacagagacaaggaccaaggaggaactcgaggctcgcgcagagcttgattcaatcctcaagaagtcacctgttatcatcttctccaaaacctattgtccccactcgaaacgagccaaggccattttgattgaaaagtacgccatcactcccgagccgtacattgtcgaactcgacgtccaccctcaaggctcagccctgcaagaccaactactcgagacgactggacgaaggactgtgcctaatgtcatggtcaacggcgtgagcttgggaggcgccgacgacataactgagatggatcacgcaggcaatctcgtaggcaagattgtcgacctcggaaacaagcgcgtagaggttacggcacgaaccaagtaa

SEQ ID NO: 4969 - protein, 283 aa, Gibberella zeae PH-1
MPSPRRVRLLILATIGTFIFILFYTSGFDGHHDAETSTGQEFIKKTQNAMSANEMPAPIVDFATGEKAGSAHSDKDGDGDIDEEDKKMAEEMQQRLKAAEAEAKGKANEKGGLRPDPPKKVVGVGSSAEGQNKDKIVKPAAGEKGAAAAPDAAAADKKPVTETRTKEELEARAELDSILKKSPVIIFSKTYCPHSKRAKAILIEKYAITPEPYIVELDVHPQGSALQDQLLETTGRRTVPNVMVNGVSLGGADDITEMDHAGNLVGKIVDLGNKRVEVTARTK

SEQ ID NO: 4970 - DNA, 321 bp, Gibberella zeae PH-1; identical to SEQ ID NO: 2617
  CDS (1)..(321)

SEQ ID NO: 4971 - protein, 106 aa, Gibberella zeae PH-1; identical to SEQ ID NO: 2618

SEQ ID NO: 4972 - DNA, 681 bp, Candida glabrata CBS 138
  CDS (1)..(681)
atgctgacgggtgtcctcttcacaattctatatttcctatcgcatttcagcgggccctctagtgccgactcagcctttagacaggttggtcctggtagtagaaactctaagggtggtggtaacctagggccaccaataatggaggctgagatgaatggtaacactaataacatcgaaaaggctgaagctgggaataaagccatggataccactagtaactcaggtacttctaatgaaaatgctcagctacctggcagcaaggaccaaaccgattcaaattcaaattctctttcaaataaggaaggacaagaagatgccgaggaagctgctgatgcggagtacagtcccgctaaggagttccaaaagctggttaaatccgcaccaatagttatttttagtaagtcatattgcccattcagtaagaatctaaagaagctactcgataagaactatagacttgatccagcttacgtggctgtcgaagttgaccaacaccctaacggagataagttgtatagctatatcaagaaactaacggggagaaatactgtaccaaatttgattgccaatggtgattctaaaggtggtttcgatgacatgttagccttgcataacagtaacgaactagagtcaaagttgatagaatggggagtcggagaattacaagttagtaaggtatag

SEQ ID NO: 4973 - protein, 226 aa, Candida glabrata CBS 138
MLTGVLFTILYFLSHFSGPSSADSAFRQVGPGSRNSKGGGNLGPPIMEAEMNGNTNNIEKAEAGNKAMDTTSNSGTSNENAQLPGSKDQTDSNSNSLSNKEGQEDAEEAADAEYSPAKEFQKLVKSAPIVIFSKSYCPFSKNLKKLLDKNYRLDPAYVAVEVDQHPNGDKLYSYIKKLTGRNTVPNLIANGDSKGGFDDMLALHNSNELESKLIEWGVGELQVSKV

SEQ ID NO: 4974 - DNA, 636 bp, Kluyveromyces lactis NRRL Y-1140; identical to SEQ ID NO: 2619
  CDS (1)..(636)

SEQ ID NO: 4975 - protein, 211 aa, Kluyveromyces lactis NRRL Y-1140; identical to SEQ ID NO: 2620

SEQ ID NO: 4976 - DNA, 666 bp, Debaryomyces hansenii CBS767; identical to SEQ ID NO: 4120
  CDS (1)..(666)

SEQ ID NO: 4977 - protein, 221 aa, Debaryomyces hansenii CBS767; identical to SEQ ID NO: 4121

SEQ ID NO: 4978 - DNA, 315 bp, Debaryomyces hansenii CBS767; identical to SEQ ID NO: 2623
  CDS (1)..(315)

SEQ ID NO: 4979 - protein, 104 aa, Debaryomyces hansenii CBS767; identical to SEQ ID NO: 2624

SEQ ID NO: 4980 - DNA, 318 bp, Yarrowia lipolytica CLIB122; identical to SEQ ID NO: 2625
  CDS (1)..(318)

SEQ ID NO: 4981 - protein, 105 aa, Yarrowia lipolytica CLIB122; identical to SEQ ID NO: 2626

SEQ ID NO: 4982 - DNA, 456 bp, Yarrowia lipolytica CLIB122
  CDS (1)..(456)
atggcctttatgcagcgatccatctttgctctccgagccgctacccccgctatgcgggcccccgctttccgaatcgccccctccatgcgacgatttatctccaccgagaccaaggatgccattgagaccgccattggcactgctcccgtggttctcttcatgaagggcacacccgagttcccccaatgcggtttctctcgagccaccatccaggtgcttggccaccagggcgtcgacccccagaagtttgctgccttcaacgttcttgaggacgaggagctgcgtgagggcatcaaggagttctcccagtggcccactatcccccagctgtacatcaacaaggagtttattggcggctgtgacattgtcatgtctatgagccagagcggcgagctcgccgagatgctgcagcagcaggatctgcttgcacccgaggaagaggagcacatggagtaa

SEQ ID NO: 4983 - protein, 151 aa, Yarrowia lipolytica CLIB122
MAFMQRSIFALRAATPAMRAPAFRIAPSMRRFISTETKDAIETAIGTAPVVLFMKGTPEFPQCGFSRATIQVLGHQGVDPQKFAAFNVLEDEELREGIKEFSQWPTIPQLYINKEFIGGCDIVMSMSQSGELAEMLQQQDLLAPEEEEHME

SEQ ID NO: 4984 - DNA, 630 bp, Yarrowia lipolytica CLIB122; identical to SEQ ID NO: 2627
  CDS (1)..(630)

SEQ ID NO: 4985 - protein, 209 aa, Yarrowia lipolytica CLIB122; identical to SEQ ID NO: 2628

SEQ ID NO: 4986 - DNA, 402 bp, Apis mellifera
  CDS (1)..(402)
atgattcctttcaggagttttattgttagaagtttttcaacgacttctaataaaatcgctaacctcgttaagaaaaacaaagttgttgtgttcatgaaaggtgttccagacagccctaaatgtggctttagcaatgctgttgtacaaatattgagaatgcataatgttaagtatgatgctcataacgttcttgaagatgaacaactcagacaaggtattaaggatttttccaactggcccacaatacctcaagtatttataaatggagaattcgtaggtggatgtgacatacttttagaaatgcacagaaatggtgagctaatagctgaattaaagaaagcaggtataacaagtgcacttttagaagaagatgaatctccagagaagaaaaccaaagattga

SEQ ID NO: 4987 - protein, 133 aa, Apis mellifera
MIPFRSFIVRSFSTTSNKIANLVKKNKVVVFMKGVPDSPKCGFSNAVVQILRMHNVKYDAHNVLEDEQLRQGIKDFSNWPTIPQVFINGEFVGGCDILLEMHRNGELIAELKKAGITSALLEEDESPEKKTKD

SEQ ID NO: 4988 - DNA, 309 bp, Aspergillus nidulans FGSC A4; identical to SEQ ID NO: 2629
  CDS (1)..(309)

SEQ ID NO: 4989 - protein, 102 aa, Aspergillus nidulans FGSC A4; identical to SEQ ID NO: 2630

SEQ ID NO: 4990 - DNA, 450 bp, Aspergillus nidulans FGSC A4
  CDS (1)..(450)
atgttctcaagaacagcaatctccttcacgctccgacggtctctgtttcggccacaactctcccctcagtttccaaaccagcttccatctgtgctccaagcccgtctactttcaacagagaccaaagcagcaattgataaagctgttgcatcggctccggtggttcttttcatgaagggcactccggaaactccgcagtgcgggttctctcgcgcaagcatccagattttgggtttacaaggtgttgatcccaagaaattcgtagcgtttaacgtgctagaggatccggagctgcgtcaaggtatcaaggagtactcggactggcctacgattccacaattatacctgaacaaggagtttattggtgggtgtgatattctgatgtcaatgcatcagaatggcgaactttcgaagctcttagaagagaagggtgtcctagttgctgaatag

SEQ ID NO: 4991 - protein, 149 aa, Aspergillus nidulans FGSC A4
MFSRTAISFTLRRSLFRPQLSPQFPNQLPSVLQARLLSTETKAAIDKAVASAPVVLFMKGTPETPQCGFSRASIQILGLQGVDPKKFVAFNVLEDPELRQGIKEYSDWPTIPQLYLNKEFIGGCDILMSMHQNGELSKLLEEKGVLVAE

SEQ ID NO: 4992 - DNA, 690 bp, Candida albicans SC5314; identical to SEQ ID NO: 2631
  CDS (1)..(690): transl_table=12

SEQ ID NO: 4993 - protein, 229 aa, Candida albicans SC5314; identical to SEQ ID NO: 2632

SEQ ID NO: 4994 - DNA, 528 bp, Candida albicans SC5314
  CDS (1)..(528): transl_table=12
atgtttagaagatcgttattatcaacatcaagatttatcaacaagtcatcatcatcattatcacctggtttattattgaataatttccgtggcaatttccaacaatcacgatttatatccactgaattaaaagatgcattagataaagctgttactacatcccccgtagttttatttatgaaaggtacaccagaattcccacaatgtggattttctcgagccactattcaaattttaggtcaacaaggagttgatccggaaaaatttgctgcttataatgtattagaagattctgaattacgtgaaggaataaaagaatatagttcatggccaacaattcctcaattatatgttaatggagaatttattggtggttgtgatattatcactagtatggcccaaaatggagaattggcagaattattagaagaactgaatgcattaattcctgaagaaaatgaaccaacaacatctgaagaaaatcaagagacggttcaatcagccaatattaaaccaaatagaaattaa

SEQ ID NO: 4995 - protein, 175 aa, Candida albicans SC5314
MFRRSLLSTSRFINKSSSSLSPGLLLNNFRGNFQQSRFISTELKDALDKAVTTSPVVLFMKGTPEFPQCGFSRATIQILGQQGVDPEKFAAYNVLEDSELREGIKEYSSWPTIPQLYVNGEFIGGCDIITSMAQNGELAELLEESNALIPEENEPTTSEENQETVQSANIKPNRN

SEQ ID NO: 4996 - DNA, 360 bp, Candida albicans SC5314; identical to SEQ ID NO: 2633
  CDS (1)..(360): transl_table=12

SEQ ID NO: 4997 - protein, 119 aa, Candida albicans SC5314; identical to SEQ ID NO: 2634

SEQ ID NO: 4998 - DNA, 489 bp, Ustilago maydis 521; identical to SEQ ID NO: 3331
  CDS (1)..(489)

SEQ ID NO: 4999 - protein, 162 aa, Ustilago maydis 521; identical to SEQ ID NO: 3332

SEQ ID NO: 5000 - DNA, 309 bp, Ustilago maydis 521; identical to SEQ ID NO: 2635
  CDS (1)..(309)

SEQ ID NO: 5001 - protein, 102 aa, Ustilago maydis 521; identical to SEQ ID NO: 2636

SEQ ID NO: 5002 - DNA, 384 bp, Candida albicans SC5314; identical to SEQ ID NO: 3720
  CDS (1)..(384): transl_table=12

SEQ ID NO: 5003 - protein, 127 aa, Candida albicans SC5314; identical to SEQ ID NO: 3721

SEQ ID NO: 5004 - DNA, 471 bp, Candida albicans SC5314; identical to SEQ ID NO: 2639
  CDS (1)..(471): transl_table=12

SEQ ID NO: 5005 - protein, 156 aa, Candida albicans SC5314; identical to SEQ ID NO: 2640

SEQ ID NO: 5006 - DNA, 450 bp, Tribolium castaneum; identical to SEQ ID NO: 3337
  CDS (1)..(450)

SEQ ID NO: 5007 - protein, 149 aa, Tribolium castaneum; identical to SEQ ID NO: 3338

SEQ ID NO: 5008 - DNA, 330 bp, Azoarcus sp. EbN1; identical to SEQ ID NO: 3726
  CDS (1)..(330): transl_table=11

SEQ ID NO: 5009 - protein, 109 aa, Azoarcus sp. EbN1; identical to SEQ ID NO: 3727

SEQ ID NO: 5010 - DNA, 261 bp, Silicibacter pomeroyi DSS-3
  CDS (1)..(261): transl_table=11
atgaaacccgtcgaaatctatacctcaccgctctgcggttactgccacgcggccaagcggctgctggaccagaagggcatcgcctttaccgaaatcgacgtgctcaccaaccccaagcgcaagcccgagatgatccagcgcgcgggcgggcgccgcacggtgccgcagatcttcatcgatggacagcatgtgggcggctgcgacgatctctatgcgctggaacaggacggcaagctcgacccgatgctggcctcgagatga

SEQ ID NO: 5011 - protein, 86 aa, Silicibacter pomeroyi DSS-3
MKPVEIYTSPLCGYCHAAKRLLDQKGIAFTEIDVLTNPKRKPEMIQRAGGRRTVPQIFIDGQHVGGCDDLYALEQDGKLDPMLASR

SEQ ID NO: 5012 - DNA, 330 bp, Alkalilimnicola ehrlichei MLHE-1
  CDS (1)..(330): transl_table=11
atggatcaggtgcaggaaaccatcgccaagcaagtcaaggaaaaccccattctgctctacatgaagggctctccccagcagccgcagtgcggcttctccatgcgcgcggcgcaggcgctggccggctgcggcaaggagttcgcttacgtggacgtgctgcaggacgaggccattcgccaggggatcaaggagttcggcaactggccgaccatcccgcagctctacctcaacggcgagctggtgggcggctgcgacatcatcatggagatgtacgaaagcggcgatctgcagaagatggtcgaccaggccgcggaaagcgccagcaactga

SEQ ID NO: 5013 - protein, 109 aa, Alkalilimnicola ehrlichei MLHE-1
MDQVQETIAKQVKENPILLYMKGSPQQPQCGFSMRAAQALAGCGKEFAYVDVLQDEAIRQGIKEFGNWPTIPQLYLNGELVGGCDIIMEMYESGDLQKMVDQAAESASN

SEQ ID NO: 5014 - DNA, 258 bp, Magnetospirillum magnetotacticum MS-1
  CDS (1)..(258): transl_table=11
atgcagccggtcacgatctacaccacggcctggtgcccctattgctccgcagccaagaccctgctgcgcgacaagggcgtgaccttcaccgagatcgacgtcgagaagacggccggcgcccgcgcgaccatggttcagcgggcgggcgggcgcacctccgtgccgcagatcttcgtcggcgacaaacatgtcggcggctgcgacgacctctatgccctggaccgggccggcgggctcgacccgctgctcgcggcatga

SEQ ID NO: 5015 - protein, 85 aa, Magnetospirillum magnetotacticum MS-1
MQPVTIYTTAWCPYCSAAKTLLRDKGVTFTEIDVEKTAGARATMVQRAGGRTSVPQIFVGDKHVGGCDDLYALDRAGGLDPLLAA

SEQ ID NO: 5016 - DNA, 324 bp, Crocosphaera watsonii WH 8501; identical to SEQ ID NO: 3339
  CDS (1)..(324): transl_table=11

SEQ ID NO: 5017 - protein, 107 aa, Crocosphaera watsonii WH 8501; identical to SEQ ID NO: 3340

SEQ ID NO: 5018 - DNA, 255 bp, Oceanicola batsensis HTCC2597
  CDS (1)..(255): transl_table=11
atgaaacctgttgaaatctacaccacccccatctgcggcttctgcagcgccgccaagcgcctgctcgacggcaagggcgtcgactatagggaaatcgacgtcatgcgcgaccgcgagaaaaagcaggagatgatgcagcgggccggccgtcatacggtgccgcagatcttcatcgacggccagcatgtcggcggatgcgacgagctttacgaactggagcgggcgggcaagctcgacccgatgctgaccgcgtga

SEQ ID NO: 5019 - protein, 84 aa, Oceanicola batsensis HTCC2597
MKPVEIYTTPICGFCSAAKRLLDGKGVDYREIDVMRDREKKQEMMQRAGRHTVPQIFIDGQHVGGCDELYELERAGKLDPMLTA

SEQ ID NO: 5020 - DNA, 264 bp, Erythrobacter sp. SD-21
  CDS (1)..(264): transl_table=11
atgagccagcctcatatcgacatctacacaaagttcggctgcggcttttgcgtccgcgccaagcgcctgctcgacgagaagggtgccgactatcacgagcatgacatcaccatgggcggccccaagcgtgaggaaatgctccagcgcgcgcctcaggctcgcacggtgccacaaatcttcatcggcgagacccatgtcggcggttcggacgagctcgccgcgctggaacggtcgggcaagctcgacccgctgctcgaaggctga

SEQ ID NO: 5021 - protein, 87 aa, Erythrobacter sp. SD-21
MSQPHIDIYTKFGCGFCVRAKRLLDEKGADYHEHDITMGGPKREEMLQRAPQARTVPQIFIGETHVGGSDELAALERSGKLDPLLEG

SEQ ID NO: 5022 - DNA, 384 bp, Medicago truncatula; identical to SEQ ID NO: 2643
  CDS (1)..(384)

SEQ ID NO: 5023 - protein, 127 aa, Medicago truncatula; identical to SEQ ID NO: 2644

SEQ ID NO: 5024 - DNA, 306 bp, Vitis vinifera; identical to SEQ ID NO: 2645
  CDS (1)..(306)
  misc_feature (225)..(225): r is g or a
  misc_feature (273)..(273): y is t or c

SEQ ID NO: 5025 - protein, 101 aa, Vitis vinifera; identical to SEQ ID NO: 2646

SEQ ID NO: 5026 - DNA, 324 bp, Vitis vinifera; identical to SEQ ID NO: 2647
  CDS (1)..(324)

SEQ ID NO: 5027 - protein, 107 aa, Vitis vinifera; identical to SEQ ID NO: 2648

SEQ ID NO: 5028 - DNA, 321 bp, Vitis vinifera; identical to SEQ ID NO: 2649
  CDS (1)..(321)

SEQ ID NO: 5029 - protein, 106 aa, Vitis vinifera; identical to SEQ ID NO: 2650

SEQ ID NO: 5030 - DNA, 345 bp, Vitis vinifera; identical to SEQ ID NO: 2651
  CDS (1)..(345)

SEQ ID NO: 5031 - protein, 114 aa, Vitis vinifera; identical to SEQ ID NO: 2652

SEQ ID NO: 5032 - DNA, 414 bp, Vitis vinifera; identical to SEQ ID NO: 2653
  CDS (1)..(414)
  misc_feature (18)..(18): y is t or c
  misc_feature (63)..(63): m is a or c

SEQ ID NO: 5033 - protein, 137 aa, Vitis vinifera; identical to SEQ ID NO: 2654

SEQ ID NO: 5034 - DNA, 315 bp, Fritillaria agrestis; identical to SEQ ID NO: 2655
  CDS (1)..(315)

SEQ ID NO: 5035 - protein, 104 aa, Fritillaria agrestis; identical to SEQ ID NO: 2656

SEQ ID NO: 5036 - DNA, 402 bp, Thellungiella halophila; identical to SEQ ID NO: 2657
  CDS (1)..(402)

SEQ ID NO: 5037 - protein, 133 aa, Thellungiella halophila; identical to SEQ ID NO: 2658

SEQ ID NO: 5038 - DNA, 309 bp, Plantago major; identical to SEQ ID NO: 2659
  CDS (1)..(309)

SEQ ID NO: 5039 - protein, 102 aa, Plantago major; identical to SEQ ID NO: 2660

SEQ ID NO: 5040 - DNA, 312 bp, Musa acuminata; identical to SEQ ID NO: 3023
  CDS (1)..(312)

SEQ ID NO: 5041 - protein, 103 aa, Musa acuminata; identical to SEQ ID NO: 3024

SEQ ID NO: 5042 - DNA, 312 bp, Musa acuminata; identical to SEQ ID NO: 2661
  CDS (1)..(312)

SEQ ID NO: 5043 - protein, 103 aa, Musa acuminata; identical to SEQ ID NO: 2662

SEQ ID NO: 5044 - DNA, 357 bp, Medicago truncatula; identical to SEQ ID NO: 2665
  CDS (1)..(357)

SEQ ID NO: 5045 - protein, 118 aa, Medicago truncatula; identical to SEQ ID NO: 2666

SEQ ID NO: 5046 - DNA, 384 bp, Medicago truncatula; identical to SEQ ID NO: 2667
  CDS (1)..(384)

SEQ ID NO: 5047 - protein, 127 aa, Medicago truncatula; identical to SEQ ID NO: 2668

SEQ ID NO: 5048 - DNA, 366 bp, Medicago truncatula; identical to SEQ ID NO: 2669
  CDS (1)..(366)

SEQ ID NO: 5049 - protein, 121 aa, Medicago truncatula; identical to SEQ ID NO: 2670

SEQ ID NO: 5050 - DNA, 399 bp, Beta vulgaris; identical to SEQ ID NO: 2671
  CDS (1)..(399)

SEQ ID NO: 5051 - protein, 132 aa, Beta vulgaris; identical to SEQ ID NO: 2672

SEQ ID NO: 5052 - DNA, 321 bp, Beta vulgaris; identical to SEQ ID NO: 2673
  CDS (1)..(321)

SEQ ID NO: 5053 - protein, 106 aa, Beta vulgaris; identical to SEQ ID NO: 2674

SEQ ID NO: 5054 - DNA, 309 bp, Beta vulgaris; identical to SEQ ID NO: 2675
  CDS (1)..(309)

SEQ ID NO: 5055 - protein, 102 aa, Beta vulgaris; identical to SEQ ID NO: 2676

SEQ ID NO: 5056 - DNA, 309 bp, Beta vulgaris; identical to SEQ ID NO: 2677
  CDS (1)..(309)

SEQ ID NO: 5057 - protein, 102 aa, Beta vulgaris; identical to SEQ ID NO: 2678

SEQ ID NO: 5058 - DNA, 309 bp, Beta vulgaris; identical to SEQ ID NO: 2679
  CDS (1)..(309)

SEQ ID NO: 5059 - protein, 102 aa, Beta vulgaris; identical to SEQ ID NO: 2680

SEQ ID NO: 5060 - DNA, 456 bp, Aspergillus oryzae
  CDS (1)..(456)
atgttctcaagagtggctttctcgtcggcattccgaccgctttcgcggccacagtcgctgccgctacgaccctatggttttcagttaccatctgccctttacgctcgactactctcatctgagacgaaatcggccattgataaagccattgcatctgccccggttgtccttttcatgaagggtacccccgagactcctcagtgtggcttctcgcgagcaagtatccagatcttgggcttgcaaggggtggatcccaagaagtttgtcgcattcaacgtgctggaggatgctgaattgcgtcagggtatcaaagaatactccgactggccaaccatcccacagttatacttggataaggagtttgttggtggctgtgatattctaatgtctatgcatcagaatggggaacttgcaaaattgcttgaagacaagaatgttctggtggcggctgactaa

SEQ ID NO: 5061 - protein, 151 aa, Aspergillus oryzae
MFSRVAFSSAFRPLSRPQSLPLRPYGFQLPSALYARLLSSETKSAIDKAIASAPVVLFMKGTPETPQCGFSRASIQILGLQGVDPKKFVAFNVLEDAELRQGIKEYSDWPTIPQLYLDKEFVGGCDILMSMHQNGELAKLLEDKNVLVAAD

SEQ ID NO: 5062 - DNA, 492 bp, Aspergillus oryzae; identical to SEQ ID NO: 2681
  CDS (1)..(492)

SEQ ID NO: 5063 - protein, 163 aa, Aspergillus oryzae; identical to SEQ ID NO: 2682

SEQ ID NO: 5064 - DNA, 309 bp, Aspergillus oryzae; identical to SEQ ID NO: 2683
  CDS (1)..(309)

SEQ ID NO: 5065 - protein, 102 aa, Aspergillus oryzae; identical to SEQ ID NO: 2684

SEQ ID NO: 5066 - DNA, 381 bp, Populus tremula x Populus tremuloides; identical to SEQ ID NO: 2685
  CDS (1)..(381)

SEQ ID NO: 5067 - protein, 126 aa, Populus tremula x Populus tremuloides; identical to SEQ ID NO: 2686

SEQ ID NO: 5068 - DNA, 318 bp, Plantago major; identical to SEQ ID NO: 2687
  CDS (1)..(318)

SEQ ID NO: 5069 - protein, 105 aa, Plantago major; identical to SEQ ID NO: 2688

SEQ ID NO: 5070 - DNA, 342 bp, Triticum aestivum; identical to SEQ ID NO: 2689
  CDS (1)..(342)

SEQ ID NO: 5071 - protein, 113 aa, Triticum aestivum; identical to SEQ ID NO: 2690

SEQ ID NO: 5072 - DNA, 348 bp, Tilia platyphyllos; identical to SEQ ID NO: 2693
  CDS (1)..(348)

SEQ ID NO: 5073 - protein, 115 aa, Tilia platyphyllos; identical to SEQ ID NO: 2694

SEQ ID NO: 5074 - DNA, 342 bp, Deschampsia antarctica; identical to SEQ ID NO: 2695
  CDS (1)..(342)

SEQ ID NO: 5075 - protein, 113 aa, Deschampsia antarctica; identical to SEQ ID NO: 2696

SEQ ID NO: 5076 - DNA, 306 bp, Schizosaccharomyces pombe; identical to SEQ ID NO: 2697
  CDS (1)..(306)

SEQ ID NO: 5077 - protein, 101 aa, Schizosaccharomyces pombe; identical to SEQ ID NO: 2698

SEQ ID NO: 5078 - DNA, 333 bp, Schizosaccharomyces pombe; identical to SEQ ID NO: 2699
  CDS (1)..(333)

SEQ ID NO: 5079 - protein, 110 aa, Schizosaccharomyces pombe; identical to SEQ ID NO: 2700

SEQ ID NO: 5080 - DNA, 441 bp, Schizosaccharomyces pombe
  CDS (1)..(441)
atgaattcgatgtttagattttggattcctaaaaccagtatatccatgcaacttcgcatgctgtccacacaaactcgtcaagctcttgaacaggccgtcaaagaggatcctatcgttttattcatgaaaggtacacctacccgcccaatgtgtggattttcattaaaggcgattcaaattctttcattagaaaacgttgcttccgataaattagttacgtacaacgttttgagtaatgatgagctacgtgaaggtataaaggagttcagcgactggcctacgattcctcaactttatattaacggagaattcgtgggcggtagtgatatcttggcgtccatgcataaatcaggagagcttcacaaaattctaaaagaaataaatgctttggcccctgaacagccaaaggatagtgaagaggaaactactaaaaaggattga

SEQ ID NO: 5081 - protein, 146 aa, Schizosaccharomyces pombe
MNSMFRFWIPKTSISMQLRMLSTQTRQALEQAVKEDPIVLFMKGTPTRPMCGFSLKAIQILSLENVASDKLVTYNVLSNDELREGIKEFSDWPTIPQLYINGEFVGGSDILASMHKSGELHKILKEINALAPEQPKDSEEETTKKD

SEQ ID NO: 5082 - DNA, 612 bp, Saccharomyces cerevisiae; identical to SEQ ID NO: 3796
  CDS (1)..(612)

SEQ ID NO: 5083 - protein, 203 aa, Saccharomyces cerevisiae; identical to SEQ ID NO: 3797

SEQ ID NO: 5084 - DNA, 327 bp, Solanum lycopersicum; identical to SEQ ID NO: 2701
  CDS (1)..(327)

SEQ ID NO: 5085 - protein, 108 aa, Solanum lycopersicum; identical to SEQ ID NO: 2702

SEQ ID NO: 5086 - DNA, 315 bp, Vernicia fordii; identical to SEQ ID NO: 2703
  CDS (1)..(315)

SEQ ID NO: 5087 - protein, 104 aa, Vernicia fordii; identical to SEQ ID NO: 2704

SEQ ID NO: 5088 - DNA, 447 bp, Arabidopsis thaliana; identical to SEQ ID NO: 2705
  CDS (1)..(447)

SEQ ID NO: 5089 - protein, 148 aa, Arabidopsis thaliana; identical to SEQ ID NO: 2706

SEQ ID NO: 5090 - DNA, 312 bp, Arabidopsis thaliana; identical to SEQ ID NO: 2707
  CDS (1)..(312)

SEQ ID NO: 5091 - protein, 103 aa, Arabidopsis thaliana; identical to SEQ ID NO: 2708

SEQ ID NO: 5092 - DNA, 312 bp, Arabidopsis thaliana; identical to SEQ ID NO: 2709
  CDS (1)..(312)

SEQ ID NO: 5093 - protein, 103 aa, Arabidopsis thaliana; identical to SEQ ID NO: 2710

SEQ ID NO: 5094 - DNA, 309 bp, Arabidopsis thaliana; identical to SEQ ID NO: 2711
  CDS (1)..(309)

SEQ ID NO: 5095 - protein, 102 aa, Arabidopsis thaliana; identical to SEQ ID NO: 2712

SEQ ID NO: 5096 - DNA, 309 bp, Arabidopsis thaliana; identical to SEQ ID NO: 2713
  CDS (1)..(309)

SEQ ID NO: 5097 - protein, 102 aa, Arabidopsis thaliana; identical to SEQ ID NO: 2714

SEQ ID NO: 5098 - DNA, 300 bp, Arabidopsis thaliana; identical to SEQ ID NO: 2715
  CDS (1)..(300)

SEQ ID NO: 5099 - protein, 99 aa, Arabidopsis thaliana; identical to SEQ ID NO: 2716

SEQ ID NO: 5100 - DNA, 540 bp, Arabidopsis thaliana; identical to SEQ ID NO: 2717
  CDS (1)..(540)

SEQ ID NO: 5101 - protein, 179 aa, Arabidopsis thaliana; identical to SEQ ID NO: 2718

SEQ ID NO: 5102 - DNA, 453 bp, Arabidopsis thaliana; identical to SEQ ID NO: 2719
  CDS (1)..(453)

SEQ ID NO: 5103 - protein, 150 aa, Arabidopsis thaliana; identical to SEQ ID NO: 2720

SEQ ID NO: 5104 - DNA, 378 bp, Arabidopsis thaliana; identical to SEQ ID NO: 2721
  CDS (1)..(378)

SEQ ID NO: 5105 - protein, 125 aa, Arabidopsis thaliana; identical to SEQ ID NO: 2722

SEQ ID NO: 5106 - DNA, 336 bp, Arabidopsis thaliana; identical to SEQ ID NO: 2723
  CDS (1)..(336)

SEQ ID NO: 5107 - protein, 111 aa, Arabidopsis thaliana; identical to SEQ ID NO: 2724

SEQ ID NO: 5108 - DNA, 393 bp, Arabidopsis thaliana; identical to SEQ ID NO: 2725
  CDS (1)..(393)

SEQ ID NO: 5109 - protein, 130 aa, Arabidopsis thaliana; identical to SEQ ID NO: 2726

SEQ ID NO: 5110 - DNA, 408 bp, Oryza sativa subsp; identical to SEQ ID NO: 2761
  CDS (1)..(408)

SEQ ID NO: 5111 - protein, 135 aa, Oryza sativa subsp; identical to SEQ ID NO: 2762

SEQ ID NO: 5112 - DNA, 408 bp, Arabidopsis thaliana; identical to SEQ ID NO: 2727
  CDS (1)..(408)

SEQ ID NO: 5113 - protein, 135 aa, Arabidopsis thaliana; identical to SEQ ID NO: 2728

SEQ ID NO: 5114 - DNA, 525 bp, Arabidopsis thaliana; identical to SEQ ID NO: 2729
  CDS (1)..(525)

SEQ ID NO: 5115 - protein, 174 aa, Arabidopsis thaliana; identical to SEQ ID NO: 2730

SEQ ID NO: 5116 - DNA, 435 bp, Arabidopsis thaliana; identical to SEQ ID NO: 2731
  CDS (1)..(435)

SEQ ID NO: 5117 - protein, 144 aa, Arabidopsis thaliana; identical to SEQ ID NO: 2732

SEQ ID NO: 5118 - DNA, 411 bp, Arabidopsis thaliana; identical to SEQ ID NO: 2733
  CDS (1)..(411)

SEQ ID NO: 5119 - protein, 136 aa, Arabidopsis thaliana; identical to SEQ ID NO: 2734

SEQ ID NO: 5120 - DNA, 423 bp, Arabidopsis thaliana; identical to SEQ ID NO: 2735
  CDS (1)..(423)

SEQ ID NO: 5121 - protein, 140 aa, Arabidopsis thaliana; identical to SEQ ID NO: 2736

SEQ ID NO: 5122 - DNA, 414 bp, Arabidopsis thaliana; identical to SEQ ID NO: 2737
  CDS (1)..(414)

SEQ ID NO: 5123 - protein, 137 aa, Arabidopsis thaliana; identical to SEQ ID NO: 2738

SEQ ID NO: 5124 - DNA, 309 bp, Arabidopsis thaliana; identical to SEQ ID NO: 2741
  CDS (1)..(309)

SEQ ID NO: 5125 - protein, 102 aa, Arabidopsis thaliana; identical to SEQ ID NO: 2742

SEQ ID NO: 5126 - DNA, 309 bp, Arabidopsis thaliana; identical to SEQ ID NO: 2743
  CDS (1)..(309)

SEQ ID NO: 5127 - protein, 102 aa, Arabidopsis thaliana; identical to SEQ ID NO: 2744

SEQ ID NO: 5128 - DNA, 309 bp, Arabidopsis thaliana; identical to SEQ ID NO: 2745
  CDS (1)..(309)

SEQ ID NO: 5129 - protein, 102 aa, Arabidopsis thaliana; identical to SEQ ID NO: 2746

SEQ ID NO: 5130 - DNA, 309 bp, Arabidopsis thaliana; identical to SEQ ID NO: 2573
  CDS (1)..(309)

SEQ ID NO: 5131 - protein, 102 aa, Arabidopsis thaliana; identical to SEQ ID NO: 2574

SEQ ID NO: 5132 - DNA, 309 bp, Arabidopsis thaliana; identical to SEQ ID NO: 2747
  CDS (1)..(309)

SEQ ID NO: 5133 - protein, 102 aa, Arabidopsis thaliana; identical to SEQ ID NO: 2748

SEQ ID NO: 5134 - DNA, 309 bp, Arabidopsis thaliana; identical to SEQ ID NO: 2749
  CDS (1)..(309)

SEQ ID NO: 5135 - protein, 102 aa, Arabidopsis thaliana; identical to SEQ ID NO: 2750

SEQ ID NO: 5136 - DNA, 309 bp, Arabidopsis thaliana; identical to SEQ ID NO: 2751
  CDS (1)..(309)

SEQ ID NO: 5137 - protein, 102 aa, Arabidopsis thaliana; identical to SEQ ID NO: 2752

SEQ ID NO: 5138 - DNA, 696 bp, Saccharomyces cerevisiae
  CDS (1)..(696)
atgataccttccaataagagaaatgctagaattttaagcattacaacgctattattgttgttagtgtttttcgtagcgcaaaatgcgaacttcttgacggtagagataaaagaggaaacttctaaagcatttagtactaatatggacaatatggctggaggatcttccagggaatatgctgctatgccgacttctaccacgaataaggggagctctgaagtagacgaagaaattaatgaaataaaacagaaggtgggactccaacagcccatagcatcggttgatgatagtttgtcggccattaaaaacgataaagggtcgcgaataaccaaagcttttaatgttcaaaaagaatactccctcatactagacttgtctccgattataatatttagtaaaagcacctgttcatatagcaagggcatgaaggaactgcttgaaaatgagtatcagtttatcccaaactactatattatagaacttgacaaacatggacatggggaagagctgcaagaatatatcaagttggtgaccggtagaggaactgttccaaaccttttggttaatggagtatcaagaggaggtaatgaagaaatcaagaaactgcacactcaagggaaacttttagaatcattacaagtctggagtgatggtaaattctcggttgagcaacgtgaaaaaccttccaataattga

SEQ ID NO: 5139 - protein, 231 aa, Saccharomyces cerevisiae
MIPSNKRNARILSITTLLLLLVFFVAQNANFLTVEIKEETSKAFSTNMDNMAGGSSREYAAMPTSTTNKGSSEVDEEINEIKQKVGLQQPIASVDDSLSAIKNDKGSRITKAFNVQKEYSLILDLSPIIIFSKSTCSYSKGMKELLENEYQFIPNYYIIELDKHGHGEELQEYIKLVTGRGTVPNLLVNGVSRGGNEEIKKLHTQGKLLESLQVWSDGKFSVEQREKPSNN

SEQ ID NO: 5140 - DNA, 378 bp, Oryza sativa; identical to SEQ ID NO: 2753
  CDS (1)..(378)

SEQ ID NO: 5141 - protein, 125 aa, Oryza sativa; identical to SEQ ID NO: 2754

SEQ ID NO: 5142 - DNA, 411 bp, Oryza sativa; identical to SEQ ID NO: 3119
  CDS (1)..(411)

SEQ ID NO: 5143 - protein, 136 aa, Oryza sativa; identical to SEQ ID NO: 3120

SEQ ID NO: 5144 - DNA, 312 bp, Oryza sativa; identical to SEQ ID NO: 2755
  CDS (1)..(312)

SEQ ID NO: 5145 - protein, 103 aa, Oryza sativa; identical to SEQ ID NO: 2756

SEQ ID NO: 5146 - DNA, 444 bp, Oryza sativa; identical to SEQ ID NO: 2757
  CDS (1)..(444)

SEQ ID NO: 5147 - protein, 147 aa, Oryza sativa; identical to SEQ ID NO: 2758

SEQ ID NO: 5148 - DNA, 378 bp, Oryza sativa; identical to SEQ ID NO: 2759
  CDS (1)..(378)

SEQ ID NO: 5149 - protein, 125 aa, Oryza sativa; identical to SEQ ID NO: 2760

SEQ ID NO: 5150 - DNA, 402 bp, Oryza sativa; identical to SEQ ID NO: 2763
  CDS (1)..(402)

SEQ ID NO: 5151 - protein, 133 aa, Oryza sativa; identical to SEQ ID NO: 2764

SEQ ID NO: 5152 - DNA, 396 bp, Oryza sativa; identical to SEQ ID NO: 3111
  CDS (1)..(396)

SEQ ID NO: 5153 - protein, 131 aa, Oryza sativa; identical to SEQ ID NO: 3112

SEQ ID NO: 5154 - DNA, 408 bp, Oryza sativa; identical to SEQ ID NO: 2765
  CDS (1)..(408)

SEQ ID NO: 5155 - protein, 135 aa, Oryza sativa; identical to SEQ ID NO: 2766

SEQ ID NO: 5156 - DNA, 384 bp, Oryza sativa; identical to SEQ ID NO: 2767
  CDS (1)..(384)

SEQ ID NO: 5157 - protein, 127 aa, Oryza sativa; identical to SEQ ID NO: 2768

SEQ ID NO: 5158 - DNA, 345 bp, Oryza sativa; identical to SEQ ID NO: 2769
  CDS (1)..(345)

SEQ ID NO: 5159 - protein, 114 aa, Oryza sativa; identical to SEQ ID NO: 2770

SEQ ID NO: 5160 - DNA, 417 bp, Oryza sativa; identical to SEQ ID NO: 2771
  CDS (1)..(417)

SEQ ID NO: 5161 - protein, 138 aa, Oryza sativa; identical to SEQ ID NO: 2772

SEQ ID NO: 5162 - DNA, 399 bp, Oryza sativa; identical to SEQ ID NO: 2773
  CDS (1)..(399)

SEQ ID NO: 5163 - protein, 132 aa, Oryza sativa; identical to SEQ ID NO: 2774

SEQ ID NO: 5164 - DNA, 411 bp, Oryza sativa; identical to SEQ ID NO: 2775
  CDS (1)..(411)

SEQ ID NO: 5165 - protein, 136 aa, Oryza sativa; identical to SEQ ID NO: 2776

SEQ ID NO: 5166 - DNA, 579 bp, Oryza sativa; identical to SEQ ID NO: 2777
  CDS (1)..(579)

SEQ ID NO: 5167 - protein, 192 aa, Oryza sativa; identical to SEQ ID NO: 2778

SEQ ID NO: 5168 - DNA, 495 bp, Oryza sativa; identical to SEQ ID NO: 2779
  CDS (1)..(495)

SEQ ID NO: 5169 - protein, 164 aa, Oryza sativa; identical to SEQ ID NO: 2780

SEQ ID NO: 5170 - DNA, 327 bp, Oryza sativa; identical to SEQ ID NO: 2781
  CDS (1)..(327)

SEQ ID NO: 5171 - protein, 108 aa, Oryza sativa; identical to SEQ ID NO: 2782

SEQ ID NO: 5172 - DNA, 330 bp, Oryza sativa; identical to SEQ ID NO: 2783
  CDS (1)..(330)

SEQ ID NO: 5173 - protein, 109 aa, Oryza sativa; identical to SEQ ID NO: 2784

SEQ ID NO: 5174 - DNA, 330 bp, Oryza sativa; identical to SEQ ID NO: 2785
  CDS (1)..(330)

SEQ ID NO: 5175 - protein, 109 aa, Oryza sativa; identical to SEQ ID NO: 2786

SEQ ID NO: 5176 - DNA, 330 bp, Oryza sativa; identical to SEQ ID NO: 2787
  CDS (1)..(330)

SEQ ID NO: 5177 - protein, 109 aa, Oryza sativa; identical to SEQ ID NO: 2788

SEQ ID NO: 5178 - DNA, 312 bp, Oryza sativa; identical to SEQ ID NO: 2789
  CDS (1)..(312)

SEQ ID NO: 5179 - protein, 103 aa, Oryza sativa; identical to SEQ ID NO: 2790

SEQ ID NO: 5180 - DNA, 315 bp, Oryza sativa; identical to SEQ ID NO: 2791
  CDS (1)..(315)

SEQ ID NO: 5181 - protein, 104 aa, Oryza sativa; identical to SEQ ID NO: 2792

SEQ ID NO: 5182 - DNA, 309 bp, Brassica napus; identical to SEQ ID NO: 2793
  CDS (1)..(309)

SEQ ID NO: 5183 - protein, 102 aa, Brassica napus; identical to SEQ ID NO: 2794

SEQ ID NO: 5184 - DNA, 537 bp, Brassica napus; identical to SEQ ID NO: 3157
  CDS (1)..(537)

SEQ ID NO: 5185 - protein, 178 aa, Brassica napus; identical to SEQ ID NO: 3158

SEQ ID NO: 5186 - DNA, 309 bp, Brassica napus; identical to SEQ ID NO: 2795
  CDS (1)..(309)

SEQ ID NO: 5187 - protein, 102 aa, Brassica napus; identical to SEQ ID NO: 2796

SEQ ID NO: 5188 - DNA, 309 bp, Brassica napus; identical to SEQ ID NO: 2797
  CDS (1)..(309)

SEQ ID NO: 5189 - protein, 102 aa, Brassica napus; identical to SEQ ID NO: 2798

SEQ ID NO: 5190 - DNA, 309 bp, Brassica napus; identical to SEQ ID NO: 2799
  CDS (1)..(309)

SEQ ID NO: 5191 - protein, 102 aa, Brassica napus; identical to SEQ ID NO: 2800

SEQ ID NO: 5192 - DNA, 309 bp, Brassica napus; identical to SEQ ID NO: 2801
  CDS (1)..(309)

SEQ ID NO: 5193 - protein, 102 aa, Brassica napus; identical to SEQ ID NO: 2802

SEQ ID NO: 5194 - DNA, 318 bp, Brassica napus; identical to SEQ ID NO: 2803
  CDS (1)..(318)

SEQ ID NO: 5195 - protein, 105 aa, Brassica napus; identical to SEQ ID NO: 2804

SEQ ID NO: 5196 - DNA, 300 bp, Brassica napus; identical to SEQ ID NO: 2805
  CDS (1)..(300)

SEQ ID NO: 5197 - protein, 99 aa, Brassica napus; identical to SEQ ID NO: 2806

SEQ ID NO: 5198 - DNA, 309 bp, Brassica napus; identical to SEQ ID NO: 2807
  CDS (1)..(309)

SEQ ID NO: 5199 - protein, 102 aa, Brassica napus; identical to SEQ ID NO: 2808

SEQ ID NO: 5200 - DNA, 519 bp, Brassica napus; identical to SEQ ID NO: 2809
  CDS (1)..(519)

SEQ ID NO: 5201 - protein, 172 aa, Brassica napus; identical to SEQ ID NO: 2810

SEQ ID NO: 5202 - DNA, 306 bp, Glycine max; identical to SEQ ID NO: 2811
  CDS (1)..(306)

SEQ ID NO: 5203 - protein, 101 aa, Glycine max; identical to SEQ ID NO: 2812

SEQ ID NO: 5204 - DNA, 315 bp, Triticum aestivum; identical to SEQ ID NO: 2813
  CDS (1)..(315)

SEQ ID NO: 5205 - protein, 104 aa, Triticum aestivum; identical to SEQ ID NO: 2814

SEQ ID NO: 5206 - DNA, 309 bp, Brassica napus; identical to SEQ ID NO: 2817
  CDS (1)..(309)

SEQ ID NO: 5207 - protein, 102 aa, Brassica napus; identical to SEQ ID NO: 2818

SEQ ID NO: 5208 - DNA, 309 bp, Brassica napus; identical to SEQ ID NO: 2819
  CDS (1)..(309)

SEQ ID NO: 5209 - protein, 102 aa, Brassica napus; identical to SEQ ID NO: 2820

SEQ ID NO: 5210 - DNA, 399 bp, Glycine max; identical to SEQ ID NO: 2821
  CDS (1)..(399)

SEQ ID NO: 5211 - protein, 132 aa, Glycine max; identical to SEQ ID NO: 2822

SEQ ID NO: 5212 - DNA, 312 bp, Triticum aestivum; identical to SEQ ID NO: 2823
  CDS (1)..(312)

SEQ ID NO: 5213 - protein, 103 aa, Triticum aestivum; identical to SEQ ID NO: 2824

SEQ ID NO: 5214 - DNA, 414 bp, Triticum aestivum; identical to SEQ ID NO: 2825
  CDS (1)..(414)

SEQ ID NO: 5215 - protein, 137 aa, Triticum aestivum; identical to SEQ ID NO: 2826

SEQ ID NO: 5216 - DNA, 414 bp, Zea mays; identical to SEQ ID NO: 2827
  CDS (1)..(414)

SEQ ID NO: 5217 - protein, 137 aa, Zea mays; identical to SEQ ID NO: 2828

SEQ ID NO: 5218 - DNA, 468 bp, Zea mays; identical to SEQ ID NO: 2829
  CDS (1)..(468)

SEQ ID NO: 5219 - protein, 155 aa, Zea mays; identical to SEQ ID NO: 2830

SEQ ID NO: 5220 - DNA, 504 bp, Zea mays; identical to SEQ ID NO: 2831
  CDS (1)..(504)

SEQ ID NO: 5221 - protein, 167 aa, Zea mays; identical to SEQ ID NO: 2832

SEQ ID NO: 5222 - DNA, 312 bp, Hordeum vulgare; identical to SEQ ID NO: 2833
  CDS (1)..(312)

SEQ ID NO: 5223 - protein, 103 aa, Hordeum vulgare; identical to SEQ ID NO: 2834

SEQ ID NO: 5224 - DNA, 393 bp, Hordeum vulgare; identical to SEQ ID NO: 2835
  CDS (1)..(393)

SEQ ID NO: 5225 - protein, 130 aa, Hordeum vulgare; identical to SEQ ID NO: 2836

SEQ ID NO: 5226 - DNA, 378 bp, Brassica napus; identical to SEQ ID NO: 2837
  CDS (1)..(378)

SEQ ID NO: 5227 - protein, 125 aa, Brassica napus; identical to SEQ ID NO: 2838

SEQ ID NO: 5228 - DNA, 522 bp, Brassica napus; identical to SEQ ID NO: 2839
  CDS (1)..(522)

SEQ ID NO: 5229 - protein, 173 aa, Brassica napus; identical to SEQ ID NO: 2840

SEQ ID NO: 5230 - DNA, 525 bp, Brassica napus; identical to SEQ ID NO: 2841
  CDS (1)..(525)

SEQ ID NO: 5231 - protein, 174 aa, Brassica napus; identical to SEQ ID NO: 2842

SEQ ID NO: 5232 - DNA, 309 bp, Brassica napus; identical to SEQ ID NO: 2843
  CDS (1)..(309)

SEQ ID NO: 5233 - protein, 102 aa, Brassica napus; identical to SEQ ID NO: 2844

SEQ ID NO: 5234 - DNA, 309 bp, Brassica napus; identical to SEQ ID NO: 2845
  CDS (1)..(309)

SEQ ID NO: 5235 - protein, 102 aa, Brassica napus; identical to SEQ ID NO: 2846

SEQ ID NO: 5236 - DNA, 522 bp, Brassica napus; identical to SEQ ID NO: 2847
  CDS (1)..(522)

SEQ ID NO: 5237 - protein, 173 aa, Brassica napus; identical to SEQ ID NO: 2848

SEQ ID NO: 5238 - DNA, 435 bp, Brassica napus; identical to SEQ ID NO: 2849
  CDS (1)..(435)

SEQ ID NO: 5239 - protein, 144 aa, Brassica napus; identical to SEQ ID NO: 2850

SEQ ID NO: 5240 - DNA, 435 bp, Brassica napus; identical to SEQ ID NO: 2851
  CDS (1)..(435)

SEQ ID NO: 5241 - protein, 144 aa, Brassica napus; identical to SEQ ID NO: 2852

SEQ ID NO: 5242 - DNA, 309 bp, Brassica napus; identical to SEQ ID NO: 2853
  CDS (1)..(309)

SEQ ID NO: 5243 - protein, 102 aa, Brassica napus; identical to SEQ ID NO: 2854

SEQ ID NO: 5244 - DNA, 300 bp, Brassica napus; identical to SEQ ID NO: 2855
  CDS (1)..(300)

SEQ ID NO: 5245 - protein, 99 aa, Brassica napus; identical to SEQ ID NO: 2856

SEQ ID NO: 5246 - DNA, 363 bp, Brassica napus; identical to SEQ ID NO: 2857
  CDS (1)..(363)

SEQ ID NO: 5247 - protein, 120 aa, Brassica napus; identical to SEQ ID NO: 2858

SEQ ID NO: 5248 - DNA, 336 bp, Brassica napus; identical to SEQ ID NO: 2859
  CDS (1)..(336)

SEQ ID NO: 5249 - protein, 111 aa, Brassica napus; identical to SEQ ID NO: 2860

SEQ ID NO: 5250 - DNA, 309 bp, Brassica napus; identical to SEQ ID NO: 2861
  CDS (1)..(309)

SEQ ID NO: 5251 - protein, 102 aa, Brassica napus; identical to SEQ ID NO: 2862

SEQ ID NO: 5252 - DNA, 522 bp, Brassica napus; identical to SEQ ID NO: 2863
  CDS (1)..(522)

SEQ ID NO: 5253 - protein, 173 aa, Brassica napus; identical to SEQ ID NO: 2864

SEQ ID NO: 5254 - DNA, 309 bp, Brassica napus; identical to SEQ ID NO: 2865
  CDS (1)..(309)

SEQ ID NO: 5255 - protein, 102 aa, Brassica napus; identical to SEQ ID NO: 2866

SEQ ID NO: 5256 - DNA, 300 bp, Brassica napus; identical to SEQ ID NO: 2867
  CDS (1)..(300)

SEQ ID NO: 5257 - protein, 99 aa, Brassica napus; identical to SEQ ID NO: 2868

SEQ ID NO: 5258 - DNA, 309 bp, Brassica napus; identical to SEQ ID NO: 2869
  CDS (1)..(309)

SEQ ID NO: 5259 - protein, 102 aa, Brassica napus; identical to SEQ ID NO: 2870

SEQ ID NO: 5260 - DNA, 309 bp, Brassica napus; identical to SEQ ID NO: 2871
  CDS (1)..(309)

SEQ ID NO: 5261 - protein, 102 aa, Brassica napus; identical to SEQ ID NO: 2872

SEQ ID NO: 5262 - DNA, 309 bp, Brassica napus; identical to SEQ ID NO: 2873
  CDS (1)..(309)

SEQ ID NO: 5263 - protein, 102 aa, Brassica napus; identical to SEQ ID NO: 2874

SEQ ID NO: 5264 - DNA, 312 bp, Brassica napus; identical to SEQ ID NO: 2875
  CDS (1)..(312)

SEQ ID NO: 5265 - protein, 103 aa, Brassica napus; identical to SEQ ID NO: 2876

SEQ ID NO: 5266 - DNA, 426 bp, Brassica napus; identical to SEQ ID NO: 2877
  CDS (1)..(426)

SEQ ID NO: 5267 - protein, 141 aa, Brassica napus; identical to SEQ ID NO: 2878

SEQ ID NO: 5268 - DNA, 309 bp, Brassica napus; identical to SEQ ID NO: 2879
  CDS (1)..(309)

SEQ ID NO: 5269 - protein, 102 aa, Brassica napus; identical to SEQ ID NO: 2880

SEQ ID NO: 5270 - DNA, 333 bp, Glycine max; identical to SEQ ID NO: 2881
  CDS (1)..(333)

SEQ ID NO: 5271 - protein, 110 aa, Glycine max; identical to SEQ ID NO: 2882

SEQ ID NO: 5272 - DNA, 324 bp, Glycine max; identical to SEQ ID NO: 2883
  CDS (1)..(324)

SEQ ID NO: 5273 - protein, 107 aa, Glycine max; identical to SEQ ID NO: 2884

SEQ ID NO: 5274 - DNA, 501 bp, Glycine max; identical to SEQ ID NO: 2885
  CDS (1)..(501)

SEQ ID NO: 5275 - protein, 166 aa, Glycine max; identical to SEQ ID NO: 2886

SEQ ID NO: 5276 - DNA, 399 bp, Glycine max; identical to SEQ ID NO: 2887
  CDS (1)..(399)

SEQ ID NO: 5277 - protein, 132 aa, Glycine max; identical to SEQ ID NO: 2888

SEQ ID NO: 5278 - DNA, 525 bp, Glycine max; identical to SEQ ID NO: 2891
  CDS (1)..(525)

SEQ ID NO: 5279 - protein, 174 aa, Glycine max; identical to SEQ ID NO: 2892

SEQ ID NO: 5280 - DNA, 483 bp, Glycine max; identical to SEQ ID NO: 2893
  CDS (1)..(483)

SEQ ID NO: 5281 - protein, 160 aa, Glycine max; identical to SEQ ID NO: 2894

SEQ ID NO: 5282 - DNA, 522 bp, Glycine max; identical to SEQ ID NO: 2895
  CDS (1)..(522)

SEQ ID NO: 5283 - protein, 173 aa, Glycine max; identical to SEQ ID NO: 2896

SEQ ID NO: 5284 - DNA, 411 bp, Glycine max; identical to SEQ ID NO: 2897
  CDS (1)..(411)

SEQ ID NO: 5285 - protein, 136 aa, Glycine max; identical to SEQ ID NO: 2898

SEQ ID NO: 5286 - DNA, 309 bp, Glycine max; identical to SEQ ID NO: 2899
  CDS (1)..(309)

SEQ ID NO: 5287 - protein, 102 aa, Glycine max; identical to SEQ ID NO: 2900

SEQ ID NO: 5288 - DNA, 423 bp, Glycine max; identical to SEQ ID NO: 2901
  CDS (1)..(423)

SEQ ID NO: 5289 - protein, 140 aa, Glycine max; identical to SEQ ID NO: 2902

SEQ ID NO: 5290 - DNA, 318 bp, Glycine max; identical to SEQ ID NO: 2907
  CDS (1)..(318)

SEQ ID NO: 5291 - protein, 105 aa, Glycine max; identical to SEQ ID NO: 2908

SEQ ID NO: 5292 - DNA, 402 bp, Glycine max; identical to SEQ ID NO: 2909
  CDS (1)..(402)

SEQ ID NO: 5293 - protein, 133 aa, Glycine max; identical to SEQ ID NO: 2910

SEQ ID NO: 5294 - DNA, 309 bp, Glycine max; identical to SEQ ID NO: 2911
  CDS (1)..(309)

SEQ ID NO: 5295 - protein, 102 aa, Glycine max; identical to SEQ ID NO: 2912

SEQ ID NO: 5296 - DNA, 402 bp, Glycine max; identical to SEQ ID NO: 2913
  CDS (1)..(402)

SEQ ID NO: 5297 - protein, 133 aa, Glycine max; identical to SEQ ID NO: 2914

SEQ ID NO: 5298 - DNA, 480 bp, Zea mays; identical to SEQ ID NO: 2915
  CDS (1)..(480)

SEQ ID NO: 5299 - protein, 159 aa, Zea mays; identical to SEQ ID NO: 2916

SEQ ID NO: 5300 - DNA, 393 bp, Zea mays; identical to SEQ ID NO: 2917
  CDS (1)..(393)

SEQ ID NO: 5301 - protein, 130 aa, Zea mays; identical to SEQ ID NO: 2918

SEQ ID NO: 5302 - DNA, 345 bp, Zea mays; identical to SEQ ID NO: 2919
  CDS (1)..(345)

SEQ ID NO: 5303 - protein, 114 aa, Zea mays; identical to SEQ ID NO: 2920

SEQ ID NO: 5304 - DNA, 312 bp, Zea mays; identical to SEQ ID NO: 2921
  CDS (1)..(312)

SEQ ID NO: 5305 - protein, 103 aa, Zea mays; identical to SEQ ID NO: 2922

SEQ ID NO: 5306 - DNA, 342 bp, Zea mays; identical to SEQ ID NO: 2923
  CDS (1)..(342)

SEQ ID NO: 5307 - protein, 113 aa, Zea mays; identical to SEQ ID NO: 2924

SEQ ID NO: 5308 - DNA, 537 bp, Zea mays; identical to SEQ ID NO: 2925
  CDS (1)..(537)

SEQ ID NO: 5309 - protein, 178 aa, Zea mays; identical to SEQ ID NO: 2926

SEQ ID NO: 5310 - DNA, 399 bp, Zea mays; identical to SEQ ID NO: 2927
  CDS (1)..(399)

SEQ ID NO: 5311 - protein, 132 aa, Zea mays; identical to SEQ ID NO: 2928

SEQ ID NO: 5312 - DNA, 315 bp, Zea mays; identical to SEQ ID NO: 2929
  CDS (1)..(315)

SEQ ID NO: 5313 - protein, 104 aa, Zea mays; identical to SEQ ID NO: 2930

SEQ ID NO: 5314 - DNA, 21 bp, Artificial sequence
  primer
atggatatgataacgaagatg

SEQ ID NO: 5315 - DNA, 20 bp, Artificial sequence
  primer
tcaaacccacaatgcaccag

SEQ ID NO: 5316 - protein, 109 aa, Artificial sequence
  consensus sequence
  Variant (2)..(8): Xaa in position 2 to 8 is any amino acid
  Variant (9)..(13): Xaa in position 9 to 13 is any or no amino acid
  Variant (15)..(22): Xaa in position 15 to 22 is any amino acid
  Variant (24)..(34): Xaa in position 24 to 34 is any amino acid
  Variant (35)..(37): Xaa in position 35 to 37 is any or no amino acid
  Variant (39)..(39): Xaa in position 39 is any amino acid
  Variant (41)..(52): Xaa in position 41 to 52 is any amino acid
  Variant (53)..(78): Xaa in position 53 to 78 is any or no amino acid
  Variant (80)..(80): Xaa in position 80 is any amino acid
  Variant (83)..(84): Xaa in position 83 to 84 is any amino acid
  Variant (86)..(88): Xaa in position 86 to 88 is any amino acid
  Variant (89)..(90): Xaa in position 89 to 90 is any or no amino acid
  Variant (92)..(101): Xaa in position 92 to 101 is any amino acid
  Variant (102)..(102): Xaa in position 102 is any or no amino acid
  Variant (104)..(104): Xaa in position 104 is any amino acid
  Variant (106)..(108): Xaa in position 106 to 108 is any amino acid
VXXXXXXXXXXXXCXXXXXXXXLXXXXXXXXXXXXXXEXDXXXXXXXXXXXXXXXXXXXXXXXXXXXXXXXXXXXXXXPXVFXXGXXXXXGXXXXXXXXXXXGXLXXXL

SEQ ID NO: 5317 - protein, 30 aa, Artificial sequence
  protein pattern
  Variant (2)..(2): Xaa in position 2 is any amino acid
  Variant (3)..(3): Xaa in position 3 is Ala, Ile, Leu or Val
  Variant (5)..(5): Xaa in position 5 is any amino acid
  Variant (6)..(6): Xaa in position 6 is any or no amino acid
  Variant (8)..(10): Xaa in position 8 to 10 is any amino acid
  Variant (11)..(11): Xaa in position 11 is any or no amino acid
  Variant (13)..(13): Xaa in position 13 is Ala, Gly, Ser or Thr
  Variant (14)..(25): Xaa in position 14 to 25 is any amino acid
  Variant (27)..(28): Xaa in position 27 to 28 is any amino acid
  Variant (29)..(29): Xaa in position 29 is any or no amino acid
PXXFXXGXXXXGXXXXXXXXXXXXXLXXXL

SEQ ID NO: 5318 - DNA, 1272 bp, Arabidopsis thaliana
  CDS (1)..(1272)
atggacgaagtttctcctgcagtcgctgttccattcagaccattcactgaccctcacgccggacttagaggctattgcaacggtgaatctagggttactttaccggaaagttcttgttctggcgacggagctatgaaagattcttcctttgagatcaatacaagacaagattcattgacatcatcatcatctgctatggcaggtgtggatatctccgccggagatgaaatcaacggttcagatgagtttgatccgagatcgatgaatcagagtgagaagaaagtacttagtagaacagagagtagaagtctgtttgagttcaagtgtgttcctttatatggagtgacttcgatttgtggtagacgaccagagatggaagattctgtctcaacgattcctagattccttcaagtttcttctagttcgttgcttgatggtcgagtcactaatggatttaatcctcacttgagtgctcatttctttggtgtttacgatggccatggcggttctcaggtagcgaattattgtcgtgagaggatgcatctggctttgacggaggagatagtgaaggagaaaccggagttttgtgacggtgacacgtggcaagagaagtggaagaaggctttgttcaactcttttatgagagttgactcggagattgaaactgtggctcatgctccggaaactgttgggtctacctcggtggttgcggttgtctttccgactcacatctttgtcgcgaattgcggcgactctagggcggttttgtgtcgcggcaaaacgccactcgcgttgtcggttgatcacaaaccggatagggatgatgaagcggcgaggatagaagctgccggtgggaaagtaatccggtggaacggggctcgtgtatttggtgttctcgcaatgtcaagatccattggcgatagataccttaaaccgtcagtaattccggatccagaagtgacttcagtgcggcgagtaaaagaagatgattgtctcatcttagcaagtgatggtctttgggatgtaatgacaaacgaagaagtgtgcgatttggctcggaaacggattttactatggcataagaagaacgcgatggccggagaggctttgcttccggcggagaaaagaggagaaggaaaagatcctgcagcaatgtccgcggcagagtatttgtcgaagatggctttgcaaaaaggaagcaaagacaatataagtgtggtagtggttgatttgaagggaataaggaaattcaagagcaaatccttgaattga

SEQ ID NO: 5319 - protein, 423 aa, Arabidopsis thaliana
MDEVSPAVAVPFRPFTDPHAGLRGYCNGESRVTLPESSCSGDGAMKDSSFEINTRQDSLTSSSSAMAGVDISAGDEINGSDEFDPRSMNQSEKKVLSRTESRSLFEFKCVPLYGVTSICGRRPEMEDSVSTIPRFLQVSSSSLLDGRVTNGFNPHLSAHFFGVYDGHGGSQVANYCRERMHLALTEEIVKEKPEFCDGDTWQEKWKKALFNSFMRVDSEIETVAHAPETVGSTSVVAVVFPTHIFVANCGDSRAVLCRGKTPLALSVDHKPDRDDEAARIEAAGGKVIRWNGARVFGVLAMSRSIGDRYLKPSVIPDPEVTSVRRVKEDDCLILASDGLWDVMTNEEVCDLARKRILLWHKKNAMAGEALLPAEKRGEGKDPAAMSAAEYLSKMALQKGSKDNISVVVVDLKGIRKFKSKSLN

SEQ ID NO: 5320 - DNA, 1305 bp, Arabidopsis thaliana
  CDS (1)..(1305)
atggaggaagtatctccggcgatcgcaggtcctttcaggccattctccgaaacccagatggatttcaccgggatcagattgggtaaaggttactgcaataaccaatactcaaatcaagattccgagaacggagatctaatggtttcgttaccggagacttcatcatgctctgtttctgggtcacatggttctgaatctaggaaagttttgatttctcggatcaattctcctaatttaaacatgaaggaatcagcagctgctgatatagtcgtcgttgatatctccgccggagatgagatcaacggctcagatgttactagcgagaagaagatgatcagcagaacagagagtaggagtttgtttgaattcaagagtgtgcctttgtatggtttcacttcgatttgtggaagaagaccagagatggaagatgctgtttcgactataccaagattccttcaatcttcttctggttccatgttagatggtcggtttgatcctcaatccgccgctcatttcttcggtgtttacgacggccatggcggttctcaggtagcgaactattgtagagagaggatgcatttggctttggcggaggagatagctaaggagaaaccgatgctctgcgatggtgatacgtggctggagaagtggaagaaagctcttttcaactcgttcctgagagttgactcggagattgagtcagttgcgccggagacggttgggtcaacgtcggtggttgccgttgttttcccgtctcacatcttcgtcgctaactgcggtgactctagagccgttctttgccgcggcaaaactgcacttccattatccgttgaccataaaccggatagagaagatgaagctgcgaggattgaagccgcaggagggaaagtgattcagtggaatggagctcgtgttttcggtgttctcgccatgtcgagatccattggcgatagatacttgaaaccatccatcattcctgatccggaagtgacggctgtgaagagagtaaaagaagatgattgtctgattttggcgagtgacggggtttgggatgtaatgacggatgaagaagcgtgtgagatggcaaggaagcggattctcttgtggcacaagaaaaacgcggtggctggggatgcatcgttgctcgcggatgagcggagaaaggaagggaaagatcctgcggcgatgtccgcggctgagtatttgtcaaagctggcgatacagagaggaagcaaagacaacataagtgtggtggtggttgatttgaagcctcggaggaaactcaagagcaaacccttgaactga

SEQ ID NO: 5321 - protein, 434 aa, Arabidopsis thaliana
MEEVSPAIAGPFRPFSETQMDFTGIRLGKGYCNNQYSNQDSENGDLMVSLPETSSCSVSGSHGSESRKVLISRINSPNLNMKESAAADIVVVDISAGDEINGSDVTSEKKMISRTESRSLFEFKSVPLYGFTSICGRRPEMEDAVSTIPRFLQSSSGSMLDGRFDPQSAAHFFGVYDGHGGSQVANYCRERMHLALAEEIAKEKPMLCDGDTWLEKWKKALFNSFLRVDSEIESVAPETVGSTSVVAVVFPSHIFVANCGDSRAVLCRGKTALPLSVDHKPDREDEAARIEAAGGKVIQWNGARVFGVLAMSRSIGDRYLKPSIIPDPEVTAVKRVKEDDCLILASDGVWDVMTDEEACEMARKRILLWHKKNAVAGDASLLADERRKEGKDPAAMSAAEYLSKLAIQRGSKDNISVVVVDLKPRRKLKSKPLN

SEQ ID NO: 5322 - DNA, 1404 bp, Oryza sativa (japonica cultivar-group)
  CDS (1)..(1404)
atggaggacgtggcggtggcggcggcgctcgctcctgcgccggcgacggctccggtttttagccccgccgcggcggggctcacgctgatcgccgccgcggccgcggacccgatcgcggccgtggtggcgggggccatggacggggtggtgaccgtgccgccggtcaggacggcgtcggcggtggaggacgatgcggtggcaccggggaggggggaggaagggggggaggcgtcggcggtggggagcccgtgctcggtgaccagcgactgcagcagcgtggccagcgcggacttcgagggggttggcctgggattcttcggggcggcggcggatggcggcgccgctatggtgttcgaggattcggcggcgtcggcggccacggtcgaggcagaggcacgcgtcgcggccggggcgaggagcgtcttcgccgtcgagtgcgtgcccctgtgggggcacaagtcgatttgtggccgccggccagaaatggaggacgccgtcgtcgccgtgtccagattcttcgacatcccgctatggatgctcaccggcaactccgtcgtcgacggcctcgaccccatgtcgttccgcctcccagcacacttcttcggtgtctacgacggccacggtggcgcgcaggttgcaaattactgtcgggagcggctccacgctgcgttggtggaggagctgagcaggatagaggggtctgtgtccggtgctaacttgggatctgtggagttcaagaagaagtgggaacaggcgtttgtggactgcttctcgagggtggacgaggaggtgggaggcaatgcgagcaggggagaagctgtagcacccgagaccgtgggatctacggctgtagtcgctgtgatctgctcctcgcacatcatcgttgctaattgtggagactcacgggcagtgctctgtcgtggcaagcagcctgtgccgctatcagtggatcataaacctaacagggaggatgaatatgcaaggatcgaggcagaaggtggcaaggttatacagtggaatggctatcgagtttttggtgttcttgccatgtcgcgatcaataggtgacagatatctcaagccatggataattccagtccccgagatcactattgttcctcgagcaaaggatgacgaatgtctcgttcttgctagtgatggtctctgggacgtcatgtcaaacgaagaggtatgcgatgttgctcgcaagcgaatactgctgtggcacaagaagaatggcacaaacccagcatcagccccgcgaagcggtgactcgtcagatccggcagctgaagcagctgctgagtgcttgtcgaagcttgctctccagaaggggagcaaggacaacattagcgtcattgtcgttgacctcaaggcacataggaagttcaagagcaaaagctaa

SEQ ID NO: 5323 - protein, 467 aa, Oryza sativa (japonica cultivar-group)
MEDVAVAAALAPAPATAPVFSPAAAGLTLIAAAAADPIAAVVAGAMDGVVTVPPVRTASAVEDDAVAPGRGEEGGEASAVGSPCSVTSDCSSVASADFEGVGLGFFGAAADGGAAMVFEDSAASAATVEAEARVAAGARSVFAVECVPLWGHKSICGRRPEMEDAVVAVSRFFDIPLWMLTGNSVVDGLDPMSFRLPAHFFGVYDGHGGAQVANYCRERLHAALVEELSRIEGSVSGANLGSVEFKKKWEQAFVDCFSRVDEEVGGNASRGEAVAPETVGSTAVVAVICSSHIIVANCGDSRAVLCRGKQPVPLSVDHKPNREDEYARIEAEGGKVIQWNGYRVFGVLAMSRSIGDRYLKPWIIPVPEITIVPRAKDDECLVLASDGLWDVMSNEEVCDVARKRILLWHKKNGTNPASAPRSGDSSDPAAEAAAECLSKLALQKGSKDNISVIVVDLKAHRKFKSKS

SEQ ID NO: 5324 - DNA, 1212 bp, Oryza sativa (japonica cultivar-group)
  CDS (1)..(1212)
atgagcagtgacacaagcaggcgggatcatgccgccatggccgtgcgggaggtcctcgccggcgacaggaaggtgggcaccgtgtccaggtcggcgaggaggaggaggcttgagctccggaggctcgggcggacggcgtcggcggtggcggaggatgacgccgcgaagagggtgcggccggcgtcggacagctcctccgactcgtcggagtcggctaaggtagcgcccgagcccaccgcggaggtggcgagatggccggcgtgcgtgtcgcacggggcggtgtcggtgatcgggcgccggagggagatggaagacgccatcttcgtcgcggcgccgttcttggccgcctcgaaggaggcggcggtggaggggagcggcgtcgcggaagaggaaggcaaggaggaggatgaggggttcttcgcggtgtacgacgggcacggcgggtcccgcgtggcggaggcgtgccgggagcggatgcacgtggtgctcgcggaggaggtgcgggtgcggaggctgctgcagggcgggggcggcggcgccgacgtcgaggacgaggaccgcgcccgttggaaggaggccatggcggcctgcttcacccgcgtggacggcgaggtcggcggcgccgaggaggccgacacgggcgagcagacggtgggctccaccgccgtcgtcgccgtcgtgggtccccgccgcatcgtcgtcgccaactgcggcgactcccgcgccgtcctctcccgcggcggcgtggccgtgccgctctcctccgaccacaagccagacagacctgacgagatggagagagtagaagcagcaggtggcagggttatcaattggaatggataccgtatcctcggtgtccttgctacttctaggtcaattggagactattacctcaagccatatgtaatagctgagcctgaggtcacagtcatggacaggacggacaaggacgagttcctcatattggcgagcgacgggctgtgggatgtggtatccaacgatgtggcctgcaagattgcgagaaattgcttaagcgggcgggcagcttccaagtacccagaatccgtctccgggagcaccgcagccgatgctgccgccctgctggtcgagctcgccatctcccgtggcagcaaggacaacatcagcgtcgtcgtggtcgagttgagacggctgaggagtagaacgacggcgagcaaagagaacggtaggtag

SEQ ID NO: 5325 - protein, 403 aa, Oryza sativa (japonica cultivar-group)
MSSDTSRRDHAAMAVREVLAGDRKVGTVSRSARRRRLELRRLGRTASAVAEDDAAKRVRPASDSSSDSSESAKVAPEPTAEVARWPACVSHGAVSVIGRRREMEDAIFVAAPFLAASKEAAVEGSGVAEEEGKEEDEGFFAVYDGHGGSRVAEACRERMHVVLAEEVRVRRLLQGGGGGADVEDEDRARWKEAMAACFTRVDGEVGGAEEADTGEQTVGSTAVVAVVGPRRIVVANCGDSRAVLSRGGVAVPLSSDHKPDRPDEMERVEAAGGRVINWNGYRILGVLATSRSIGDYYLKPYVIAEPEVTVMDRTDKDEFLILASDGLWDVVSNDVACKIARNCLSGRAASKYPESVSGSTAADAAALLVELAISRGSKDNISVVVVELRRLRSRTTASKENGR

SEQ ID NO: 5326 - DNA, 1245 bp, Oryza sativa (japonica cultivar-group)
  CDS (1)..(1245)
atggccgagatctgctgcgaggaggccatgtcgccgccggccactgccacggctgctgtcgcggcagcggtctccgcctcggccgccgcagccgtctcctcggcgatagacaggcggcgccgcaggatggagatgaggcgcatccgcatcgcaagtgatctcgagctgcaggccggagaggatgggcgccctggaaagcggcagaggctggcgcgcacggcgtctggcgccccgcgtcctgacgaggattcggcgtctgagcggccgagttgtggccgtacggaggagttcccgaggtatggggtcaccgctgtgtgcggccgccgtcgcgagatggaagacgccgtgtccatcagaccggacttcttgccggcatccggcaagttccatttttacggcgtcttcgacggccatggctgctcccatgttgcgacgacgtgccaggacaggatgcacgagattgtcgccgaggagcacaacaagggggcctccggcgaagtggcgccttggagggatgtgatggagaagagcttcgcgcggatggatggggaggtcggtaaccgggcgtccacccgcagcgacgacgagcccgcctgcccgtgcgagcagcagacgccttcgcgtcgcgaccacgcgggttccaccgccgtcgtcgccgtcgttagcccaacacaggtcgtcgtcgccaacgccggcgactcccgcgccgtcatctcccgtgccggcgtccccgtcgcactatccgttgaccacaaacccgatcggcccgacgagctggaacgaatcgaggcggcgggcggccgcgtcatttactgggacggcgcccgggtgctcggcgtcctcgccatgtctcgagccatcggggatgggtaccttaagccgtacgtgacgtcggagccggaggtgaccgtgacggagcgcaccgacgacgatgagtgcctgatcctggccagcgacgggctatgggacgtcgtgaccaacgagatggcgtgtgaggtcgtgagggcgtgcttccacaacaacggtccgccggcaccggccgcgcggccgagcggcgtgccctcctcggccgaggcggcggaaaccgagaacggaggagccgcatcggtgaaggggataagcaaggcggagtcctccgacaaggcgtgctccgacgcggccatgctgctgacgaagttggcgctggcgcggcggagcgcggacaatgtcagcgtcgtcgtcgtagatctccgccggggattgtga

SEQ ID NO: 5327 - protein, 414 aa, Oryza sativa (japonica cultivar-group)
MAEICCEEAMSPPATATAAVAAAVSASAAAAVSSAIDRRRRRMEMRRIRIASDLELQAGEDGRPGKRQRLARTASGAPRPDEDSASERPSCGRTEEFPRYGVTAVCGRRREMEDAVSIRPDFLPASGKFHFYGVFDGHGCSHVATTCQDRMHEIVAEEHNKGASGEVAPWRDVMEKSFARMDGEVGNRASTRSDDEPACPCEQQTPSRRDHAGSTAVVAVVSPTQVVVANAGDSRAVISRAGVPVALSVDHKPDRPDELERIEAAGGRVIYWDGARVLGVLAMSRAIGDGYLKPYVTSEPEVTVTERTDDDECLILASDGLWDVVTNEMACEVVRACFHNNGPPAPAARPSGVPSSAEAAETENGGAASVKGISKAESSDKACSDAAMLLTKLALARRSADNVSVVVVDLRRGL

SEQ ID NO: 5328 - DNA, 1215 bp, Oryza sativa (japonica cultivar-group); identical to SEQ ID NO: 826
  CDS (1)..(1215)

SEQ ID NO: 5329 - protein, 404 aa, Oryza sativa (japonica cultivar-group); identical to SEQ ID NO: 827

SEQ ID NO: 5330 - DNA, 1176 bp, Oryza sativa (japonica cultivar-group); identical to SEQ ID NO: 828
  CDS (1)..(1176)

SEQ ID NO: 5331 - protein, 391 aa, Oryza sativa (japonica cultivar-group); identical to SEQ ID NO: 829

SEQ ID NO: 5332 - DNA, 1146 bp, Oryza sativa (japonica cultivar-group); identical to SEQ ID NO: 832
  CDS (1)..(1146)

SEQ ID NO: 5333 - protein, 381 aa, Oryza sativa (japonica cultivar-group); identical to SEQ ID NO: 833

SEQ ID NO: 5334 - DNA, 1338 bp, Oryza sativa (japonica cultivar-group)
  CDS (1)..(1338)
atggaggacctcgccctgcccgccgctcctcctgcccccacgcttagcttcacgctcttagccgccgccgccgccgtcgccgaggccatggaagaggctctgggcgccgcgctgccgcccctcaccgcccccgtccccgcccccggagacgactccgcctgcgggagcccgtgctccgtcgccagcgactgcagcagcgtcgccagcgccgacttcgagggcttcgccgagctaggcacttcgctcctcgcggggcccgccgtcttgttcgacgacctcaccgccgcctccgtcgccgtcgcggaggctgccgagccgagggctgtgggggccactgcgaggagcgtgttcgccatggactgcgttccgctctgggggctggagtccatttgcggccgccgcccggagatggaggacgactatgccgtggtcccgcgatttttcgaccttcctctgtggatggttgccggcgacgcggcagtcgacggcctcgaccgggcctccttccgccttccagcccatttcttcgccgtctacgatggccacggtggcgttcaggttgccaattactgcaggaagaggatccacgccgtactgacagaggagctgcgtagagcggaggacgacgcgtgtggctctgacttatctggccttgagtccaagaagctgtgggagaaggcgttcgtggattgcttcagtcgtgttgacgctgaggtgggaggaaatgctgcgtctggagcaccgcctgttgctccagacaccgtggggtcaactgctgtcgtcgcagtcgtttgctcgtcacatgtcatcgtagccaactgcggtgactcgcgtgctgttctctgccggggcaagcagcccctgcccctgtcactagatcataaaccaaatagggaagacgagtacgcgaggattgaggcgctgggtggcaaggttatccaatggaatggttatcgagttctcggtgttcttgccatgtcgcgatcaatcggggacaaatacctgaagccatatataatcccggtccctgaggtcacagttgtcgctcgtgcaaaagacgatgattgccttattcttgcaagtgatggcctttgggatgtaatgtcgaacgaagaggtctgtgatgctgctcgcaagaggatattactatggcacaagaagaatgcggccaccgcatcaacgtcatcggcccaaataagcggtgattcttcagatccggctgctcaagcagctgccgactacttgtccaagcttgccctacagaaggggagcaaggacaacatcactgtcgttgtaattgacctcaaggcacataggaagttcaagagcaaagcatga

SEQ ID NO: 5335 - protein, 445 aa, Oryza sativa (japonica cultivar-group)
MEDLALPAAPPAPTLSFTLLAAAAAVAEAMEEALGAALPPLTAPVPAPGDDSACGSPCSVASDCSSVASADFEGFAELGTSLLAGPAVLFDDLTAASVAVAEAAEPRAVGATARSVFAMDCVPLWGLESICGRRPEMEDDYAVVPRFFDLPLWMVAGDAAVDGLDRASFRLPAHFFAVYDGHGGVQVANYCRKRIHAVLTEELRRAEDDACGSDLSGLESKKLWEKAFVDCFSRVDAEVGGNAASGAPPVAPDTVGSTAVVAVVCSSHVIVANCGDSRAVLCRGKQPLPLSLDHKPNREDEYARIEALGGKVIQWNGYRVLGVLAMSRSIGDKYLKPYIIPVPEVTVVARAKDDDCLILASDGLWDVMSNEEVCDAARKRILLWHKKNAATASTSSAQISGDSSDPAAQAAADYLSKLALQKGSKDNITVVVIDLKAHRKFKSKA

SEQ ID NO: 5336 - DNA, 1329 bp, Arabidopsis thaliana
  CDS (1)..(1329)
atggcggatatttgttatgaagacgagacgtcggcttgtgaatcaagaccgttgtggtctagccggaagtggaggatcggtgtccagcgattcaggatgtctccgtcggagatgaatcccacggcgtcgacgacggaggaggaggataaatctgaagggatttataataagcgaaataaacaagaagagtacgattttatgaactgtgcatcgtcgtcaccttctcaaagctctcctgaagaagagagtgtatcacttgaagacagtgacgtctctatctccgatggaaattcatcggttaatgatgttgcagttattccgtcgaagaagacggttaaagagacggatctgaggccgagatacggcgtcgcatcggtgtgcgggagaagaagagatatggaagatgcggttgcgttacatccgtcttttgtacggaaacaaacggagttttctcgaacaagatggcactattttggtgtttacgacggccatggctgttctcacgttgcggctaggtgtaaagagagacttcacgagttagtgcaagaagaagcgttgtcggataagaaagaagaatggaagaagatgatggagcgtagcttcacacgtatggacaaagaggttgttcgttggggtgaaactgtgatgagtgctaattgtaggtgtgagcttcaaacgccggactgtgacgctgttggatccaccgccgttgtctccgtcattacgccggagaagatcattgttgcgaattgcggtgactcaagagcagttctttgtaggaatggtaaagcagtacctctttctacagatcataagcctgatcgtccggatgagctggatcgaatccaagaagcaggaggacgagtgatatactgggacggtgcaagagtcttaggcgttttagccatgtcacgagccataggagacaattatttaaaaccgtacgtcacttcggagccggaagtgacggttacggatcggactgaggaagatgagtttctgattctagcgacggacgggctatgggacgtagtgacgaacgaggcagcgtgtacgatggtgcgcatgtgtctcaacagaaaaagtggtcgtggaagacggcgaggagaaacacagactccggggaggaggagtgaagaagaagggaaagaagaagaggagaaggtggtggggtcaagaaagaacgggaagagaggagagatcacggacaaagcatgtacggaggcgtcagtattgctgacgaagctggcgttggcaaaacacagtagtgacaacgtaagcgtcgtcgttattgatctcagaagaagaagaaagagacacgttgcttga

SEQ ID NO: 5337 - protein, 442 aa, Arabidopsis thaliana
MADICYEDETSACESRPLWSSRKWRIGVQRFRMSPSEMNPTASTTEEEDKSEGIYNKRNKQEEYDFMNCASSSPSQSSPEEESVSLEDSDVSISDGNSSVNDVAVIPSKKTVKETDLRPRYGVASVCGRRRDMEDAVALHPSFVRKQTEFSRTRWHYFGVYDGHGCSHVAARCKERLHELVQEEALSDKKEEWKKMMERSFTRMDKEVVRWGETVMSANCRCELQTPDCDAVGSTAVVSVITPEKIIVANCGDSRAVLCRNGKAVPLSTDHKPDRPDELDRIQEAGGRVIYWDGARVLGVLAMSRAIGDNYLKPYVTSEPEVTVTDRTEEDEFLILATDGLWDVVTNEAACTMVRMCLNRKSGRGRRRGETQTPGRRSEEEGKEEEEKVVGSRKNGKRGEITDKACTEASVLLTKLALAKHSSDNVSVVVIDLRRRRKRHVA

SEQ ID NO: 5338 - DNA, 1536 bp, Arabidopsis thaliana
  CDS (1)..(1536)
atggaagagatttcacctgcagttgcacttactttgggtttagctaatacgatgtgtgactctggaatctcatctactttcgatatctccgagctggagaatgttactgatgcagctgacatgttgtgtaatcagaaaagacaaagatatagtaatggagtggtggattgtattatgggaagtgtttcagaagagaagactttatctgaagtgagaagtttgtcttctgattttagtgtaactgtccaggaatcagaagaagatgagccattagtatctgatgcgactattattagcgaaggtttaatagttgtggacgctaggtctgagataagtttgccagatacagttgaaactgataacgggcgagttcttgctacggccattatcctaaacgagacaaccatagaacaggttcccactgcagaagtccttattgcgagtctgaatcacgatgtgaatatggaggtggcaacttctgaggtagtcattaggttacctgaagaaaatcctaatgtagcaagaggaagcaggagtgtttatgaactagagtgtatacctctttggggcacgatttcaatttgcggtggaagatctgaaatggaggatgctgttagagctttacctcattttctcaaaatacccatcaaaatgcttatgggggatcatgaagggatgagtccaagtctcccatatctcactagtcacttctttggtgtatatgatggccacggaggcgctcaggttgctgactattgccatgatagaatccactctgctttggctgaagaaatcgaacggattaaagaggaattgtgtaggaggaacactggcgagggtaggcaggtccagtgggagaaagtctttgtagattgttacctaaaagtcgatgatgaggttaaagggaaaatcaacagacctgttgttggttcttctgataggatggttcttgaagctgtttcccctgaaaccgttggatcgactgctgtggttgctttggtttgttcatcgcatataatagtctcaaactgtggtgactcaagagcagttttactccgaggcaaagactccatgcctttatcagttgatcacaaaccagatagagaggatgagtatgcacgaatagagaaagctggaggaaaagttatacaatggcaaggcgctcgtgtttctggcgttcttgccatgtccaggtccatcggtgatcaatatctggagccatttgtaataccagatcccgaagtgacgtttatgccacgagctagagaagacgagtgtctaatattggccagtgatggactttgggacgtaatgagtaaccaagaagcttgcgattttgcgaggaggcggatcttggcttggcacaagaagaatggagcattgcctttagctgagagaggtgtaggagaagaccaagcgtgtcaagctgcggctgaatatctctccaaactcgctattcaaatgggaagcaaagacaatatctcaatcatagtgatcgacttgaaagctcaaagaaagttcaagaccagatcttga

SEQ ID NO: 5339 - protein, 511 aa, Arabidopsis thaliana
MEEISPAVALTLGLANTMCDSGISSTFDISELENVTDAADMLCNQKRQRYSNGVVDCIMGSVSEEKTLSEVRSLSSDFSVTVQESEEDEPLVSDATIISEGLIVVDARSEISLPDTVETDNGRVLATAIILNETTIEQVPTAEVLIASLNHDVNMEVATSEVVIRLPEENPNVARGSRSVYELECIPLWGTISICGGRSEMEDAVRALPHFLKIPIKMLMGDHEGMSPSLPYLTSHFFGVYDGHGGAQVADYCHDRIHSALAEEIERIKEELCRRNTGEGRQVQWEKVFVDCYLKVDDEVKGKINRPVVGSSDRMVLEAVSPETVGSTAVVALVCSSHIIVSNCGDSRAVLLRGKDSMPLSVDHKPDREDEYARIEKAGGKVIQWQGARVSGVLAMSRSIGDQYLEPFVIPDPEVTFMPRAREDECLILASDGLWDVMSNQEACDFARRRILAWHKKNGALPLAERGVGEDQACQAAAEYLSKLAIQMGSKDNISIIVIDLKAQRKFKTRS

SEQ ID NO: 5340 - DNA, 1338 bp, Arabidopsis thaliana
  CDS (1)..(1338)
atgactaataaacttcgctcagaagaaacaatcacgtccctttcttctttcatggctagtacacttagcattgcgtcaccctctccttgttctattccattgtcggtcacaaaggtctcgcctttaaagagaaagagacctacccacttaaatatccctgacctcaatcctcaacaaccgatttcaactgattacttccgtttcagagagggtgacgcaaaggtctcgcctttaaagagaaagagacctgcccacctaaatatccctgacctcaatcctcaacaaccgattcgaactgattacttcagtttcacagactttgctcaccaaaacggcaccgtaagcttcggtggcaatggttttggtgtcgtctccagaaacggtaagaagaagtttatggaagatactcacagaattgttccttgtttggttggtaactccaaaaagagtttctttggagtttatgatggtcatggaggtgctaaagctgcagaatttgtggctgagaatttgcacaaatatgttgttgagatgatggagaattgtaaggggaaggaggagaaagttgaagcctttaaggctgcttttttgaggactgatcgtgatttcctagaaaagggtgttgtgagtggtgcttgctgtgttactgctgtgatacaagatcaggagatgattgtatcaaatttgggagattgtagagctgtcctgtgtagagcaggtgttgctgaggctcttactgatgatcacaaaccaggaagggatgatgaaaaggaaagaattgagagtcagggaggttatgtcgataatcatcaaggggcttggcgagttcagggaatacttgcggtttccagaagcattggagatgcacacttaaagaagtgggtggttgctgaacctgagacgagagtactagaactggaacaagatatggagtttcttgtcttagcttctgatggactttgggatgtggttagcaatcaagaagctgtttataccgtgttgcatgttctagctcagagaaagacgcctaaagaaagtgaggaggagaacttggttcagggctttgtcaatatgagcccatcttcgaaacttcgtcgagcttcactggtcaagtctcccagatgtgctaaatcccaaagttactactacaactcagagaatgaatcaccctcactcaaccgtgaaatagggagttcaccttcaaagtcaccgataacaccgtggaagtctctttgggccaaagcggcttgcaaagagcttgcgaacctggctgcaaaaagaggcagtatggatgatatcacagtggtgataattgatctcaaccattacaaaggctga

SEQ ID NO: 5341 - protein, 445 aa, Arabidopsis thaliana
MTNKLRSEETITSLSSFMASTLSIASPSPCSIPLSVTKVSPLKRKRPTHLNIPDLNPQQPISTDYFRFREGDAKVSPLKRKRPAHLNIPDLNPQQPIRTDYFSFTDFAHQNGTVSFGGNGFGVVSRNGKKKFMEDTHRIVPCLVGNSKKSFFGVYDGHGGAKAAEFVAENLHKYVVEMMENCKGKEEKVEAFKAAFLRTDRDFLEKGVVSGACCVTAVIQDQEMIVSNLGDCRAVLCRAGVAEALTDDHKPGRDDEKERIESQGGYVDNHQGAWRVQGILAVSRSIGDAHLKKWVVAEPETRVLELEQDMEFLVLASDGLWDVVSNQEAVYTVLHVLAQRKTPKESEEENLVQGFVNMSPSSKLRRASLVKSPRCAKSQSYYYNSENESPSLNREIGSSPSKSPITPWKSLWAKAACKELANLAAKRGSMDDITVVIIDLNHYKG

SEQ ID NO: 5342 - DNA, 1536 bp, Arabidopsis thaliana
  CDS (1)..(1536)
atggaggagatgactcccgcagttgcaatgactcttagcttagcagccaacaccatgtgtgaatcatcacctgtcgagatcactcagctaaagaacgttactgatgcagctgacttgttatctgattctgaaaatcaaagcttttgcaacggagggactgaatgcactatggaagatgtttctgaactggaagaggtaggtgaacaggatttgttgaaaactttatccgatacgagaagcgggtcttccaatgtttttgatgaagacgatgtattgtctgttgtggaggataatagtgctgtcataagtgagggcttgttagttgttgatgcaggctctgaattaagcttgtctaatacagctatggaaatagataacgggcgagttcttgcaaccgcgattatcgtaggcgaatcaagcattgagcaggttcccaccgcggaagttcttatcgcgggtgtaaatcaggataccaatacttcggaggttgtcattagattgccagatgaaaatagtaatcatctggtgaaagggagaagtgtttatgaactagattgtataccgctttggggcacggtttccattcaagggaatagatctgagatggaggatgcttttgccgtgtcacctcattttctgaaactacccatcaaaatgcttatgggggaccatgagggtatgagtccaagcctcacacacctcaccggtcattttttcggtgtttatgatggtcatggaggccataaggttgctgactattgccgagatagactccattttgctttggctgaagaaatagaacgtataaaagacgaattatgcaagaggaatacaggagagggtaggcaggtgcagtgggataaagtcttcacgagttgttttctaactgtcgatggtgagattgaaggaaaaattggtagagccgttgttggttcttctgataaggttcttgaggctgttgcgtctgagaccgtaggatcaactgctgttgttgccttggtttgctcatcacatatagtagtttctaactgcggtgattcgagggcggttttattccgtggcaaagaagccatgcccttgtcagttgatcacaaaccagatagagaggatgaatatgcaagaatagaaaatgctggaggcaaagttatacaatggcaaggcgcacgtgtttttggtgttctcgccatgtctaggtccatcggtgacagatatctgaagccatatgtgatcccagaaccggaagtgacattcatgcctcggtcaagagaagacgagtgtctcatactagccagtgacggtctttgggatgtaatgaacaaccaagaagtctgcgaaatagcaaggagacggatattgatgtggcacaagaagaacggtgcaccgcctctagcagagagaggcaaaggaatagatccagcttgccaagccgcagctgactacctctcaatgcttgctctacaaaaaggaagtaaagacaacatctccatcattgtgattgacttgaaagctcaaagaaagttcaagaccagaacctga

SEQ ID NO: 5343 - protein, 511 aa, Arabidopsis thaliana
MEEMTPAVAMTLSLAANTMCESSPVEITQLKNVTDAADLLSDSENQSFCNGGTECTMEDVSELEEVGEQDLLKTLSDTRSGSSNVFDEDDVLSVVEDNSAVISEGLLVVDAGSELSLSNTAMEIDNGRVLATAIIVGESSIEQVPTAEVLIAGVNQDTNTSEVVIRLPDENSNHLVKGRSVYELDCIPLWGTVSIQGNRSEMEDAFAVSPHFLKLPIKMLMGDHEGMSPSLTHLTGHFFGVYDGHGGHKVADYCRDRLHFALAEEIERIKDELCKRNTGEGRQVQWDKVFTSCFLTVDGEIEGKIGRAVVGSSDKVLEAVASETVGSTAVVALVCSSHIVVSNCGDSRAVLFRGKEAMPLSVDHKPDREDEYARIENAGGKVIQWQGARVFGVLAMSRSIGDRYLKPYVIPEPEVTFMPRSREDECLILASDGLWDVMNNQEVCEIARRRILMWHKKNGAPPLAERGKGIDPACQAAADYLSMLALQKGSKDNISIIVIDLKAQRKFKTRT

SEQ ID NO: 5344 - DNA, 1089 bp, Arabidopsis thaliana
  CDS (1)..(1089)
atggccgagatatgttacgaagtagtgaccgacgcatgtccgtcgtcggtttatgaatcaacgccggcacattcacggcggaggccgagattccaaacggtgatgcatgaagattgggagaagaattgtaagcgtagtaaacaggaggctttagctacgagatactcttcaattcctcgaagctctcgggaggatttctctgaccaaaatgtcgacgtatccagtccaagatacggtgtttcttcggtgtgcggtagaagaagagagatggaagatgcggtggcaattcatccttcattttcttctccgaagaattcggaatttcctcaacactactttggtgtgtatgacggccatggttgttcccacgttgcagcaaggtgtagagagaggcttcacaagctggtgcaagaagaactaagttcagatatggaagatgaagaagaatggaaaacgacgatggagcgtagcttcacacgcatggataaggaagttgtatcgtggggtgattccgtcgtgactgcaaattgcaagtgtgatctacaaacaccggcttgtgattccgtcggatcaaccgctgttgtctcagtcattacgccagataagatcgttgtcgccaattgtggcgattccagagcagttctctgccgcaatgggaaaccagtccctttatcaaccgatcacaagcctgatcggccagacgaattggatcgaatcgaaggagctggtggacgagtcatatattgggactgtccaagagttctcggagtcttagcaatgtcacgagcaataggagacaactatttgaaaccttacgtgagttgcgagccggaggtaaccataacggacaggagagacgatgactgcctcatactagctagtgatggtttatgggatgttgtgtcaaacgagaccgcctgctctgtagcgcgtatgtgtctccgtggtggtgggagaagacaagataatgaggatccggcgatttcggacaaggcttgtacggaagcgtcagtattgctaacaaagctggcgttggcaaggaacagtagtgacaacgtcagtgtcgttgtgattgatctcagaagataa

SEQ ID NO: 5345 - protein, 362 aa, Arabidopsis thaliana
MAEICYEVVTDACPSSVYESTPAHSRRRPRFQTVMHEDWEKNCKRSKQEALATRYSSIPRSSREDFSDQNVDVSSPRYGVSSVCGRRREMEDAVAIHPSFSSPKNSEFPQHYFGVYDGHGCSHVAARCRERLHKLVQEELSSDMEDEEEWKTTMERSFTRMDKEVVSWGDSVVTANCKCDLQTPACDSVGSTAVVSVITPDKIVVANCGDSRAVLCRNGKPVPLSTDHKPDRPDELDRIEGAGGRVIYWDCPRVLGVLAMSRAIGDNYLKPYVSCEPEVTITDRRDDDCLILASDGLWDVVSNETACSVARMCLRGGGRRQDNEDPAISDKACTEASVLLTKLALARNSSDNVSVVVIDLRR

SEQ ID NO: 5346 - DNA, 1344 bp, Arabidopsis thaliana
  CDS (1)..(1344)
atgggatatatggacttggcgttatcttattcgaatcaaatgcggattgttgaagctcccgcaagcggaggtggtctcagtcagaatggaaaatttagctatggatatgcaagctcagctggaaaaaggtcatctatggaagacttttttgagacaaggatcgacggtatcgatggagaaatcgttggtctatttggagtctttgatggtcatggtggatccagagcagctgagtatgtgaagcgtcaccttttcagcaatcttattactcatcctaagttcatctctgacaccaaatctgcaatagctgatgcctatactcatacagactctgaacttctcaagtcagaaaatagtcatactagagatgctggttcaactgcttccacagctattctcgttggtgatcgtttacttgttgctaatgttggtgattccagagctgttatatgtcgtggcggaaatgcatttgctgtttcaagagaccataaacctgaccaaagtgatgagcgtgaacggattgagaatgctggtggttttgtgatgtgggcagggacttggagagttggaggagttcttgcagtttcccgcgcgtttggtgatcgattgcttaaacaatatgttgttgctgatccagaaattcaggaagagaagattgatgattctcttgagtttctgattcttgccagcgatggactatgggatgttttctccaatgaggaagcagttgcagtagtaaaagaagttgaagatccggaagagtccaccaagaaacttgtgggagaagcaattaaaagaggaagtgcagacaatattacatgtgtagttgtacgtttcttggagagcaagtcagctaacaacaacggttccagctcatccgaggaagcaaatcaagtgccaaccgctgttagaaatgactcagaccacaagatctcagccaaagaaaccaatcaagaccataccacagtaaacaaggacttggaccgcaacactgacagtcaaagcctgaaccaaaagccgattgcagctagaagtgccgataactcgaaccaaaaaccaatcgcgactacagcaacaggacacagcgtttcttcagaacagagtggtttaaccggggaaaagagtcaaatgccaatcaaaattcgcagcgactcagagcctaagagttcagccaaggtacctaatcaaacgcaaagcacagtacacaacgacttggacagtagcactgcgaagaagccggccgcaacagaacagagcggatcaacgggtgaaaggaatcgaaaaccaatcaaagttcatagtgattccgccgcaagaaagacaactccctctatctttaactaa

SEQ ID NO: 5347 - protein, 447 aa, Arabidopsis thaliana
MGYMDLALSYSNQMRIVEAPASGGGLSQNGKFSYGYASSAGKRSSMEDFFETRIDGIDGEIVGLFGVFDGHGGSRAAEYVKRHLFSNLITHPKFISDTKSAIADAYTHTDSELLKSENSHTRDAGSTASTAILVGDRLLVANVGDSRAVICRGGNAFAVSRDHKPDQSDERERIENAGGFVMWAGTWRVGGVLAVSRAFGDRLLKQYVVADPEIQEEKIDDSLEFLILASDGLWDVFSNEEAVAVVKEVEDPEESTKKLVGEAIKRGSADNITCVVVRFLESKSANNNGSSSSEEANQVPTAVRNDSDHKISAKETNQDHTTVNKDLDRNTDSQSLNQKPIAARSADNSNQKPIATTATGHSVSSEQSGLTGEKSQMPIKIRSDSEPKSSAKVPNQTQSTVHNDLDSSTAKKPAATEQSGSTGERNRKPIKVHSDSAARKTTPSIFN

SEQ ID NO: 5348 - DNA, 1251 bp, Arabidopsis thaliana; identical to SEQ ID NO: 866
  CDS (1)..(1251)

SEQ ID NO: 5349 - protein, 416 aa, Arabidopsis thaliana; identical to SEQ ID NO: 867

SEQ ID NO: 5350 - DNA, 1242 bp, Arabidopsis thaliana
  CDS (1)..(1242)
atggctgagatttgttacgagaacgagactatgatgattgaaacgacggcgacggtggtgaagaaggcaacgacgacaacgaggagacgagaacggagctcgtctcaagcagcgagaagaaggagaatggagatccggaggtttaagtttgtttccggcgaacaagaacctgtcttcgtcgacggtgacttacagaggcggaggagaagagaatccaccgtcgcagcctccacctccaccgtgttttacgaaacggcgaaggaagttgtcgtcctatgcgagtctcttagttcaacggttgtggcattgcctgatcctgaagcttatcctaaatacggcgtcgcttcagtctgtggaagaagacgtgaaatggaagacgccgtcgctgtgcatccgtttttttcccgtcatcagacggaatattcatccaccggatttcactattgcggcgtttacgatggccatggctgttcccatgtagcgatgaaatgtagagaaagactacacgagctagtccgtgaagagtttgaagctgatgctgactgggaaaagtcaatggcgcgtagcttcacgcgcatggacatggaggttgttgcgttgaacgccgatggtgcggcaaaatgccggtgcgagcttcagaggccggactgcgacgcggtgggatccactgcggttgtgtctgtccttacgccggagaaaatcatcgtggcgaattgcggtgactcacgtgccgttctctgtcgtaacggcaaagccattgctttatcctccgatcataagccagaccgtccggacgagctagaccggattcaagcagcgggtggtcgtgttatctactgggatggcccacgtgtccttggagtacttgcaatgtcacgagccattggagataattacttgaagccgtatgtaatcagcagaccggaggtaaccgtgacggaccgggccaacggagacgattttcttattctcgcaagtgacggtctttgggacgttgtttcaaacgaaactgcatgtagcgtcgttcgaatgtgtttgagaggaaaagtcaatggtcaagtatcatcatcaccggaaagggaaatgacaggtgtcggcgccgggaatgtggtggttggaggaggagatttgccagataaagcgtgtgaggaggcgtcgctgttgctgacgaggcttgcgttggctagacaaagttcggacaacgtaagtgttgtggtggttgatctacgacgagacacgtag

SEQ ID NO: 5351 - protein, 413 aa, Arabidopsis thaliana
MAEICYENETMMIETTATVVKKATTTTRRRERSSSQAARRRRMEIRRFKFVSGEQEPVFVDGDLQRRRRRESTVAASTSTVFYETAKEVVVLCESLSSTVVALPDPEAYPKYGVASVCGRRREMEDAVAVHPFFSRHQTEYSSTGFHYCGVYDGHGCSHVAMKCRERLHELVREEFEADADWEKSMARSFTRMDMEVVALNADGAAKCRCELQRPDCDAVGSTAVVSVLTPEKIIVANCGDSRAVLCRNGKAIALSSDHKPDRPDELDRIQAAGGRVIYWDGPRVLGVLAMSRAIGDNYLKPYVISRPEVTVTDRANGDDFLILASDGLWDVVSNETACSVVRMCLRGKVNGQVSSSPEREMTGVGAGNVVVGGGDLPDKACEEASLLLTRLALARQSSDNVSVVVVDLRRDT

SEQ ID NO: 5352 - DNA, 1251 bp, Nicotiana tabacum
  CDS (1)..(1251)
atggctgggatgtgttgtggtgttaatttaactgaaacagaagctacaactccagttgagccaagttcagaagctgcaagacgacgtcgtatggagattcatcagttccgtttagctccaccgttggaaaacggaacgaaacgacacaaagtggagaaagttgtagatcaaagcaagagacggaagttggaaactagtgtgacgatttcattgatgtctccgttgggtgtaacggagaaggtagcagagaaagaatttgacgctaaacctttggatctgtcggaatctgatgtttcgtctgttaaagttgatggtgttgaggttgttgctggtgataataatctgtctaagtttggtataacttctgtatgtggaagacgacgcgacatggaagatgcagtagcagttcacccttcgttttgcaagggagaaaatgaaaattcaaacagtttacatttctatggtgtatacgacgggcacggctgttcgcatgtggctatgaaatgcaaagatagaatgcacgagatagtgaaaaacgaggtggagaaaggagaaacccagtggaaggaggtgatgacaaaaagcttctctcaaatggataacgaagttgtccactattcgagtggagctgtaggtggatcgagctctaattgtaggtgcgagcttcagactccgcagtgtgatgcagtcgggtcaactgctgttgtcgcagtggttacttccgagaagattatcgtctctaattgcggtgattctcgtgctgtgctttgtagaaatggcgttgcgattcctctttccatcgatcataagcctgataggccagatgaattgaataggatacaagaagctggtggccgtgttatttattgggatgggccaagagtgcttggagttttagctatgtcacgagcaattggtgacaattatttgaaaccatatgttatatcggaaccagaagtgaccatcacagaacgaaccgatgaagacgagtgtttgatattagccagcgatggactatgggatgttgtctcgaacgagaccgcttgcggcgtggctcgtatgtgcttgcaatcaaggaggccaccatccccacagggtccgccggaaaatgacgtcactgtgaccggtgccggagaaagctccgaccagttgtgttcagatgcatcgattcttttgaccaaattggccttggctaggcacagtactgataatgttagcgttgttgtggttgatttaagaaaagatttgtaa

SEQ ID NO: 5353 - protein, 416 aa, Nicotiana tabacum
MAGMCCGVNLTETEATTPVEPSSEAARRRRMEIHQFRLAPPLENGTKRHKVEKVVDQSKRRKLETSVTISLMSPLGVTEKVAEKEFDAKPLDLSESDVSSVKVDGVEVVAGDNNLSKFGITSVCGRRRDMEDAVAVHPSFCKGENENSNSLHFYGVYDGHGCSHVAMKCKDRMHEIVKNEVEKGETQWKEVMTKSFSQMDNEVVHYSSGAVGGSSSNCRCELQTPQCDAVGSTAVVAVVTSEKIIVSNCGDSRAVLCRNGVAIPLSIDHKPDRPDELNRIQEAGGRVIYWDGPRVLGVLAMSRAIGDNYLKPYVISEPEVTITERTDEDECLILASDGLWDVVSNETACGVARMCLQSRRPPSPQGPPENDVTVTGAGESSDQLCSDASILLTKLALARHSTDNVSVVVVDLRKDL

SEQ ID NO: 5354 - DNA, 1221 bp, Oryza sativa subsp; identical to SEQ ID NO: 882
  CDS (1)..(1221)

SEQ ID NO: 5355 - protein, 406 aa, Oryza sativa subsp; identical to SEQ ID NO: 883

SEQ ID NO: 5356 - DNA, 1176 bp, Oryza sativa subsp; identical to SEQ ID NO: 884
  CDS (1)..(1176)

SEQ ID NO: 5357 - protein, 391 aa, Oryza sativa subsp; identical to SEQ ID NO: 885

SEQ ID NO: 5358 - DNA, 1335 bp, Oryza sativa subsp
  CDS (1)..(1335)
atggtgatggctagcgccggcgtcaacatgccgggtggcgatggggaccacccccccgcggccgcccaggaatgccaccgcctgcgcaggcgccgctacgtccccgccgccgccgccgcgtccgaggacggggacaacagcagcaacggtgggggcgagaagaggagcctcccggcctcctccgcgtcgccgtccccgtccccgacctcgtcggcggcttcctccgactgctcgtccgaccgcgacgacgacgggtgctcctccaccgccggcgccgcggcgcggcggctcccgctcccgtccggggcgtcgacggcggccgcggtgtggcccgtcgcgttcgggtccgtctcgctcgcggggcggatgcgcgacatggaggacgccgtctcgctccggccctccttctgcacctggctcgacggctcgccgatgcacttcttcgccgtcttcgacggccatggcggcccccatgtgtccgcgctgtgccgggagcaaatgcacgtcatcgtggcggaggagatggtggcggaggcggcggcgctgcggcagcggcaaccggcggcgatggaggaggaggaggaggagagggcgtggcgggcggcgctgtcgcggaacttcggccgggtggacgcgctggcggcggtggcgtgcgcgtgcgggcgcgccaccgcgccggtgtgccggtgcccgctgtcggggcagacgggcgccatcatcggctccaccgccgtcgtcgccctcctcgtccgcgaccgcctcgtcgtctccaactgcggcgactcccgcgccgtcctctgccgcgccggcgaccccctccccctctcctccgaccacaagccggaccggccggacgagaaggcgcggatcgaggcggtgggtggccgggtggtgtacctcaacgggccgagggtgcgtggcatcctcgccatgtcgcgagcattagcagaaggaagcagtttacttggcccaaaaggagacaagtacctaaagcctgaagtcatatgtgagccagaaatcaccataaccgtgaggaccgtcgacgacgaatgcctcatcctcgcgagcgatgggatgtgggatgtgatctcaaacgagacggccagcgatgtcgctcgacaatgccttgaagacgggagccccaccagtgggcgtcgcgcagctgggagcggcgaagccgcttccagcagcgcaggtgctccggcagcagcggtaggcgaagaatctgagcctcgctgctaccgtgccgctgctctccttgcgcgcctcgccctcggcagggagagttcagataacattagtgtcgttgtgattgatctgaaaggaagagggtag

SEQ ID NO: 5359 - protein, 444 aa, Oryza sativa subsp
MVMASAGVNMPGGDGDHPPAAAQECHRLRRRRYVPAAAAASEDGDNSSNGGGEKRSLPASSASPSPSPTSSAASSDCSSDRDDDGCSSTAGAAARRLPLPSGASTAAAVWPVAFGSVSLAGRMRDMEDAVSLRPSFCTWLDGSPMHFFAVFDGHGGPHVSALCREQMHVIVAEEMVAEAAALRQRQPAAMEEEEEERAWRAALSRNFGRVDALAAVACACGRATAPVCRCPLSGQTGAIIGSTAVVALLVRDRLVVSNCGDSRAVLCRAGDPLPLSSDHKPDRPDEKARIEAVGGRVVYLNGPRVRGILAMSRALAEGSSLLGPKGDKYLKPEVICEPEITITVRTVDDECLILASDGMWDVISNETASDVARQCLEDGSPTSGRRAAGSGEAASSSAGAPAAAVGEESEPRCYRAAALLARLALGRESSDNISVVVIDLKGRG

SEQ ID NO: 5360 - DNA, 1251 bp, Oryza sativa subsp
  CDS (1)..(1251)
atggccgccgagatctgccgcgaggaggcggccaagtcgatgccggctgcggcggccggcgccacggcgatcgccaggcggcgccgtagggtggagggcttccgctttgcggccggctctctcgagccgccgcaggaggatgctgacgccggtgtggcgcgctgcggcaagcggcagagggtggcgggcgcgcgtgcgggcgcaggcgcggcgaccgcaggcccgtgccgtccgtcggccggcgcgggtttcgggtccaggtggtggccgaggtacggcgtcacctccgtgttcggccggcggcgcgagatggaggacgccgtgtccatcaggccggacttcctgcggggctccacctcttccggcaagcaccacttcttcggcgtctttgacggccatggttgctcccatgtcgcgaggatgtgccaggaccggatgcatgagctcgtcgtcgacgcgtacaagaaggcggtctccggcaaggaggcggcggcggcggcaccggcgtggaaggacgtcatggagaaagggttcgcgcggatggacgatgaggcgacgatctgggccaagagccgcaccggcggtgagccggcctgccgctgcgagctgcagacgccagcacggtgcgaccacgtgggctcgaccgccgttgtcgcggtcgtcggtcctaaccgcgtcgtcgtcgccaactccggcgactcccgtgccgtcctctgccgcgccggcgtccccgtccccctctccgtcgaccacaagccggaccggccggacgagctggagcgcatcaaggcggcgggcggccgcgtcatctactgggacggcgccagggtgctcggcgtcctcgccatgtctcgagccatcggggacggctacctgaagccgtacgtgacgtcggagccggaggtgacggtgacggagcgcgccgacgacgatgagtgcctgatcctggcgagcgacgggctgtgggacgtggtgaccaacgagatggcgtgcgaggtcgtccgggcgtgcttccggagcaacggcccgccgtcgccgccgggatgctcccgccccaaagccgtgctcccgccgcccgccggcgcgtcaggcggcggcggcggcgacgccgtggtgaagggggtcgacaaggccgagtccgacaaggcgtgcgccgacgcggcattgcttctcgcgaagctcgcgatcgcccggcggagcgccgacaacgtgagcgtcgtcatcgtggatctccgccggccggtgccgtga

SEQ ID NO: 5361 - protein, 416 aa, Oryza sativa subsp
MAAEICREEAAKSMPAAAAGATAIARRRRRVEGFRFAAGSLEPPQEDADAGVARCGKRQRVAGARAGAGAATAGPCRPSAGAGFGSRWWPRYGVTSVFGRRREMEDAVSIRPDFLRGSTSSGKHHFFGVFDGHGCSHVARMCQDRMHELVVDAYKKAVSGKEAAAAAPAWKDVMEKGFARMDDEATIWAKSRTGGEPACRCELQTPARCDHVGSTAVVAVVGPNRVVVANSGDSRAVLCRAGVPVPLSVDHKPDRPDELERIKAAGGRVIYWDGARVLGVLAMSRAIGDGYLKPYVTSEPEVTVTERADDDECLILASDGLWDVVTNEMACEVVRACFRSNGPPSPPGCSRPKAVLPPPAGASGGGGGDAVVKGVDKAESDKACADAALLLAKLAIARRSADNVSVVIVDLRRPVP

SEQ ID NO: 5362 - DNA, 1167 bp, Oryza sativa subsp
  CDS (1)..(1167)
atggcggcggcggcggcggcggcggcggcgatatgtggggaggatgaggcggcggcgcgggtggggtgcacgggggaatgggcgggcgggatcgagagggtggatcttggggagaggaaggaggcggtggcggcggcgggggcggggaagaggagcgtctacctgatggactgcgcgccggtgtggggctgcgcgtcgacgcgcggccgcagcgcggagatggaggacgcgagcgccgccgtgccgcggttcgcggacgtgccggtgcggctgctcgccagccggcgcgacctcgacgcgctgggcctcgaagccgacgcgctccgcctgccggcgcacctcttcggcgtgttcgacggccacggcggcgccgaggtggcgaactactgccgtgaaaggatccacgtcgtcttgagcgagatgctgaagcgacttggcaagaatttgggggagatgggcgaggtggacatgaaagagcactgggatgatgtgttcacgaaatgtttccagagagtggacgatgaggtttcagggagagtgaccagggttgtcaatggtggcggtgaggtccggtcagaaccggtgaccgcagagaacgtcggctcgacggcggtcgttgcgcttgtctgctcatctcatgtggtggttgccaactgtggagattcgcgcatcatgctctgccgcgggaaggagcccgtagccttgtcaattgatcacaagcctgacaggaaggatgagcgggcaaggattgaagcccagggaggcaaggtcatccaatggaatggttaccgggtgtccggtatacttgctatgtcccgatcaatcggtgatcgctatctgaaaccatttgtcattccaaaaccggaagttatggtcgttccacgggcgaaggatgatgactgtcttattctagcaagcgatgggctgtgggatgttgtgtcaaatgaagaggcatgcaaagtcgcacgccgacagatccttctgtggcacaagaacaatggcgctgcatcaccattgtctgatgagggtgaaggatccaccgaccctgctgcccaagcagctgccgattatctgatgagactcgctctgaagaaaggcagcgaggataacatcactgtcattgttgtcgacttgaaaccgcgaaagaaactcaagaacatttcataa

SEQ ID NO: 5363 - protein, 388 aa, Oryza sativa subsp
MAAAAAAAAAICGEDEAAARVGCTGEWAGGIERVDLGERKEAVAAAGAGKRSVYLMDCAPVWGCASTRGRSAEMEDASAAVPRFADVPVRLLASRRDLDALGLEADALRLPAHLFGVFDGHGGAEVANYCRERIHVVLSEMLKRLGKNLGEMGEVDMKEHWDDVFTKCFQRVDDEVSGRVTRVVNGGGEVRSEPVTAENVGSTAVVALVCSSHVVVANCGDSRIMLCRGKEPVALSIDHKPDRKDERARIEAQGGKVIQWNGYRVSGILAMSRSIGDRYLKPFVIPKPEVMVVPRAKDDDCLILASDGLWDVVSNEEACKVARRQILLWHKNNGAASPLSDEGEGSTDPAAQAAADYLMRLALKKGSEDNITVIVVDLKPRKKLKNIS

SEQ ID NO: 5364 - DNA, 1194 bp, Oryza sativa subsp; identical to SEQ ID NO: 888
  CDS (1)..(1194)

SEQ ID NO: 5365 - protein, 397 aa, Oryza sativa subsp; identical to SEQ ID NO: 889

SEQ ID NO: 5366 - DNA, 1068 bp, Oryza sativa subsp; identical to SEQ ID NO: 900
  CDS (1)..(1068)

SEQ ID NO: 5367 - protein, 355 aa, Oryza sativa subsp; identical to SEQ ID NO: 901

SEQ ID NO: 5368 - DNA, 1218 bp, Oryza sativa subsp
  CDS (1)..(1218)
atgtcgccgccggccactgccacggctgctgtcgcggcagcggtctccgcctcggccgccgcagccgtctcctcggcgatagacaggcggcgccgcaggatggagatgaggcgcatccgcatcgcaagtgatctcgagctgcaggccggagaggatgggcgccctggaaagcggcagaggctggcgcgcacggcgtctggcgccccgcgtcctgacgaggattcggcgtctgagcggccgagttgtggccgtacggaggagttcccgaggtatggggtcaccgctgtgtgcggccgccgtcgcgagatggaagacgccgtgtccatcagaccggacttcttgccggcatccggcaagttccatttttacggcgtcttcgacggccatggctgctcccatgttgcgacgacgtgccaggacaggatgcacgagattgtcgccgaggagcacaacaagggggcctccggcgaagtggcgccttggagggatgtgatggagaagagcttcgcgcggatggatggggaggtcggtaaccgggcgtccacccgcagcgacgacgagcccgcctgcccgtgcgagcagcagacgccttcgcgtcgcgaccacgcgggttccaccgccgtcgtcgccgtcgttagcccaacacaggtcgtcgtcgccaacgccggcgactcccgcgccgtcatctcccgtgccggcgtccccgtcgcactatccgttgaccacaaacccgatcggcccgacgagctggaacgaatcgaggcggcgggcggccgcgtcatttactgggacggcgcccgggtgctcggcgtcctcgccatgtctcgagccatcggggatgggtaccttaagccgtacgtgacgtcggagccggaggtgaccgtgacggagcgcaccgacgacgatgagtgcctgatcctggccagcgacgggctatgggacgtcgtgaccaacgagatggcgtgtgaggtcgtgagggcgtgcttccacaacaacggtccgccggcaccggccgcgcggccgagcggcgtgccctcctcggccgaggcggcggaaaccgagaacggaggagccgcatcggtgaaggggataagcaaggcggagtcctccgacaaggcgtgctccgacgcggccatgctgctgacgaagttggcgctggcgcggcggagcgcggacaatgtcagcgtcgtcgtcgtagatctccgccggggattgtga

SEQ ID NO: 5369 - protein, 405 aa, Oryza sativa subsp
MSPPATATAAVAAAVSASAAAAVSSAIDRRRRRMEMRRIRIASDLELQAGEDGRPGKRQRLARTASGAPRPDEDSASERPSCGRTEEFPRYGVTAVCGRRREMEDAVSIRPDFLPASGKFHFYGVFDGHGCSHVATTCQDRMHEIVAEEHNKGASGEVAPWRDVMEKSFARMDGEVGNRASTRSDDEPACPCEQQTPSRRDHAGSTAVVAVVSPTQVVVANAGDSRAVISRAGVPVALSVDHKPDRPDELERIEAAGGRVIYWDGARVLGVLAMSRAIGDGYLKPYVTSEPEVTVTERTDDDECLILASDGLWDVVTNEMACEVVRACFHNNGPPAPAARPSGVPSSAEAAETENGGAASVKGISKAESSDKACSDAAMLLTKLALARRSADNVSVVVVDLRRGL

SEQ ID NO: 5370 - DNA, 1134 bp, Oryza sativa subsp
  CDS (1)..(1134)
atggcggcggcggcggcggcggcggcgatatgtggggaggatgagacggcggcgcgggtggggtgcacgggggaatgggcgggcgggatcgagagggtggatcttggggagaggaaggaggcggtggcggcggcgggggcggggaagaggagcgtctacctgatggactgcgcgccggtgtggggctgcgcgtcgacgcgcggccgcagcgcggagatggaggacgcgagcgccggcccgtgcccgcgccggcgcgacctcgacgcgctgggcctcgacgccgaggcgcttcgcctgccggcgcacctcttcggcgtgttcgacggccacggcggcgccgaggtggcgaactactgccgtgaaaggatccacgtcgtcttgagcgaggagctgaagcgacttggcaagaatttgggggagatgggcgaggtggacatgaaagagcactgggatgatgtgttcacgaaatgtttccagagagtggacgatgaggtttcagggagagtgaccagggttgtcaatggtggcggtgaggtccggtcagaaccggtgaccgcagagaacgtcggctcgacggcggtcgttgcgcttgtctgctcatctcatgtggtggttgccaactgtggagattcgcgcatcgtgctctgccgcgggaaggagcccgtagccttgtcaattgatcacaagcctgacaggaaggatgagcgggcaaggattgaagcccagggaggcaaggtcatccaatggaatggttaccgggtgtccggtatacttgctatgtcccgatcaatcggtgatcgctatctgaaaccatttgtcattccaaaaccggaagttatggtcgttccacgggcgaaggatgatgactgtcttattctagcaagcgatgggctgtgggatgttgtgtcaaatgaagaggcatgcaaagtcgcacgccgacagatccttctgtggcacaagaacaatggcgctgcatcaccattgtctgatgagggtgaaggatccaccgaccctgctgcccaagcagctgccgattatctgatgagactcgctctgaagaaaggcagcgaggataacatcactgtcattgttgtcgacttgaaaccgcgaaagaaactcaagaacatttcataa

SEQ ID NO: 5371 - protein, 377 aa, Oryza sativa subsp
MAAAAAAAAICGEDETAARVGCTGEWAGGIERVDLGERKEAVAAAGAGKRSVYLMDCAPVWGCASTRGRSAEMEDASAGPCPRRRDLDALGLDAEALRLPAHLFGVFDGHGGAEVANYCRERIHVVLSEELKRLGKNLGEMGEVDMKEHWDDVFTKCFQRVDDEVSGRVTRVVNGGGEVRSEPVTAENVGSTAVVALVCSSHVVVANCGDSRIVLCRGKEPVALSIDHKPDRKDERARIEAQGGKVIQWNGYRVSGILAMSRSIGDRYLKPFVIPKPEVMVVPRAKDDDCLILASDGLWDVVSNEEACKVARRQILLWHKNNGAASPLSDEGEGSTDPAAQAAADYLMRLALKKGSEDNITVIVVDLKPRKKLKNIS

SEQ ID NO: 5372 - DNA, 1617 bp, Populus tremula
  CDS (1)..(1617)
atggaggagatgtatccggcggttgcagtgccatttagagtaggtaattcagcctgtgaaagtccatccatagatacccaaatggatatcacaagaattttaatggcagacacggctagcttattatctgatactgtaactaaggttcctactgctggggataaggattgtaattgtgcggctccggcttcaaaagaggacaggggaggaagaggagcccctttgttggatatgatctctgaaactgaaagaaattgggttgttggcgatgatgggataacacgggaaagtgaggaagaggattctttgtcgttggagggtgatccaattcttgatagttcttgttctctttcaatggctagtgagacaagtagcttatgtggagaggatctcttgagtttggagaccacctctgaggtaggaacactgagttctgtagaaattaaaaagagcattggtggtgttgatattgttgccaagacagcagatttgggggattcaaacgttgacactgttgtgagcgatcccccttcggtggcaggaagtgttgaggaagaggctggggatggatctgatgcaaagacatcttctgtggttcttcagttgactctggaaagagggaccagtggaacagtctcaagaagtgtttttgaagtggactatgtacccctttggggatttacatctgtttgtggaaggagaccggagatggaagatgcagttgctactgtgccttatttattaaaatttcctattcaaatgctgattggcgaccgattacttgatggaatgaacaagtatttgcctcaccagactgctcatttctttggagtttatgatggtcatggaggctcgcaagtggcaaattattgtcatgatcgtatccattcggctttgtccgaggagatagaatttgttaagaatggcctgagtgatggaagtattaaggatagttgccaggagcagtggaaaaaggctttcaccaattgttttctcaaggttgatgctgaagtcggaggaaaggctggtgccgaaccagttgccccagaaactgttggttctactgctgttgtggccattatttgttcatcccacatcatagtagcaaactgtggagactcacgagcagttctttgtcgcgggaaagaaccaatggcattatcagtggatcataaaccaaaccgagaagatgagtatgcaaggatagaagcagctggaggcaaggtcatacagtggaatgggcatcgtgtctttggtgttctagcaatgtcaaggtctattggtgatagatatttgaaaccatggattattccagaacccgaagttatgtttattcctagggcaagagaagatgaatgtctcattctggcaagtgatggtttgtgggatgtcatgtcaaatgaagaagcatgtgatctggcacgcaaacgaatacttgtctggcacaaaaagaatggcgttgcgctctcgtcctcaaggagcgagggaattgatcctgcagctcaagcagcagctgagttcctctcaaaccgtgcccttcaaaaaggaagcaaggataacatcactgtaatcgtggtggatctgaaagcgcaaaggaagttcaaaaccaaaacatga

SEQ ID NO: 5373 - protein, 538 aa, Populus tremula
MEEMYPAVAVPFRVGNSACESPSIDTQMDITRILMADTASLLSDTVTKVPTAGDKDCNCAAPASKEDRGGRGAPLLDMISETERNWVVGDDGITRESEEEDSLSLEGDPILDSSCSLSMASETSSLCGEDLLSLETTSEVGTLSSVEIKKSIGGVDIVAKTADLGDSNVDTVVSDPPSVAGSVEEEAGDGSDAKTSSVVLQLTLERGTSGTVSRSVFEVDYVPLWGFTSVCGRRPEMEDAVATVPYLLKFPIQMLIGDRLLDGMNKYLPHQTAHFFGVYDGHGGSQVANYCHDRIHSALSEEIEFVKNGLSDGSIKDSCQEQWKKAFTNCFLKVDAEVGGKAGAEPVAPETVGSTAVVAIICSSHIIVANCGDSRAVLCRGKEPMALSVDHKPNREDEYARIEAAGGKVIQWNGHRVFGVLAMSRSIGDRYLKPWIIPEPEVMFIPRAREDECLILASDGLWDVMSNEEACDLARKRILVWHKKNGVALSSSRSEGIDPAAQAAAEFLSNRALQKGSKDNITVIVVDLKAQRKFKTKT

SEQ ID NO: 5374 - DNA, 1617 bp, Populus tremula
  CDS (1)..(1617)
atggaggagatgtatccggcggttgcagtgctatttagagtaggtaattcagcctgtgaaagtccatccatagatacccaaatggatatcacaagaattttaatggcagacacggctagcttattatctgatactgtaactaaggttcctactgctggggataaggattgtaattgtgcggctccggcttcaaaagaggacaggggaggaagaggagcccctttgttggatatgatctctgaaactgaaagaaattgggttgttggcgatgatgggataacacgggaaagtgaggaagaggattctttgtcgttggagggtgatccaattcttgatagttcttgttctctttcaatggctagtgagacaagtagcttatgtggagaggatctcttgagtttggagaccacctctgaggtaggaacactgagttctgtagaaattaaaaagagcattggtggtgttgatattgttgccaagacagcagatttgggggattcaaacgttgacactgttgtgagcgatcccccttcggtggcaggaagtgttgaggaagaggctggggatggatctgatgcaaagacatcttctgtggttcttcagttgactctggaaagagggaccagtggaacagtctcaagaagtgtttttgaagtggactatgtacccctttggggatttacatctgtttgtggaaggagaccggagatggaagatgcagttgctactgtgccttatttattaaaatttcctattcaaatgctgattggcgaccgattacttgatggaatgaacaagtatttgcctcaccagactgctcatttctttggagtttatgatggtcatggaggctcgcaagtggcaaattattgtcatgatcgtatccattcggctttgtccgaggagatagaatttgttaagaatggcctgagtgatggaagtattaaggatagttgccaggagcagtggaaaaaggctttcaccaattgttttctcaaggttgatgctgaagtcggaggaaaggctggtgccgaaccagttgccccagaaactgttggttctactgctgttgtggccattatttgttcatcccacatcatagtagcaaactgtggagactcacgagcagttctttgtcgcgggaaagaaccaatggcattatcagtggatcataaaccaaaccgagaagatgagtatgcaaggatagaagcagctggaggcaaggtcatacagtggaatgggcatcgtgtctttggtgttctagcaatgtcaaggtctattggtgatagatatttgaaaccatggattattccagaacccgaagttatgtttattcctagggcaagagaagatgaatgtctcattctggcaagtgatggtttgtgggatctcatgtcaaatgaagaagcatgtgatctggcacgcaaacgaatacttgtctggcacaaaaagaatggcgttgcgctctcgtcctcaaggagcgagggaattgatcctgcagctcaagcagcagctgagttcctctcaaaccgtgcccttcaaaaaggaagcaaggataacatcactgtaatcgtggtggatctgaaagcgcaaaggaagttcaaaaccaaaacatga

SEQ ID NO: 5375 - protein, 538 aa, Populus tremula
MEEMYPAVAVLFRVGNSACESPSIDTQMDITRILMADTASLLSDTVTKVPTAGDKDCNCAAPASKEDRGGRGAPLLDMISETERNWVVGDDGITRESEEEDSLSLEGDPILDSSCSLSMASETSSLCGEDLLSLETTSEVGTLSSVEIKKSIGGVDIVAKTADLGDSNVDTVVSDPPSVAGSVEEEAGDGSDAKTSSVVLQLTLERGTSGTVSRSVFEVDYVPLWGFTSVCGRRPEMEDAVATVPYLLKFPIQMLIGDRLLDGMNKYLPHQTAHFFGVYDGHGGSQVANYCHDRIHSALSEEIEFVKNGLSDGSIKDSCQEQWKKAFTNCFLKVDAEVGGKAGAEPVAPETVGSTAVVAIICSSHIIVANCGDSRAVLCRGKEPMALSVDHKPNREDEYARIEAAGGKVIQWNGHRVFGVLAMSRSIGDRYLKPWIIPEPEVMFIPRAREDECLILASDGLWDLMSNEEACDLARKRILVWHKKNGVALSSSRSEGIDPAAQAAAEFLSNRALQKGSKDNITVIVVDLKAQRKFKTKT

SEQ ID NO: 5376 - DNA, 1617 bp, Populus tremula
  CDS (1)..(1617)
atggaggagatgtatccggcggttgcagtgccatttagagtaggtaattcagcctgtgaaagtccatccataaatacccaaatggatatcacaagaattttaatggcagacacggctagcttattatctgatactgtaactaaggttcctactgctggggataaggattgtaattgtgcggctccggcttcaaaagaggacaggggaggaagaggagcccctttgttggatatgatctctgaaactgaaagaaattgggttgttggcgatgatgggataacacgggaaagtgaggaagaggattctttgtcgttggagggtgatccaattcttgatagttcttgttctctttcagtggctagtgagacaagtagcttatgtggagaggatctcttgagtttggagaccgcctctgaggtaggaacactgagttctgtagaaattaaaaagagcattggtggtgttgatattgttgccaagacagcagatttgggggattcaaacgttgacactgttgtgagcgatcgcccttcggtggcaggaagtgttgaggaagaggctggggatggatctgatgcaaagacatcttctgtggttcttcagttgactctggaaagagggaccagtggaacagtctcaagaagtgtttttgaagtggactatgtacccctttggggatttacatctgtttgtggaaggagaccggagatggaagatgcagttgctactgtgccttatttattaaaatttcctattcaaatgctgattggcgaccgattacttgatggaatgaacaagtatttgcctcaccagactgctcatttctttggagtttatgatggtcatggaggctcgcaagtggcaaattattgtcatgatcgtatccattcggctttgtccgaggagatagaatttgttaagaatggcctgagtgatggaagtattaaggatagttgccagaagcagtggaaaaatgctttcaccaattgttttctcaaggttgatgctgaagtcggaggaaaggctggtgccgaaccagttgccccagaaactgttggttctactgctgttgtggccattatttgttcatcccacatcatagtagcaaactgtggagactcacgagcagttctttgtcgcgggaaagaaccaatggcattatcagtggatcataaaccaaaccgagaagatgagtatgcaaggatagaagcagctggaggcaaggtcatacagtggaatgggcatcgtgtctttggtgttctagcaatgtcaaggtctattggtgatagatatttgaaaccatggattattccagaacccgaagttatgtttattcctagggcaagagaagatgaatgcctcattctggcaagtgatggtttgtgggatgtcatgtcaaatgaagaagcatgtgatctggcacgcaaacgaatacttgtctggcacaaaaagaatggcgttgcgctctcgtcctcaaggagcgagggaattgatcctgcagctcaagcagcagctgagttcctctcaaaccgtgcccttcaaaaaggaagcaaggataacatcactgtaatcgtggtggatctgaaagcgcaaaggaagttcaaaaccaaaacatga

SEQ ID NO: 5377 - protein, 538 aa, Populus tremula
MEEMYPAVAVPFRVGNSACESPSINTQMDITRILMADTASLLSDTVTKVPTAGDKDCNCAAPASKEDRGGRGAPLLDMISETERNWVVGDDGITRESEEEDSLSLEGDPILDSSCSLSVASETSSLCGEDLLSLETASEVGTLSSVEIKKSIGGVDIVAKTADLGDSNVDTVVSDRPSVAGSVEEEAGDGSDAKTSSVVLQLTLERGTSGTVSRSVFEVDYVPLWGFTSVCGRRPEMEDAVATVPYLLKFPIQMLIGDRLLDGMNKYLPHQTAHFFGVYDGHGGSQVANYCHDRIHSALSEEIEFVKNGLSDGSIKDSCQKQWKNAFTNCFLKVDAEVGGKAGAEPVAPETVGSTAVVAIICSSHIIVANCGDSRAVLCRGKEPMALSVDHKPNREDEYARIEAAGGKVIQWNGHRVFGVLAMSRSIGDRYLKPWIIPEPEVMFIPRAREDECLILASDGLWDVMSNEEACDLARKRILVWHKKNGVALSSSRSEGIDPAAQAAAEFLSNRALQKGSKDNITVIVVDLKAQRKFKTKT

SEQ ID NO: 5378 - DNA, 1617 bp, Populus tremula
  CDS (1)..(1617)
atggaggagatgtatccggcggttgcagtgccatttagagtaggtaattcagcctgtgaaagtccatccataaatacccaaatggatatcacaagaattttaatggcagacacggctagcttattatctgatactgtaactaaggttcctactgctggggataaggattgtaattgtgcggctccggcttcaaaagaggacaggggaggaagaggagcccctttgttggatatgatctctgaaactgaaagaaattgggttgttggcgatgatgggataacacgggaaagtgaggaagaggattctttgtcgttggagggtgatccaattcttgatagttcttgttctctttcagtggctagtgagacaagtagcttatgtggagaggatctcttgagtttggagaccgcctctgaggtaggaacactgagttctgtagaaattaaaaagagcattggtggtgttgatattgttgccaagacagcagatttgggggattcaaacgttgacactgttgtgagcgatcgcccttcggtggcaggaagtgttgaggaagaggctggggatggatctgatgcaaagacatcttctgtggttcttcagttgactctggaaagagggaccagtggaacagtctcaagaagtgtttttgaagtggactatgtacccctttggggatttacatctgtttgtggaaggagaccggagatggaagatgcagttgctactgtgccttatttattaaaatttcctattcaaatgctgattggcgaccgattacttgatggaatgagcaagtatttgcctcaccagactgctcatttctttggagtttatgatggtcatggaggctcgcaagtggcaaattattgtcatgatcgtatccattcggctttgtccgaggagatagaatttgttaagaatggcctgagtgatggaagtattaaggatagttgccagaagcagtggaaaaatgctttcaccaattgttttctcaaggttgatgctgaagtcggaggaaaggctggtgccgaaccatttgccccagaaactgttggttctactgctgttgtggccattatttgttcatcccacatcatagtagcaaactgtggagactcacgagcagttctttgtcgcgggaaagaaccaatggcattatcagtggatcataaaccaaaccgagaagatgagtatgcaaggatagaagcagctggaggcaaggtcatacagtggaatgggcatcgtgtctttggtgttctagcaatgtcaaggtctattggtgatagatatttgaaaccatggattattccagaacccgaagttatgtttattcctagggcaagagaagatgaatgcctcattctggcaagtgatggtttgtgggatgtcatgtcaaatgaagaagcatgtgatctggcacgcaaacgaatacttgtctggcacaaaaagaatggcgttgcgctctcgtcctcaaggagcgagggaattgatcctgcagctcaagcagcagctgagttcctctcaaaccgtgcccttcaaaaaggaagcaaggataacatcactgtaatcgtggtggatctgaaagcgcaaaggaagttcaaaaccaaaacatga

SEQ ID NO: 5379 - protein, 538 aa, Populus tremula
MEEMYPAVAVPFRVGNSACESPSINTQMDITRILMADTASLLSDTVTKVPTAGDKDCNCAAPASKEDRGGRGAPLLDMISETERNWVVGDDGITRESEEEDSLSLEGDPILDSSCSLSVASETSSLCGEDLLSLETASEVGTLSSVEIKKSIGGVDIVAKTADLGDSNVDTVVSDRPSVAGSVEEEAGDGSDAKTSSVVLQLTLERGTSGTVSRSVFEVDYVPLWGFTSVCGRRPEMEDAVATVPYLLKFPIQMLIGDRLLDGMSKYLPHQTAHFFGVYDGHGGSQVANYCHDRIHSALSEEIEFVKNGLSDGSIKDSCQKQWKNAFTNCFLKVDAEVGGKAGAEPFAPETVGSTAVVAIICSSHIIVANCGDSRAVLCRGKEPMALSVDHKPNREDEYARIEAAGGKVIQWNGHRVFGVLAMSRSIGDRYLKPWIIPEPEVMFIPRAREDECLILASDGLWDVMSNEEACDLARKRILVWHKKNGVALSSSRSEGIDPAAQAAAEFLSNRALQKGSKDNITVIVVDLKAQRKFKTKT

SEQ ID NO: 5380 - DNA, 1499 bp, Medicago sativa
  CDS (87)..(1232)
aacaaacaaagaccaattccaacgttaaattatttgactcaaacgaaaaaaccttaaacatcgtgaacaacaaaaaaaccttaaacatgtcttgctccgtcgcggtttcgaattcgccggtgttttcaccttcttcatctcttttctgcaacaaatctgaaacgttaacgttatctctttctcatctcaaaccatcttcaacaacaacaacaacaacaacgtcttcttcatcgtcttcttcctcgccttctccttgttcttcaccttcttcacctttttgtcttcggttaccgaaactacccttggtttttacgtctaacaaagattctgggtcgcagaatgatgctgttttgaagaggaaaagacctaccaggcttaatatacctgtttctgaacatgctttttgtgttccggcgacaccgtctgcggtggcgagggatgttgttgaggcggagggagatgggtattctgtttattgtaagagagggaggagggagtatatggaagatcgttatacagctggggttaatcttcgtggtgaaaacaatttggctttttttggagtatttgatggccatggaggtgccaaagccgctgaatttgcgcgaaataacttagaaaagaacatcttggacgaagttatcatgaccgacgaagatgatgttgaggaggcagtgaagcgcggttacctcaataccgattctgagttcatgaaaaaagatctacatggtggctcttgttgtgtaacagcattcattaggaatggtaacttagttgtgtctaacgctggtgattgccgtgctgttattagtagaggaggggttgctgaggcactaacatctgatcaccgaccttcaagggaagatgaaaaggacagaattgagaccctgggtggttatgttgatttatgtcgcggtgtttggaggattcaaggatctcttgctgtatcaagaggaatcggagaccgacacttgaaacaatgggtgacagcagagcctgagactaaagttattagaattgaacctgaacatgacttgttaatattagcttccgatggattatgggataaggttagtaatcaggaagcagtagacattgctcgtcaattttgcgtaggaaataacaaccaacaaccgttgatggcctgtaaaaagcttgcacaattgtctgtttcaagaggctctttggatgataccagtgtcatgataatcaaattcaaacactatgtttagaggttcattggtagaacagaagaagatgatggtgcctgatgattagagattagcctattcttttctgtatatatattaattgttactgattaattttaaaatgatgacatttattggtgaatttttgtacccgtagatggggggagtagagattaacaaagccatttagccatttgtttactagaatatttatctaataatcatgtaataactttatagattatctaattattttggtaataattcattcattcttttatactggat

SEQ ID NO: 5381 - protein, 381 aa, Medicago sativa; identical to SEQ ID NO: 913

SEQ ID NO: 5382 - DNA, 1536 bp, Arabidopsis thaliana
  CDS (1)..(1536)
atggaggagatgactcccgcagttgcaatgactcttagcttagcagccaacaccatgtgtgaatcatcacctgtcgagatcactcagctaaagaacgttactgatgcagctgacttgttatctgattctgaaaatccaagcttttgcaacggagggactgaatgcactatggaagatgtttctgaactggaagaggtaggtgaacaggatttgttgaaaactttatccgatacgagaagcgggtcttccaatgtttttgatgaagacgatgtattgtctgttgtggaggataatagtgctgtcataagtgagggcttgttagttgttgatgcaggctctgaattaagcttgtctaatacagctatggaaatagataacgggcgagttcttgcaaccgcgattatcgtaggcgaatcaagcattgagcaggttcccaccgcggaagttcttatcgcgggtgtaaatcaggataccaatacttcggaggttgtcattagattgccagatgaaaatagtaatcatctggtgaaagggagaagtgtttatgaactagattgtataccgctttggggcacggtttccattcaagggaatagatctgagatggaggatgcttttgccgtgtcacctcattttctgaaactacccatcaaaatgcttatgggggaccatgagggtatgagtccaagcctcacacacctcaccggtcattttttcggtgtttatgatggtcatggaggccataaggttgctgactattgccgagatagactccattttgctttggctgaagaaatagaacgtataaaagacgaattatgcaagaggaatacaggagagggtaggcaggtgcagtgggataaagtcttcacgagttgttttctaactgtcgatggtgagattgaaggaaaaattggtagagccgttgttggttcttctgataaggttcttgaggctgttgcgtctgagaccgtaggatcaactgctgttgttgccttggtttgctcatcacatatagtagtttctaactgcggtgattcgagggcggttttattccgtggcaaagaagccatgcccttgtcagttgatcacaaaccagatagagaggatgaatatgcaagaatagaaaatgctggaggcaaagttatacaatggcaaggcgcacgtgtttttggtgttctcgccatgtctaggtccatcggtgacagatatctgaagccatatgtgatcccagaaccggaagtgacattcatgcctcggtcaagagaagacgagtgtctcatactagccagtgacggtctttgggatgtaatgaacaaccaagaagtctgcgaaatagcaaggagacggatattgatgtggcacaagaagaacggtgcaccgcctctagcagagagaggcaaaggaatagatccagcttgccaagccgcagctgactacctctcaatgcttgctctacaaaaaggaagtaaagacaacatctccatcattgtgattgacttgaaagctcaaagaaagttcaagaccagaacctga

SEQ ID NO: 5383 - protein, 511 aa, Arabidopsis thaliana
MEEMTPAVAMTLSLAANTMCESSPVEITQLKNVTDAADLLSDSENPSFCNGGTECTMEDVSELEEVGEQDLLKTLSDTRSGSSNVFDEDDVLSVVEDNSAVISEGLLVVDAGSELSLSNTAMEIDNGRVLATAIIVGESSIEQVPTAEVLIAGVNQDTNTSEVVIRLPDENSNHLVKGRSVYELDCIPLWGTVSIQGNRSEMEDAFAVSPHFLKLPIKMLMGDHEGMSPSLTHLTGHFFGVYDGHGGHKVADYCRDRLHFALAEEIERIKDELCKRNTGEGRQVQWDKVFTSCFLTVDGEIEGKIGRAVVGSSDKVLEAVASETVGSTAVVALVCSSHIVVSNCGDSRAVLFRGKEAMPLSVDHKPDREDEYARIENAGGKVIQWQGARVFGVLAMSRSIGDRYLKPYVIPEPEVTFMPRSREDECLILASDGLWDVMNNQEVCEIARRRILMWHKKNGAPPLAERGKGIDPACQAAADYLSMLALQKGSKDNISIIVIDLKAQRKFKTRT

SEQ ID NO: 5384 - DNA, 1613 bp, Mesembryanthemum crystallinum
  CDS (59)..(1201)
cactctctctctcctccctccccccactttctctctcctcgccttcatatctccatccatggactcctccgacagcggcgaagaactccggccatcaccgccggaatcagagtcggaatcctggacaagctcaagcgtgatgttctccggagaagattctagaagcagcatcggcgacacctcagcgaccagcagcggcagctccggcgagatcccggaggcgatggtcgtcggagttcggccgccggcgccggaaatatccggcgaaactccggcgagggagcggtgtgtaggacggccggatagggtgagctgggggtccacgtcggtgattgggaggagggcggagatggaggacgccattgctgtggctcctgagttcatctcccccacgtgcggtcacgtgggagggtgtacggcaccggattctagaagctccggccatgccttgcctcttcatttcttcggcgtttatgacggccacggtggttcccaggttgctggattttgtgctcaaaggatgcatgaaattatagctgaggagtggaatcaggaaggaattgatgcatatgaatggcagaagaggtggaaagaagccttcatcagtggctttaagagggctgatgatcagattaccacagaagttatagcgtcagagatggttggatccactgctgtcgtagcagttgtgtcgggttgtcaaattattttgtccaactgtggagattcaagggccgtgctttgtagaaggacacagaccattcctttgaccgttgatcacaagccagatagagaagacgaattattgagaattgaaggacaaggtggcagagtcataaactggaatggtgctagggtgtttggagtccttgcaatgtctcgagccataggtgataggtatatgagccctttcataattccagtccctgaggtcactttcacgacaagaagtgatgaagatgagtgtttgatattggcgagtgacgggctttgggatgtcatatcgaacgatgaagctggggaggtggctcgccgccttctaaggcgtagacgcagggccatggtagcaggtgatatttgtccagcacaagtagttgctgataagcttacccagcttgcaattggaagaaacagttctgacaacatttctgtcatcgttgttgatctaaagtcgagaagaagacatcaagcaacacaatgacaagcagtgtgttcaatattcatttatttcgcgtctgatgataactgaactttccagttgcgtttgggaatctctaagaggataaggcagatccgtcaacaatttcataacatacgaagttgacagaaccttcctagatattaatatcatagttgttttcaacctgtacaaaattgacattgctgatgaattgttgctcctaacaatcaaattgtattacctcaaaatactagatcaaccctccattttagttggtttgatcaacattctcacagtggacaatgaagaagaagcagaaatgaaaagaaaggaatgtattcttcttcctaaatgttttcattcttggttggacgacattgtgtccctgacattgagcttagatcatgtaaatatcagctgcatttctccagcc

SEQ ID NO: 5385 - protein, 380 aa, Mesembryanthemum crystallinum
MDSSDSGEELRPSPPESESESWTSSSVMFSGEDSRSSIGDTSATSSGSSGEIPEAMVVGVRPPAPEISGETPARERCVGRPDRVSWGSTSVIGRRAEMEDAIAVAPEFISPTCGHVGGCTAPDSRSSGHALPLHFFGVYDGHGGSQVAGFCAQRMHEIIAEEWNQEGIDAYEWQKRWKEAFISGFKRADDQITTEVIASEMVGSTAVVAVVSGCQIILSNCGDSRAVLCRRTQTIPLTVDHKPDREDELLRIEGQGGRVINWNGARVFGVLAMSRAIGDRYMSPFIIPVPEVTFTTRSDEDECLILASDGLWDVISNDEAGEVARRLLRRRRRAMVAGDICPAQVVADKLTQLAIGRNSSDNISVIVVDLKSRRRHQATQ

SEQ ID NO: 5386 - DNA, 1047 bp, Musa balbisiana
  CDS (1)..(1047)
atggaatccgatcccccggggatccaacctcgccgcgcgcgggacgaggaccccaccaccgccgcatcatcctccgctgagatcccggctccgacgggcctcgtggcgaagccggtggaggcgaggggcaggtgcttgtggcggaagggtggggcagcggcggtgtcgtggggggccgcgtcgacggtggggcggcgcaaggagatggaggacgccgtcgcggtggcgccggcgttcatggccctcacgtgcgagcgggtcggcgggtgcgcggcgccgccgggatcgggcgaggtctcgcacgtgcggttcttcggtgtatacgacggccacgggggcgcgcaggtggctgattactgtgcaaaaagagttcatgaggtggtggcagaggagtgggataggatacagaatccagagtgctggaaaaggaggtgggagacagcattccatgatggcttcaagagggttgataatgaggtcattgatgaagctgtagccccagatataattgggtcaactgctgttgtcgtagtaatatcaggttgtcaaatcatctcttctaattgtggtgactcaagggcacttctctgtcgtgggaatcaaagaatccagttaaccattgatcataagcctgacagagaggatgaactcatgcgcattgagagcctaggtggaagagtcataaactggcaagggtgtagaatttctggtgttcttgcagtgtcccggtctataggtgatcgatatatgagaccttgggttattcctgtacccgagatcagttttatgtctcgaagcgaggatgatgactgcttgattttggctagtgatggattatgggatgttatgtccattgaagaggttggggacatggcttgtcgtcattttaggtggcagcggcggaatggactagtagatggagtgtcacctgcacaggctgttgctgatcatcttaccgagctggcttatcagaaaaacagttccgacaacatatctgtagtggtagtggacttgaagtccaggagcaggcgtaggcctagacagtga

SEQ ID NO: 5387 - protein, 348 aa, Musa balbisiana
MESDPPGIQPRRARDEDPTTAASSSAEIPAPTGLVAKPVEARGRCLWRKGGAAAVSWGAASTVGRRKEMEDAVAVAPAFMALTCERVGGCAAPPGSGEVSHVRFFGVYDGHGGAQVADYCAKRVHEVVAEEWDRIQNPECWKRRWETAFHDGFKRVDNEVIDEAVAPDIIGSTAVVVVISGCQIISSNCGDSRALLCRGNQRIQLTIDHKPDREDELMRIESLGGRVINWQGCRISGVLAVSRSIGDRYMRPWVIPVPEISFMSRSEDDDCLILASDGLWDVMSIEEVGDMACRHFRWQRRNGLVDGVSPAQAVADHLTELAYQKNSSDNISVVVVDLKSRSRRRPRQ

SEQ ID NO: 5388 - DNA, 1251 bp, Oryza sativa subsp
  CDS (1)..(1251)
atggccgccgagatctgccgcgaggaggcggccaagtcgatgccggctgcggcggccggcgccacggcgatcgccaggcggcgccgtagggtggagggcttccgctttgcggccggctctctcgagccgccgcaggaggatgctgacgccggtgtggcgcgctgcggcaagcggcagagggtggcgggcgcgcgtgcgggcgcaggcgcggcgaccgcaggcccgtgccgtccgtcggccggcgcggagttcgggtccaggtggtggccgaggtacggcgtcacctccgtgttcggccggcggcgcgagatggaggacgccgtgtccatcaggccggacttcctgcggggctccacctcttccggcaagcaccacttcttcggcgtctttgacggccatggttgctcccatgtcgcgaggatgtgccaggaccggatgcatgagctcgtcgtcgacgcgtacaagaaggcggtctccggcaaggaggcggcggcggcggcaccggcgtggaaggacgtcatggagaaagggttcgcgcggatggacgatgaggcgacgatctgggccaagagccgcaccggcggtgagccggcctgccgctgcgagctgcagacgccagcacggtgcgaccacgtgggctcgaccgccgttgtcgcggtcgtcggtcctaaccgcgtcgtcgtcgccaactccggcgactcccgtgccgtcctctgccgcgccggcgtccccgtccccctctccgtcgaccacaagccggaccggccggacgagctggagcgcatcaaggcggcgggcggccgcgtcatctactgggacggcgccagggtgctcggcgtcctcgccatgtctcgagccatcggggacggctacctgaagccgtacgtgacgtcggagccggaggtgacggtgacggagcgcgccgacgacgatgagtgcctgatcctggcgagcgacgggctgtgggacgtggtgaccaacgagatggcgtgcgaggtcgtccgggcgtgcttccggagcaacggcccgccgtcgccgccgggatgctcccgccccaaagccgtgctcccgccgcccgccggcgcgtcaggcggcggcggcggcgacgccgtggtgaagggggtcgacaaggccgagtccgacaaggcgtgcgccgacgcggcattgcttctcgcgaagctcgcgatcgcccggcggagcgccgacaacgtgagcgtcgtcgtcgtggatctccgccggccggtgccgtga

SEQ ID NO: 5389 - protein, 416 aa, Oryza sativa subsp
MAAEICREEAAKSMPAAAAGATAIARRRRRVEGFRFAAGSLEPPQEDADAGVARCGKRQRVAGARAGAGAATAGPCRPSAGAEFGSRWWPRYGVTSVFGRRREMEDAVSIRPDFLRGSTSSGKHHFFGVFDGHGCSHVARMCQDRMHELVVDAYKKAVSGKEAAAAAPAWKDVMEKGFARMDDEATIWAKSRTGGEPACRCELQTPARCDHVGSTAVVAVVGPNRVVVANSGDSRAVLCRAGVPVPLSVDHKPDRPDELERIKAAGGRVIYWDGARVLGVLAMSRAIGDGYLKPYVTSEPEVTVTERADDDECLILASDGLWDVVTNEMACEVVRACFRSNGPPSPPGCSRPKAVLPPPAGASGGGGGDAVVKGVDKAESDKACADAALLLAKLAIARRSADNVSVVVVDLRRPVP

SEQ ID NO: 5390 - DNA, 1071 bp, Oryza sativa subsp; identical to SEQ ID NO: 938
  CDS (1)..(1071)

SEQ ID NO: 5391 - protein, 356 aa, Oryza sativa subsp; identical to SEQ ID NO: 939

SEQ ID NO: 5392 - DNA, 1164 bp, Oryza sativa subsp
  CDS (1)..(1164)
atggcggcggcggcggcggcggcggcgatatgtggggaggatgagacggcggcgcgggtggggtgcacgggggaatgggcgggcgggatcgagagggtggatcttggggagaggaaggaggcggtggcggcggcgggggcggggaagaggagcgtctacctgatggactgcgcgccggtgtggggctgcgcgtcgacgcgcggccgcagcgcggagatggaggacgcgagcgccgccgtgccgcggttcgcggacgtgccggtgcggctgctcgccagccggcgcgacctcgacgcgctgggcctcgacgccgacgcgctccgcctgccggcgcacctcttcggcgtgttcgacggccacggcggcgccgaggtggcgaactactgccgtgaaaggatccacgtcgtcttgagcgaggagctgaagcgacttggcaagaatttgggggagatgggcgaggtggacatgaaagagcactgggatgatgtgttcacgaaatgtttccagagagtggacgatgaggtttcagggagagtgaccagggttgtcaatggtggcggtgaggtccggtcagaaccggtgaccgcagagaacgtcggctcgacggcggtcgttgcgcttgtctgctcatctcatgtggtggttgccaactgtggagattcgcgcatcgtgctctgccgcgggaaggagcccgtagccttgtcaattgatcacaagcctgacaggaaggatgagcgggcaaggattgaagcccagggaggcaaggtcatccaatggaatggttaccgggtgtccggtatacttgctatgtcccgatcaatcggtgatcgctatctgaaaccatttgtcattccaaaaccggaagttatggtcgttccacgggcgaaggatgatgactgtcttattctagcaagcgatgggctgtgggatgttgtgtcaaatgaagaggcatgcaaagtcgcacgccgacagatccttctgtggcacaagaacaatggcgctgcatcaccattgtctgatgagggtgaaggatccaccgaccctgctgcccaagcagctgccgattatctgatgagactcgctctgaagaaaggcagcgaggataacatcactgtcattgttgtcgacttgaaaccgcgaaagaaactcaagaacatttcataa

SEQ ID NO: 5393 - protein, 387 aa, Oryza sativa subsp
MAAAAAAAAICGEDETAARVGCTGEWAGGIERVDLGERKEAVAAAGAGKRSVYLMDCAPVWGCASTRGRSAEMEDASAAVPRFADVPVRLLASRRDLDALGLDADALRLPAHLFGVFDGHGGAEVANYCRERIHVVLSEELKRLGKNLGEMGEVDMKEHWDDVFTKCFQRVDDEVSGRVTRVVNGGGEVRSEPVTAENVGSTAVVALVCSSHVVVANCGDSRIVLCRGKEPVALSIDHKPDRKDERARIEAQGGKVIQWNGYRVSGILAMSRSIGDRYLKPFVIPKPEVMVVPRAKDDDCLILASDGLWDVVSNEEACKVARRQILLWHKNNGAASPLSDEGEGSTDPAAQAAADYLMRLALKKGSEDNITVIVVDLKPRKKLKNIS

SEQ ID NO: 5394 - DNA, 1745 bp, Prunus avium
  CDS (122)..(1402)
gaaaaatcccttatatttctgtagcctcattccctccctctcctctcaggtctcaggagtagagaagaagagtttgttgtgatttgtgttgtagtttgattgagtttttgtttgaatttcaatggctggaatttgctgcggtgttgtcggagaagctgaggcgtcgactacgattgaagcaagctcaaggaattcgaggcgcaggagattggagctcctaccgcttaaatacatagctgacatggccgtgaaaccgtcgacggtggagaacagccggaagcggcagaagatcgatctgtaccgttcatcgtcgtcggtgccacacaacgcagtggaaagctcctcggaagcgaaatcgaaatcggaaagcgaagggtcgaagctgaacgcgaccgtgcgttttggcgacgatgattttgatgctgtgaatacacgtggagatcatcaggagtctaaatctgtgcgtgtggacaacgaagcggtgcaggtgcaggcactgcaggggagccctcggtttggtatgacttcggtttgtgggagaagacgagacatggaagacgccgtttcgattcacccttcgttctaccaaaacgacggtccagactctaatggagcccacttctatggagttttcgacggccatggctgctctcatgtggccttgaagtgcaaggatcggttgcatgaaatcgtgaagcaagagctcgaaacggaaggcgggtacatacagtggaagggcgcgatggagcgaagcttcgcgaagatggacgatgaggtccaggaaggaaacctggttgctcaaggcccgaattgccggtgcgagcttcagactccgcagtgcgacgccgttggatctacggcggtcgttgctgtcgtcactccggagaaaattatcgtctctaattgtggcgattcccgcgccgtgctttgccgaaacggcgtcgccgtccctctttcctccgatcataagccggatcgacccgatgagctggttcggatcgaagccgcgggcgggcgggtcatctactgggacggtgcgagagtcctgggagttttagccatgtcgagagccattggcgacaactatctgaaaccgtacgtgatatcggaaccggaggtgacgatcatggatcggtcggcggaggacgagtgtctgattctggcgagcgacggcctctgggacgtggtatcaaacgacaccgcgtgcggagtcgttcgcatgtgtttgcgcgcgcagaagacgacttcgcattcggagtcgtctggaagagacgcggcagtgaggtccgacaaggcgtgttcggacgcctccatcttgttgaccaagttggccttggctaggcagagcagcgacaacgtcagcgttgtcgtggtggatttgagaagacccgggaggtgctaaatccggcgtcgttttaattacatgaagtatgaagatgatataatactaatctagccaacggtcattggaagagggaaattaccagagtggccttcgattgttaattgttagttgtaggctgctcttattttctcttaattaattaacaagtttggaggaaatttttatttttttaataaggtgtggtttggggccttttttcttgatttttatttttattttaaaaggttttacaatttcacattactgcagaagtttgcagaaatgtgatgttatacgaagttatatagtgaatataattgcataatagattagtttttctcaaaaaaaaaaaaaaaaaaaa

SEQ ID NO: 5395 - protein, 426 aa, Prunus avium; identical to SEQ ID NO: 941

SEQ ID NO: 5396 - DNA, 1455 bp, Oryza sativa subsp
  CDS (1)..(1455)
atggtgatggctagcgccggcgtcaacatgccgggtggcgatggggaccacccccccgcggccgcccaggaatgccaccgcctgcgcaggcgccgctacgtccccgccgccgccgccgcgtccgaggacggggacaacagcagcaacggtgggggcgagaagaggagcctcccggcctcctccgcgtcgccgtccccgtccccgacctcgtcggcggcttcctccgactgctcgtccgaccgcgacgacgacgggtgctcctccaccgccggcgccgcggcgcggcggctcccgctcccgtccggggcgtcgacggcggccgcggtgtggcccgtcgcgttcgggtccgtctcgctcgcggggcggatgcgcgacatggaggacgccgtctcgctccggccctccttctgcacctggctcgacggctcgccgatgcacttcttcgccgtcttcgacggccatggcggcccccatgtgtccgcgctgtgccgggagcaaatgcacgtgatcgtggcggaggagatggtggcggaggcggcggcgctgcggcagcggcaaccggcggcgatggaggaggaggaggaggagagggccgtggcgggcggcgctgtcgcggagcttcggccgggtggacgcgctggcggcggtggcgtgcgcgtgcgggcgcgccaccgtgccggcgtgccgtgcccgctgtcggggcagacgggcgccatcatcggctccaccgccgtcgtcgccctcctcgtccgcgaccgcctcgtcgtctccaactgcggcgactcccgcgccgtcctctgccgcgccggcgaccccctccccctctcctccgaccacaagggccttaatccatcgctttcctggagggggacacgtgttgctctcgcgcggggcacgtggggggataagactggtcagagtgtggggccagctgctttgctgctgtctggtggggcccacccggaccggccggacgagaaggcgcggatcgaggcggtgggtggccgggtggtgtacctcaacgggccgagggtgcgtggcatcctcgccatgtcgcgagcattagcagaaggaagcagtttacttggcccaaaaggagacaagtacctaaagcctgaagtcatatgtgagccagacatcaccataaccgtgaggaccgtcgacgacgaatgcctcatcctcgcgagcgatgggatgtgggatgtgatctcaaacgagacggccagcgatgtcgctcgacaatgccttgaagacgggagccccaccagtgggcgtcgcgcagctaggagcggcgaagccgcttccagcagcgccggtgctccggcagcagcggtaggccaagaatctgagcctcgctgctaccgtgccgctgctctccttgcgcgcctcgccctcggcagggagagttcagataacattagtgtcgttgtgattgatctgaaaggaagagggtag

SEQ ID NO: 5397 - protein, 484 aa, Oryza sativa subsp
MVMASAGVNMPGGDGDHPPAAAQECHRLRRRRYVPAAAAASEDGDNSSNGGGEKRSLPASSASPSPSPTSSAASSDCSSDRDDDGCSSTAGAAARRLPLPSGASTAAAVWPVAFGSVSLAGRMRDMEDAVSLRPSFCTWLDGSPMHFFAVFDGHGGPHVSALCREQMHVIVAEEMVAEAAALRQRQPAAMEEEEEERAVAGGAVAELRPGGRAGGGGVRVRARHRAGVPCPLSGQTGAIIGSTAVVALLVRDRLVVSNCGDSRAVLCRAGDPLPLSSDHKGLNPSLSWRGTRVALARGTWGDKTGQSVGPAALLLSGGAHPDRPDEKARIEAVGGRVVYLNGPRVRGILAMSRALAEGSSLLGPKGDKYLKPEVICEPDITITVRTVDDECLILASDGMWDVISNETASDVARQCLEDGSPTSGRRAARSGEAASSSAGAPAAAVGQESEPRCYRAAALLARLALGRESSDNISVVVIDLKGRG

SEQ ID NO: 5398 - DNA, 1536 bp, Arabidopsis thaliana
  CDS (1)..(1536)
atggaagagatttcacctgcagttgcacttactttgggtttagctaatacgatgtgtgactctggaatctcatctactttcgatatctccgagctggagaatgttactgatgcagctgacatgttgtgtaatcagaaaagacaaagatatagtaatggagtggtggattgtattatgggaagtgtttcagaagagaagactttatctgaagtgagaagtttgtcttctgattttagtgtaactgtccaggaatcagaagaagatgagccattagtatctgatgcgactattattagcgaaggtttaatagttgtggacgctaggtctgagataagtttgccagatacagttgaaactgataacgggcgagttcttgctacggccattatcctaaacgagacaaccatagaacaggttcccactgcagaagtccttattgcgagtctgaatcacgatgtgaatatggaggtggcaacttctgaggtagtcattaggttacctgaagaaaatcctaatgtagcaagaggaagcaggagtgtttatgaactagagtgtatacctctttggggcacgatttcaatttgcggtggaagatctgaaatggaggatgctgttagagctttacctcattttctcaaaatacccatcaaaatgcttatgggggatcatgaagggatgagtccaagtctcccatatctcactagtcacttctttggtgtatatgatggccacggaggcgctcaggttgctgactattgccatgatagaatccactctgctttggctgaagaaatcgaacggattaaagaggaattgtgtaggaggaacactggcgagggtaggcaggtccagtgggagaaagtctttgtagattgttacctaaaagtcgatgatgaggttaaagggaaaatcaacagacctgttgttggttcttctgataggatggttcttgaagctgtttcccctgaaaccgttggatcgactgctgtggttgctttggtttgttcatcgcatataatagtctcaaactgtggtgactcaagagcagttttactccgaggcaaagactccatgcctttatcagttgatcacaaaccagatagagaggatgagtatgcacgaatagagaaagctggaggaaaagttatacaatggcaaggcgctcgtgtttctggcgttcttgccatgtccaggtccatcggtgatcaatatctggagccatttgtaataccagatcccgaagtgacgtttatgccacgggctagagaagacgagtgtctaatattggccagtgatggactttgggacgtaatgagtaaccaagaagcttgcgattttgcgaggaggcggatcttggcttggcacaagaagaatggagcattgcctttagctgagagaggtgtaggagaagaccaagcgtgtcgagctgcggctgaatatctctccaaactcgctattcaaatgggaagcaaagacaatatctcaatcatagtgatcgacttgaaagctcaaagaaagttcaagaccagatcttga

SEQ ID NO: 5399 - protein, 511 aa, Arabidopsis thaliana
MEEISPAVALTLGLANTMCDSGISSTFDISELENVTDAADMLCNQKRQRYSNGVVDCIMGSVSEEKTLSEVRSLSSDFSVTVQESEEDEPLVSDATIISEGLIVVDARSEISLPDTVETDNGRVLATAIILNETTIEQVPTAEVLIASLNHDVNMEVATSEVVIRLPEENPNVARGSRSVYELECIPLWGTISICGGRSEMEDAVRALPHFLKIPIKMLMGDHEGMSPSLPYLTSHFFGVYDGHGGAQVADYCHDRIHSALAEEIERIKEELCRRNTGEGRQVQWEKVFVDCYLKVDDEVKGKINRPVVGSSDRMVLEAVSPETVGSTAVVALVCSSHIIVSNCGDSRAVLLRGKDSMPLSVDHKPDREDEYARIEKAGGKVIQWQGARVSGVLAMSRSIGDQYLEPFVIPDPEVTFMPRAREDECLILASDGLWDVMSNQEACDFARRRILAWHKKNGALPLAERGVGEDQACRAAAEYLSKLAIQMGSKDNISIIVIDLKAQRKFKTRS

SEQ ID NO: 5400 - DNA, 1329 bp, Arabidopsis thaliana
  CDS (1)..(1329)
atggcggatatttgttatgaagacgagacgtcggcttgtgaatcaagaccgttgtggtctagccggaagtggaggatcggtgtccagcgattcaggatgtctccgtcggagatgaatcccacggcgtcgacgacggaggaggaggataaatctgaagggatttataataagcgaaataaacaagaagagtacgattttatgaactgtgcatcgtcgtcaccttctcaaagctctcctgaagaagagagtgtatcacttgaagacagtgacgtctctatctccgatggaaattcatcggttaatgatgttgcagttattccgtcgaagaagacggttaaagagacggatctgaggccgagatacggcgtcgcatcggtgtgcgggagaagaagagatatggaagatgcggttgcgttacatccgtcttttgtacggaaacaaacggagttttctcgaacaagatggcactattttggtgtttacgacggccatggctgttctcacgttgcggctaggtgtaaagagagacttcacgagttagtgcaagaagaagcgttgtcggataagaaagaagaatggaagaagatgatggagcgtagcttcacacgtatggacaaagaggttgttcgttggggtgaaactgtgatgagtgctaattgtaggtgtgagcttcaaacgccggactgtgacgctgttggatccaccgccgttgtctccgtcattacgccggagaagatcattgttgcgaattgcggtggctcaagagcagttctttgtaggaatggtaaagcagtacctctttctacagatcataagcctgatcgtccggatgagctggatcgaatccaagaagcaggaggacgagtgatatactgggacggtgcaagagtcttaggcgttttagccatgtcacgagccataggagacaattatttaaaaccgtacgtcacttcggagccggaagtgacggttacggatcggactgaggaagatgagtttctgattctagcgacggacgggctatgggacgtagtgacgaacgaggcagcgtgtacgatggtgcgcatgtgtctcaacagaaaaagtggtcgtggaagacggcgaggagaaacacagactccggggaggaggagtgaagaagaagggaaagaagaagaggagaaggtggtggggtcaagaaagaacgggaagagaggagagatcacggacaaagcatgtacggaggcgtcagtattgctgacgaagctggcgttggcaaaacacagtagtgacaacgtaagcgtcgtcgttattgatctcagaagaagaagaaagagacacgttgcttga

SEQ ID NO: 5401 - protein, 442 aa, Arabidopsis thaliana
MADICYEDETSACESRPLWSSRKWRIGVQRFRMSPSEMNPTASTTEEEDKSEGIYNKRNKQEEYDFMNCASSSPSQSSPEEESVSLEDSDVSISDGNSSVNDVAVIPSKKTVKETDLRPRYGVASVCGRRRDMEDAVALHPSFVRKQTEFSRTRWHYFGVYDGHGCSHVAARCKERLHELVQEEALSDKKEEWKKMMERSFTRMDKEVVRWGETVMSANCRCELQTPDCDAVGSTAVVSVITPEKIIVANCGGSRAVLCRNGKAVPLSTDHKPDRPDELDRIQEAGGRVIYWDGARVLGVLAMSRAIGDNYLKPYVTSEPEVTVTDRTEEDEFLILATDGLWDVVTNEAACTMVRMCLNRKSGRGRRRGETQTPGRRSEEEGKEEEEKVVGSRKNGKRGEITDKACTEASVLLTKLALAKHSSDNVSVVVIDLRRRRKRHVA

SEQ ID NO: 5402 - DNA, 1337 bp, Nicotiana tabacum
  CDS (2)..(1252)
aatggctgggatgtgttgtggtgttaatttagctgaaacagaggctacaactccagttgagccaagttcagaagctgcaagacgacgtcgtatggaaatccatcagttccgtttagctccgccgttggaaaacggaacaaaacgccacaaagtggagaaagttgtagatcaaagcaagagacggaagttggaaactagtgtaacgatttcattgacgtctccgttaagtgtaacggagaaggtagtagagaaagaatttgaagctaaacctttggatctgttggaatctgatgtttcgtctgttaaaattgagcgtcctgaggttgtttctggtaataataatccacctaagtttggtacaacttctgtatgtggaagacgacgtgatatggaagatgcagtagcagttcacccttcgttttgcaaggaagaaaatgaaaattcaaacagtttacatttctatggtgtatacgacgggcacggctgttcacatgtggctatgaaatgcaaagatagaatgcacgagatagtgaaaaacgaggtggagaaaggggaaacccagtggaaagaagtgatgacccaaagcttctctcaaatggataatgaagttgtccactattcgagtggagctttaggtggatcgaggtcaaattgtaggtgcgaacttcagactccacagtgtgatgccgttgggtcaactgctgttgttgcagtggttactcctgagaagatcatcgtctccaattgcggtgattctcgtgctgtcctttgcagaaatggcgtcgcgattcctctttccatcgatcataagccggatcgaccagatgaattgaatcgtatacaagaagcaggtggtcgtgttatatattgggatggaccaagggttcttggagttttagccatgtcacgagcaattggtgacaattacttgaaaccatatgttatatcggaaccggaggtgactataacggaaagaaccgaagaggacgagtgtttgatattagctagcgatggattgtgggatgtcgtctcgaacgagaccgcttgtggtgtggctcgtatgtgcttgcaatcaaggaagccaccatccccgcatggttcgccggaaaatgacgtcactgtgaccggagccggagaaagctccgaccagttgtgttcagatgcgtcaattcttttgactaaattggccttggctaggcacagtactgataatgttagcgttgtcgtggttgatttaagaaaagatttataacattattataaggattaagtgtatatttttgttattgattttcaattttctaaggttgtacgtatctagtaatttaccttgaggg

SEQ ID NO: 5403 - protein, 416 aa, Nicotiana tabacum
MAGMCCGVNLAETEATTPVEPSSEAARRRRMEIHQFRLAPPLENGTKRHKVEKVVDQSKRRKLETSVTISLTSPLSVTEKVVEKEFEAKPLDLLESDVSSVKIERPEVVSGNNNPPKFGTTSVCGRRRDMEDAVAVHPSFCKEENENSNSLHFYGVYDGHGCSHVAMKCKDRMHEIVKNEVEKGETQWKEVMTQSFSQMDNEVVHYSSGALGGSRSNCRCELQTPQCDAVGSTAVVAVVTPEKIIVSNCGDSRAVLCRNGVAIPLSIDHKPDRPDELNRIQEAGGRVIYWDGPRVLGVLAMSRAIGDNYLKPYVISEPEVTITERTEEDECLILASDGLWDVVSNETACGVARMCLQSRKPPSPHGSPENDVTVTGAGESSDQLCSDASILLTKLALARHSTDNVSVVVVDLRKDL

SEQ ID NO: 5404 - DNA, 1242 bp, Arabidopsis thaliana
  CDS (1)..(1242)
atggctgagatttgttacgagaacgagactatgatgattgaaacgacggcgacggtggtgaagaaggcaacgacgacaacgaggagacgagaacggagctcgtctcaagcagcgagaagaaggagaatggagatccggaggtttaagtttgtttccggcgaacaagaacctgtcttcgtcgacggtgacttacagaggcggaggagaagagaatccaccgtcgcagcctccacctccaccgtgttttacgaaacggcgaaggaagttgtcgtcctatgcgagtctcttagttcaacggttgtggcattccctgatcctgaagcttatcctaaatacggcgtcgcttcagtctgtggaagaagacgtgaaatggaagacgccgtcgctgtgcatccgtttttttcccgtcatcagacggaatattcatccaccggatttcactattgcggcgtttacgatggccatggctgttcccatgtagcgatgaaatgtagagaaagactacacgagctagtccgtgaagagtttgaagctgatgctgactgggaaaagtcaatggcgcgtagcttcacgcgcatggacatggaggttgttgcgttgaacgccgatggtgcggcaaaatgccggtgcgagcttcagaggccggactgcgacgcggtgggatccactgcggttgtgtctgtccttacgccggagaaaatcatcgtggcgaattgcggtgactcacgtgccgttctctgtcgtaacggcaaagccattgctttatcctccgatcataagccagaccgtccggacgagctagaccggattcaagcagcgggtggtcgtgttatctactgggatggcccacgtgtccttggagtacttgcaatgtcacgagccattggagataattacttgaagccgtatgtaatcagcagaccggaggtaaccgtgacggaccgggccaacggagacgattttcttattctcgcaagtgacggtctttgggacgttgtttcaaacgaaactgcatgtagcgtcgttcgaatgtgtttgagaggaaaagtcaatggtcaagtatcatcatcaccggaaagggaaatgacaggtgtcggcgccgggaatgtggtggttggaggaggagatttgccagataaagcgtgtgaggaggcgtcgctgttgctgacgaggcttgcgttggctagacaaagttcggacaacgtaagtgttgtggtggttgatctacgacgagacacgtag

SEQ ID NO: 5405 - protein, 413 aa, Arabidopsis thaliana
MAEICYENETMMIETTATVVKKATTTTRRRERSSSQAARRRRMEIRRFKFVSGEQEPVFVDGDLQRRRRRESTVAASTSTVFYETAKEVVVLCESLSSTVVAFPDPEAYPKYGVASVCGRRREMEDAVAVHPFFSRHQTEYSSTGFHYCGVYDGHGCSHVAMKCRERLHELVREEFEADADWEKSMARSFTRMDMEVVALNADGAAKCRCELQRPDCDAVGSTAVVSVLTPEKIIVANCGDSRAVLCRNGKAIALSSDHKPDRPDELDRIQAAGGRVIYWDGPRVLGVLAMSRAIGDNYLKPYVISRPEVTVTDRANGDDFLILASDGLWDVVSNETACSVVRMCLRGKVNGQVSSSPEREMTGVGAGNVVVGGGDLPDKACEEASLLLTRLALARQSSDNVSVVVVDLRRDT

SEQ ID NO: 5406 - DNA, 1395 bp, Arabidopsis thaliana
  CDS (1)..(1395)
atgactaataaacttcgctcagaagaaacaatcacgtccctttcttctttcatggctagtacacttagcattgcgtcaccctctccttgttctattccattgtcggtcacaaaggtctcgcctttaaagagaaagagacctacccacttaaatatccctgacctcaatcctcaacaaccgatttcaactgattacttccgtttcagagagggtgacgcaaaggtctcgcctttaaagagaaagagacctgcccacctaaatatccctgacctcaatcctcaacaaccgattcgaactgattacttcagtttcacagactttgctcaccaaaacggcaccgtaagcttcggtggcaatggttttggtgtcgtctccagaaacggtaagaagaagtttatggaagatactcacagaattgttccttgtttggttggtaactccaaaaagagtttctttggagtttatgatggtcatggaggtgctaaagctgcagaatttgtggctgagaatttgcacaaatatgttgttgagatgatggagaattgtaaggggaaggaggagaaagttgaagcctttaaggctgcttttttgaggactgatcgtgatttcctagaaaaggtaataaaggaacaatctttgaagggtgttgtgagtggtgcttgctgtgttactgctgtgatacaagatcaggagatgattgtatcaaatttgggagattgtagagctgtcctgtgtagagcaggtgttgctgaggctcttactgatgatcacaaaccaggaagggatgatgaaaaggaaagaattgagagtcagagtttgatacctttcatgacatttggtttacagggaggttatgtcgataatcatcaaggggcttggcgagttcagggaatacttgcggtttccagaagcattggagatgcacacttaaagaagtgggtggttgctgaacctgagacgagagtactagaactggaacaagatatggagtttcttgtcttagcttctgatggactttgggatgtggttagcaatcaagaagctgtttataccgtgttgcatgttctagctcagagaaagacgcctaaagaaagtgaggaggagaacttggttcagggctttgtcaatatgagcccatcttcgaaacttcgtcgagcttcactggtcaagtctcccagatgtgctaaatcccaaagttactactacaactcagagaatgaatcaccctcactcaaccgtgaaatagggagttcaccttcaaagtcaccgataacaccgtggaagtctctttgggccaaagcggcttgcaaagagcttgcgaacctggctgcaaaaagaggcagtatggatgatatcacagtggtgataattgatctcaaccattacaaaggctga

SEQ ID NO: 5407 - protein, 464 aa, Arabidopsis thaliana
MTNKLRSEETITSLSSFMASTLSIASPSPCSIPLSVTKVSPLKRKRPTHLNIPDLNPQQPISTDYFRFREGDAKVSPLKRKRPAHLNIPDLNPQQPIRTDYFSFTDFAHQNGTVSFGGNGFGVVSRNGKKKFMEDTHRIVPCLVGNSKKSFFGVYDGHGGAKAAEFVAENLHKYVVEMMENCKGKEEKVEAFKAAFLRTDRDFLEKVIKEQSLKGVVSGACCVTAVIQDQEMIVSNLGDCRAVLCRAGVAEALTDDHKPGRDDEKERIESQSLIPFMTFGLQGGYVDNHQGAWRVQGILAVSRSIGDAHLKKWVVAEPETRVLELEQDMEFLVLASDGLWDVVSNQEAVYTVLHVLAQRKTPKESEEENLVQGFVNMSPSSKLRRASLVKSPRCAKSQSYYYNSENESPSLNREIGSSPSKSPITPWKSLWAKAACKELANLAAKRGSMDDITVVIIDLNHYKG

SEQ ID NO: 5408 - DNA, 1971 bp, Arabidopsis thaliana
  CDS (1)..(1971)
atgaggaaatccaaagctaataatgattttcgtataacaaacagccgtgtacaagcgaggataataagtccaacgctcacatgtctcactagtcacttcttcggaatttatgatggccacagaagaagcagacctgtttctggttctgtttcttctgatgataggatggttcttcaggctgtttcccctgagaccgtcggatcaactgctgttgttgctttgagtgatcaaaatcccacgaattcacaaaggatccgtcttcatagatccgtcagatctgttcagcggaggtacatacttcttcgtcattcactgctttctggattagttggtgagaataaacggctgctcatggaagagatttcacctgcagttgcacttactttgggtttagctaatacgatgtgtgactctggaatctcatctactttcgatatctccgagctggagaatgttactgatgcagctgacatgttgtgtaatcagaaaagacaaagatatagtaatggagtggtggattgtattatgggaagtgtttcagaagagaagactttatctgaagtgagaagtttgtcttctgattttagtgtaactgtccaggaatcagaagaagatgagccattagtatctgatgcgactattattagcgaaggtttaatagttgtggacgctaggtctgagataagtttgccagatacagttgaaactgataacgggcgagttcttgctacggccattatcctaaacgagacaaccatagaacaggttcccactgcagaagtccttattgcgagtctgaatcacgatgtgaatatggaggtggcaacttctgaggtagtcattaggttacctgaagaaaatcctaatgtagcaagaggaagcaggagtgtttatgaactagagtgtatacctctttggggcacgatttcaatttgcggtggaagatctgaaatggaggatgctgttagagctttacctcattttctcaaaatacccatcaaaatgcttatgggggatcatgaagggatgagtccaagtctcccatatctcactagtcacttctttggtgtatatgatggccacggaggcgctcaggttgctgactattgccatgatagaatccactctgctttggctgaagaaatcgaacggattaaagaggaattgtgtaggaggaacactggcgagggtaggcaggtccagtgggagaaagtctttgtagattgttacctaaaagtcgatgatgaggttaaagggaaaatcaacagacctgttgttggttcttctgataggatggttcttgaagctgtttcccctgaaaccgttggatcgactgctgtggttgctttggtttgttcatcgcatataatagtctcaaactgtggtgactcaagagcagttttactccgaggcaaagactccatgcctttatcagttgatcacaaaccagatagagaggatgagtatgcacgaatagagaaagctggaggaaaagttatacaatggcaaggcgctcgtgtttctggcgttcttgccatgtccaggtccatcgagatgaggatcattactacctgttacagtctctgcaaaatcatgagatctcctgaaagtgggtttcaatctgcatcgttttcaggtgatcaatatctggagccatttgtaataccagatcccgaagtgacgtttatgccacgagctagagaagacgagtgtctaatattggccagtgatggactttgggacgtaatgagtaaccaagaagcttgcgattttgcgaggaggcggatcttggcttggcacaagaagaatggagcattgcctttagctgagagaggtgtaggagaagaccaagcgtgtcaagctgcggctgaatatctctccaaactcgctattcaaatgggaagcaaagacaatatctcaatcatagtgatcgacttgaaagctcaaagaaagttcaagaccagatcttga

SEQ ID NO: 5409 - protein, 656 aa, Arabidopsis thaliana
MRKSKANNDFRITNSRVQARIISPTLTCLTSHFFGIYDGHRRSRPVSGSVSSDDRMVLQAVSPETVGSTAVVALSDQNPTNSQRIRLHRSVRSVQRRYILLRHSLLSGLVGENKRLLMEEISPAVALTLGLANTMCDSGISSTFDISELENVTDAADMLCNQKRQRYSNGVVDCIMGSVSEEKTLSEVRSLSSDFSVTVQESEEDEPLVSDATIISEGLIVVDARSEISLPDTVETDNGRVLATAIILNETTIEQVPTAEVLIASLNHDVNMEVATSEVVIRLPEENPNVARGSRSVYELECIPLWGTISICGGRSEMEDAVRALPHFLKIPIKMLMGDHEGMSPSLPYLTSHFFGVYDGHGGAQVADYCHDRIHSALAEEIERIKEELCRRNTGEGRQVQWEKVFVDCYLKVDDEVKGKINRPVVGSSDRMVLEAVSPETVGSTAVVALVCSSHIIVSNCGDSRAVLLRGKDSMPLSVDHKPDREDEYARIEKAGGKVIQWQGARVSGVLAMSRSIEMRIITTCYSLCKIMRSPESGFQSASFSGDQYLEPFVIPDPEVTFMPRAREDECLILASDGLWDVMSNQEACDFARRRILAWHKKNGALPLAERGVGEDQACQAAAEYLSKLAIQMGSKDNISIIVIDLKAQRKFKTRS

SEQ ID NO: 5410 - DNA, 1385 bp, Fagus sylvatica
  CDS (106)..(1347)
aaaagatccttcatttctctctcttttgcgtttcctctgttttttgttcttgtttattttggcttttgagttttagagtaacagcgtgatagtatttttgatccaatggctgggatttgctgtggagttgttggagaaggagagacaacggctccgattgagctgagctcacgaccttcaaggcgccggagaatagatctcgtgccgttaaaactgatggctgacgtggccgcaccacagcctcttgagactgataagaaacgccagaagctgtgtctcaacacgacgtcgtcgctaccatcgcaagtagttgagaactgcaagtgcgtagaagaggaaaacgaagaaaagaagaagacgaataagaacgaagcgttgcatacgaatcaagcggcgaattcttgtgagagttcgaagccagtggaggggaggaataatgaagaagcggtgcaggaatgccctaagttcggtgttacctccgtttgtggacggagacgtgaaatggaagacgccgtttccgtgcacccttcggtttcaaataatttccatttcttcggcgtgttcgacggtcacggttgctctcatgttgctatgaggtgtagggaccgattgcatgacatagtgaaagaagaggtggaaagcgtaactgaaggaatggaatggaaggacacgatggagaagagctttgatcggatggataaggaggtgcaagagtggagagtgccaatcaaaaccaccaattgcagatgcgacgtccagactccgcagtgcgacgccgttggatctactgccgttgtcgctatcgtgacaccggagaagatcatcgtctctaactgcggtgactctcgtgccgtgctctgccgaaacggcgtcgctttccccctctcatccgatcataagcccgaccgacccgacgagttggttcggatccaagacgctggaggtcgcgtgatttactgggacggcgctagagtccttggagtcttggctatgtccagggcaataggtgacaattatctgaaaccgtacgtgatatcggaaccggaggtgacgataacggatcggacggctgaggatgagtgtttaatcctagcaagcgatgggctttgggacgtagtgtcaaacgaaaccgcatgcggagtcgcacgcatgtgtttgcgcgcgcaaaagccgtcttccccgcctcgatcgccgggaaatgacatggcagtcggcgccgcatcggagagctcggacaaggcttgctctgacgcctccattctgttgaccaagttagccttggctaggcacagtacggacaacgttagcgtcgttgttgttgatttaagaagaaatcatcaacaatagtaatctatagaatacataaaaaaaaaaaaaaaaaaaaa

SEQ ID NO: 5411 - protein, 413 aa, Fagus sylvatica
MAGICCGVVGEGETTAPIELSSRPSRRRRIDLVPLKLMADVAAPQPLETDKKRQKLCLNTTSSLPSQVVENCKCVEEENEEKKKTNKNEALHTNQAANSCESSKPVEGRNNEEAVQECPKFGVTSVCGRRREMEDAVSVHPSVSNNFHFFGVFDGHGCSHVAMRCRDRLHDIVKEEVESVTEGMEWKDTMEKSFDRMDKEVQEWRVPIKTTNCRCDVQTPQCDAVGSTAVVAIVTPEKIIVSNCGDSRAVLCRNGVAFPLSSDHKPDRPDELVRIQDAGGRVIYWDGARVLGVLAMSRAIGDNYLKPYVISEPEVTITDRTAEDECLILASDGLWDVVSNETACGVARMCLRAQKPSSPPRSPGNDMAVGAASESSDKACSDASILLTKLALARHSTDNVSVVVVDLRRNHQQ

SEQ ID NO: 5412 - DNA, 1318 bp, Lotus japonicus
  CDS (108)..(1196)
tccaccactgcgtatatttttcattgtcattttacatttcgttcttcttcttcttgttcttctgtttcgtgctttcgtttgttacaacattacatgcaaaaacgacaatgaagaacccaaaacgacacccgtcggaatcctctctccggcgagtgacctctgaggagaccgtgacggggttgaagaatgctcaccggaggaggctgaaaattcggcgaatgaagtacagctgccaggcgaagatcaacgccggcgacggagattttcctccgtcggggaaggagcggagggagattcatgagtctgtgcagatatcactgtccctggcgaactcttcgtcgtcatcatcatcggaggaggatcgggagcggaagcgagacgacggcgttttgccgtacggttcggtttcggtggtggggagcaggaaggagatggaggacgcggtgagcgtggagacagggtgcgtgacgaagtgcgactacttcgctgtttttgacggtcacggcggagctcaggtggcggaggcgtgccgggagcggctgtatcggcttgtggcggaggaggttgagaggtgcgggaatggggtggaggaggtggactgggaggaagtgatggaagggtgttttcgtaatatggacggtgaggtggcgggtaatgcggcgttgaggacggtgggttccacggcggttgtcgccgttgttgcagcggcggaggttgtcatcgctaattgcggtgattgtagagcggtgttaggcagaggaggtgaagctgtggatttgtctagtgatcataagcccgacaggcctgatgagttgatgcgaatcgaggaagctggtggaaaggtcataaactggaatggccagcgtgttctaggtgttcttgccacttcccgatctataggggatcagtaccttcgaccctatgtaatatcgaaaccggaagtgacagtgacaaagagaagcagcaaggatgagtttctgatactagcaagtgatggcttgtgggatgtgatctcaagtgaaatggcgtgccaggttgtgagaaaatgcctcaacgggcagattaggagaatttgtaatgagaatcaaagtcgtgcttctgaggctgcaactcttttggctgagatagcattggcaaagggaagcagggataacaccagtgtcattgtaattgagctgagagggactgtaacatagttgagacctcattattagcaatgacatgtaacatctagttaaatgccatgagagattatgttgtataataattgacatgtgaattggtttgtcaaaaaaagaagtcatgattaatttagctt

SEQ ID NO: 5413 - protein, 362 aa, Lotus japonicus
MKNPKRHPSESSLRRVTSEETVTGLKNAHRRRLKIRRMKYSCQAKINAGDGDFPPSGKERREIHESVQISLSLANSSSSSSSEEDRERKRDDGVLPYGSVSVVGSRKEMEDAVSVETGCVTKCDYFAVFDGHGGAQVAEACRERLYRLVAEEVERCGNGVEEVDWEEVMEGCFRNMDGEVAGNAALRTVGSTAVVAVVAAAEVVIANCGDCRAVLGRGGEAVDLSSDHKPDRPDELMRIEEAGGKVINWNGQRVLGVLATSRSIGDQYLRPYVISKPEVTVTKRSSKDEFLILASDGLWDVISSEMACQVVRKCLNGQIRRICNENQSRASEAATLLAEIALAKGSRDNTSVIVIELRGTVT

SEQ ID NO: 5414 - DNA, 1305 bp, Arabidopsis thaliana; identical to SEQ ID NO: 958
  CDS (1)..(1305)

SEQ ID NO: 5415 - protein, 434 aa, Arabidopsis thaliana; identical to SEQ ID NO: 959

SEQ ID NO: 5416 - DNA, 1200 bp, Arabidopsis thaliana; identical to SEQ ID NO: 964
  CDS (1)..(1200)

SEQ ID NO: 5417 - protein, 399 aa, Arabidopsis thaliana; identical to SEQ ID NO: 965

SEQ ID NO: 5418 - DNA, 1269 bp, Brassica napus; identical to SEQ ID NO: 972
  CDS (1)..(1269)

SEQ ID NO: 5419 - protein, 422 aa, Brassica napus; identical to SEQ ID NO: 973

SEQ ID NO: 5420 - DNA, 1206 bp, Brassica napus; identical to SEQ ID NO: 1444
  CDS (1)..(1206)

SEQ ID NO: 5421 - protein, 401 aa, Brassica napus; identical to SEQ ID NO: 1445

SEQ ID NO: 5422 - DNA, 1182 bp, Brassica napus; identical to SEQ ID NO: 1446
  CDS (1)..(1182)

SEQ ID NO: 5423 - protein, 393 aa, Brassica napus; identical to SEQ ID NO: 1447

SEQ ID NO: 5424 - DNA, 1104 bp, Brassica napus; identical to SEQ ID NO: 1450
  CDS (1)..(1104)

SEQ ID NO: 5425 - protein, 367 aa, Brassica napus; identical to SEQ ID NO: 1451

SEQ ID NO: 5426 - DNA, 1236 bp, Brassica napus; identical to SEQ ID NO: 974
  CDS (1)..(1236)

SEQ ID NO: 5427 - protein, 411 aa, Brassica napus; identical to SEQ ID NO: 975

SEQ ID NO: 5428 - DNA, 1203 bp, Glycine max; identical to SEQ ID NO: 1458
  CDS (1)..(1203)

SEQ ID NO: 5429 - protein, 400 aa, Glycine max; identical to SEQ ID NO: 1459

SEQ ID NO: 5430 - DNA, 1218 bp, Linum usitatissimum; identical to SEQ ID NO: 982
  CDS (1)..(1218)

SEQ ID NO: 5431 - protein, 405 aa, Linum usitatissimum; identical to SEQ ID NO: 983

SEQ ID NO: 5432 - DNA, 1083 bp, Zea mays; identical to SEQ ID NO: 986
  CDS (1)..(1083)

SEQ ID NO: 5433 - protein, 360 aa, Zea mays; identical to SEQ ID NO: 987

SEQ ID NO: 5434 - DNA, 1182 bp, Brassica napus; identical to SEQ ID NO: 1476
  CDS (1)..(1182)

SEQ ID NO: 5435 - protein, 393 aa, Brassica napus; identical to SEQ ID NO: 1477

SEQ ID NO: 5436 - DNA, 1209 bp, Brassica napus; identical to SEQ ID NO: 1478
  CDS (1)..(1209)

SEQ ID NO: 5437 - protein, 402 aa, Brassica napus; identical to SEQ ID NO: 1479

SEQ ID NO: 5438 - DNA, 1182 bp, Brassica napus; identical to SEQ ID NO: 1480
  CDS (1)..(1182)

SEQ ID NO: 5439 - protein, 393 aa, Brassica napus; identical to SEQ ID NO: 1481

SEQ ID NO: 5440 - DNA, 1206 bp, Brassica napus; identical to SEQ ID NO: 1486
  CDS (1)..(1206)

SEQ ID NO: 5441 - protein, 401 aa, Brassica napus; identical to SEQ ID NO: 1487

SEQ ID NO: 5442 - DNA, 1167 bp, Brassica napus; identical to SEQ ID NO: 1494
  CDS (1)..(1167)

SEQ ID NO: 5443 - protein, 388 aa, Brassica napus; identical to SEQ ID NO: 1495

SEQ ID NO: 5444 - DNA, 1206 bp, Glycine max; identical to SEQ ID NO: 1496
  CDS (1)..(1206)

SEQ ID NO: 5445 - protein, 401 aa, Glycine max; identical to SEQ ID NO: 1497

SEQ ID NO: 5446 - DNA, 1203 bp, Glycine max; identical to SEQ ID NO: 1498
  CDS (1)..(1203)

SEQ ID NO: 5447 - protein, 400 aa, Glycine max; identical to SEQ ID NO: 1499

SEQ ID NO: 5448 - DNA, 1134 bp, Glycine max; identical to SEQ ID NO: 1006
  CDS (1)..(1134)

SEQ ID NO: 5449 - protein, 377 aa, Glycine max; identical to SEQ ID NO: 1007

SEQ ID NO: 5450 - DNA, 1173 bp, Glycine max; identical to SEQ ID NO: 1516
  CDS (1)..(1173)

SEQ ID NO: 5451 - protein, 390 aa, Glycine max; identical to SEQ ID NO: 1517

SEQ ID NO: 5452 - DNA, 1617 bp, Glycine max; identical to SEQ ID NO: 1518
  CDS (1)..(1617)

SEQ ID NO: 5453 - protein, 538 aa, Glycine max; identical to SEQ ID NO: 1519

SEQ ID NO: 5454 - DNA, 1134 bp, Glycine max; identical to SEQ ID NO: 1010
  CDS (1)..(1134)

SEQ ID NO: 5455 - protein, 377 aa, Glycine max; identical to SEQ ID NO: 1011

SEQ ID NO: 5456 - DNA, 1569 bp, Glycine max; identical to SEQ ID NO: 1524
  CDS (1)..(1569)

SEQ ID NO: 5457 - protein, 522 aa, Glycine max; identical to SEQ ID NO: 1525

SEQ ID NO: 5458 - DNA, 1134 bp, Glycine max; identical to SEQ ID NO: 1014
  CDS (1)..(1134)

SEQ ID NO: 5459 - protein, 377 aa, Glycine max; identical to SEQ ID NO: 1015

SEQ ID NO: 5460 - DNA, 1044 bp, Glycine max; identical to SEQ ID NO: 1024
  CDS (1)..(1044)

SEQ ID NO: 5461 - protein, 347 aa, Glycine max; identical to SEQ ID NO: 1025

SEQ ID NO: 5462 - DNA, 1128 bp, Brassica napus; identical to SEQ ID NO: 1556
  CDS (1)..(1128)

SEQ ID NO: 5463 - protein, 375 aa, Brassica napus; identical to SEQ ID NO: 1557

SEQ ID NO: 5464 - DNA, 1674 bp, Glycine max; identical to SEQ ID NO: 1558
  CDS (1)..(1674)

SEQ ID NO: 5465 - protein, 557 aa, Glycine max; identical to SEQ ID NO: 1559

SEQ ID NO: 5466 - DNA, 1113 bp, Zea mays; identical to SEQ ID NO: 1034
  CDS (1)..(1113)

SEQ ID NO: 5467 - protein, 370 aa, Zea mays; identical to SEQ ID NO: 1035

SEQ ID NO: 5468 - DNA, 1065 bp, Zea mays; identical to SEQ ID NO: 1036
  CDS (1)..(1065)

SEQ ID NO: 5469 - protein, 354 aa, Zea mays; identical to SEQ ID NO: 1037

SEQ ID NO: 5470 - DNA, 1194 bp, Zea mays; identical to SEQ ID NO: 1570
  CDS (1)..(1194)

SEQ ID NO: 5471 - protein, 397 aa, Zea mays; identical to SEQ ID NO: 1571

SEQ ID NO: 5472 - DNA, 1185 bp, Zea mays; identical to SEQ ID NO: 1582
  CDS (1)..(1185)

SEQ ID NO: 5473 - protein, 394 aa, Zea mays; identical to SEQ ID NO: 1583

SEQ ID NO: 5474 - DNA, 1083 bp, Zea mays; identical to SEQ ID NO: 1044
  CDS (1)..(1083)

SEQ ID NO: 5475 - protein, 360 aa, Zea mays; identical to SEQ ID NO: 1045

SEQ ID NO: 5476 - DNA, 1455 bp, Zea mays; identical to SEQ ID NO: 1594
  CDS (1)..(1455)

SEQ ID NO: 5477 - protein, 484 aa, Zea mays; identical to SEQ ID NO: 1595

SEQ ID NO: 5478 - DNA, 1047 bp, Zea mays; identical to SEQ ID NO: 1596
  CDS (1)..(1047)

SEQ ID NO: 5479 - protein, 348 aa, Zea mays; identical to SEQ ID NO: 1597

SEQ ID NO: 5480 - DNA, 1065 bp, Zea mays; identical to SEQ ID NO: 1048
  CDS (1)..(1065)

SEQ ID NO: 5481 - protein, 354 aa, Zea mays; identical to SEQ ID NO: 1049

SEQ ID NO: 5482 - DNA, 1959 bp, Zea mays
  CDS (1)..(1959)
atggcgctggaggtgctgccggaggagtccaaccggtgcgtgcgcgggtgctgccgtagcgccaccatcccgctcgaccttcggtccgcctccttctccctcctcgcccccatcgcgcgaggctcggagagcactgtgtacgaggcattgctgggcggcgagcgcgctgcggccaagaagcctgtgctgtccaccgccgaggatttggacaagttccactaccagcttcagcttctctgcaagctggatcaccctgggttggcaaaactgatcgccgcacatgcacaccctccggcttacttgatgttctttgacttcttcgagcctccaaatcttgcagaaaagatacatgtcgaggaatggatcccttctatccagcaagtggttacgatggccagtgatctagcaaaggctctccaatacctacaaatccttggggtagtacacagagatataaaacctgcgaatattttgctagacaaagatctccatccatatctagcagattttggcttagccatgtttcaaaaggatattaagcgtgtctcagttgagaactggaaatcatctggcaagcctactggtggtttccataaaaagaatatggttgggacactaatttacatggcaccagaaattttgagaaaggatatacatacagaaaagtctgatgtgtatagctttgcaatatctatcaatgagcttcttactggtgtggtgccctatacagatctgagagcagaagcacaggcacacactattcttgaaatgacatatactgaacaacaacttacagcagcaattgtttctcaaggattgcgtccagcacttgcccttcctgaatctggtgccccaccaactcttttgtcacttatccagcgttgctgggatcctgatcctgaaaagagaccatcatttgaagatataattgatgagctaaatatagttcaaaagcatatagtttcaaatgcttctgttccatcatctcctgtcagcaagagtcaaaatggtaccatagaagtgcaccattatcaagaagcattgaactggttcaaccagggggagctttttgttaaaggatcaagtagatcagaccttaagaatctttggtctgattgttttgatcaatcttcagagtaccatccaacattaagttggggctcttttgcaacgtgtggtcgaagggaaaccatggaagacacccattttgtacttccccatgtgagcgaagaaaatgatgtttttgcctttggcatttttgatggccatagaggttcagcagccgctgaattttctgtccgagcagttcctggatttctcaagcaatttggtcagggtgcaagcccaactgacgctctttcagaagcgtttgtaaggactgacatagcatttcgagaagaactaattcttcaccggaagtcaaaaaggataattcaaaaagattggcatcctggttgcacggcaataaccgccctgatagtgagaaacaagctttttgtagcaaatgctggtgattgccgagcaatcctgagccgtaagggcaaaccatttctgttgaccaaggatcatgttgctagttgcccaaatgaaagagaacgagtaacaaaggcggggactgaagtaaaatggcaaatagatacgtggcgagtgggttcagctgctcttcaggttacaaggtcaattggtgatgatgacctcaagccagctgtcacagcacaacctgaggttattgaaactgctttatcagctgatgatgagttcctggtgatggctagtgatggcctatgggatgtggtaagcaaccaggacgtgctgtcaataatcaaggacacggttaaagagcctggaatgtgctcgaagaggttggccacggaggctgcggagcggggcagcaaagacaatatcactgtcattgttgtctttcttcgccccgtctccacagctgagcgaatctactga

SEQ ID NO: 5483 - protein, 652 aa, Zea mays
MALEVLPEESNRCVRGCCRSATIPLDLRSASFSLLAPIARGSESTVYEALLGGERAAAKKPVLSTAEDLDKFHYQLQLLCKLDHPGLAKLIAAHAHPPAYLMFFDFFEPPNLAEKIHVEEWIPSIQQVVTMASDLAKALQYLQILGVVHRDIKPANILLDKDLHPYLADFGLAMFQKDIKRVSVENWKSSGKPTGGFHKKNMVGTLIYMAPEILRKDIHTEKSDVYSFAISINELLTGVVPYTDLRAEAQAHTILEMTYTEQQLTAAIVSQGLRPALALPESGAPPTLLSLIQRCWDPDPEKRPSFEDIIDELNIVQKHIVSNASVPSSPVSKSQNGTIEVHHYQEALNWFNQGELFVKGSSRSDLKNLWSDCFDQSSEYHPTLSWGSFATCGRRETMEDTHFVLPHVSEENDVFAFGIFDGHRGSAAAEFSVRAVPGFLKQFGQGASPTDALSEAFVRTDIAFREELILHRKSKRIIQKDWHPGCTAITALIVRNKLFVANAGDCRAILSRKGKPFLLTKDHVASCPNERERVTKAGTEVKWQIDTWRVGSAALQVTRSIGDDDLKPAVTAQPEVIETALSADDEFLVMASDGLWDVVSNQDVLSIIKDTVKEPGMCSKRLATEAAERGSKDNITVIVVFLRPVSTAERIY

SEQ ID NO: 5484 - DNA, 20 bp, Artificial sequence
  primer
atggacgaagtttctcctgc

SEQ ID NO: 5485 - DNA, 22 bp, Artificial sequence
  primer
tcaattcaaggatttgctcttg

SEQ ID NO: 5486 - protein, 491 aa, Artificial sequence
  consensus sequence
  Variant (2)..(3): Xaa in position 2 to 3 is any amino acid
  Variant (5)..(6): Xaa in position 5 to 6 is any amino acid
  Variant (8)..(8): Xaa in position 8 is any amino acid
  Variant (9)..(11): Xaa in position 9 to 11 is any or no amino acid
  Variant (13)..(14): Xaa in position 13 to 14 is any amino acid
  Variant (18)..(33): Xaa in position 18 to 33 is any amino acid
  Variant (34)..(57): Xaa in position 34 to 57 is any or no amino acid
  Variant (59)..(59): Xaa in position 59 is any amino acid
  Variant (64)..(67): Xaa in position 64 to 67 is any amino acid
  Variant (69)..(95): Xaa in position 69 to 95 is any amino acid
  Variant (96)..(117): Xaa in position 96 to 117 is any or no amino acid
  Variant (119)..(121): Xaa in position 119 to 121 is any amino acid
  Variant (123)..(132): Xaa in position 123 to 132 is any amino acid
  Variant (133)..(157): Xaa in position 133 to 157 is any or no amino acid
  Variant (163)..(163): Xaa in position 163 is any amino acid
  Variant (165)..(172): Xaa in position 165 to 172 is any amino acid
  Variant (174)..(174): Xaa in position 174 is any amino acid
  Variant (176)..(176): Xaa in position 176 is any amino acid
  Variant (184)..(184): Xaa in position 184 is any amino acid
  Variant (186)..(191): Xaa in position 186 to 191 is any amino acid
  Variant (194)..(194): Xaa in position 194 is any amino acid
  Variant (198)..(202): Xaa in position 198 to 202 is any amino acid
  Variant (203)..(237): Xaa in position 203 to 237 is any or no amino acid
  Variant (239)..(239): Xaa in position 239 is any amino acid
  Variant (241)..(241): Xaa in position 241 is any amino acid
  Variant (244)..(245): Xaa in position 244 to 245 is any amino acid
  Variant (248)..(250): Xaa in position 248 to 250 is any amino acid
  Variant (251)..(261): Xaa in position 251 to 261 is any or no amino acid
  Variant (264)..(264): Xaa in position 264 is any amino acid
  Variant (266)..(267): Xaa in position 266 to 267 is any amino acid
  Variant (268)..(269): Xaa in position 268 to 269 is any or no amino acid
  Variant (271)..(271): Xaa in position 271 is any amino acid
  Variant (272)..(272): Xaa in position 272 is any or no amino acid
  Variant (275)..(275): Xaa in position 275 is any amino acid
  Variant (277)..(277): Xaa in position 277 is any amino acid
  Variant (280)..(280): Xaa in position 280 is any amino acid
  Variant (282)..(283): Xaa in position 282 to 283 is any amino acid
  Variant (285)..(285): Xaa in position 285 is any amino acid
  Variant (287)..(287): Xaa in position 287 is any amino acid
  Variant (288)..(314): Xaa in position 288 to 314 is any or no amino acid
  Variant (317)..(318): Xaa in position 317 to 318 is any amino acid
  Variant (320)..(325): Xaa in position 320 to 325 is any amino acid
  Variant (326)..(326): Xaa in position 326 is any or no amino acid
  Variant (329)..(337): Xaa in position 329 to 337 is any amino acid
  Variant (338)..(338): Xaa in position 338 is any or no amino acid
  Variant (341)..(341): Xaa in position 341 is any amino acid
  Variant (353)..(357): Xaa in position 353 to 357 is any amino acid
  Variant (359)..(360): Xaa in position 359 to 360 is any amino acid
  Variant (361)..(400): Xaa in position 361 to 400 is any or no amino acid
  Variant (402)..(409): Xaa in position 402 to 409 is any amino acid
  Variant (410)..(466): Xaa in position 410 to 466 is any or no amino acid
  Variant (468)..(470): Xaa in position 468 to 470 is any amino acid
  Variant (472)..(474): Xaa in position 472 to 474 is any amino acid
  Variant (476)..(479): Xaa in position 476 to 479 is any amino acid
  Variant (481)..(481): Xaa in position 481 is any amino acid
  Variant (484)..(485): Xaa in position 484 to 485 is any amino acid
  Variant (487)..(490): Xaa in position 487 to 490 is any amino acid
GXXSXXGXXXXRXXMEDXXXXXXXXXXXXXXXXXXXXXXXXXXXXXXXXXXXXXXXXVXDGHGXXXXAXXXXXXXXXXXXXXXXXXXXXXXXXXXXXXXXXXXXXXXXXXXXXXXXXFXXXDXXXXXXXXXXXXXXXXXXXXXXXXXXXXXXXXXXXGSTAVXAXXXXXXXXVXNXGDSRAVLXRXXXXXXLSXDHKXXXXXXXXXXXXXXXXXXXXXXXXXXXXXXXXXXXXXXXXPXRXDEXXRIXXXXXXXXXXXXXXGGXVXXXXGXXRVXGXLAXSXXRXIXXXXXXXXXXXXXXXXXXXXXXXXXXXXGDXXLXXXXXXXPEXXXXXXXXXXDEXLILASDGLWDVXXXXXAXXXXXXXXXXXXXXXXXXXXXXXXXXXXXXXXXXXXXXXXXXRXXXXXXXXXXXXXXXXXXXXXXXXXXXXXXXXXXXXXXXXXXXXXXXXXXXXXXXXXXXXXXXXXAXXXLXXXAXXXXSXDNXXVXXXXL

SEQ ID NO: 5487 - protein, 18 aa, Artificial sequence
  protein pattern
  Variant (2)..(2): Xaa in position 2 is Ile or Val
  Variant (8)..(8): Xaa in position 8 is Leu or Val
  Variant (11)..(11): Xaa in position 11 is any or no amino acid
  Variant (13)..(13): Xaa in position 13 is any amino acid
  Variant (14)..(14): Xaa in position 14 is Asn, Ser or Thr
  Variant (15)..(15): Xaa in position 15 is any amino acid
  Variant (16)..(16): Xaa in position 16 is Asp, Glu, Gln or Thr
  Variant (17)..(17): Xaa in position 17 is any amino acid
  Variant (18)..(18): Xaa in position 18 is Ala, Cys or Val
LXLASDGXWDXVXXXXXX

SEQ ID NO: 5488 - protein, 14 aa, Artificial sequence
  protein pattern
  Variant (2)..(2): Xaa in position 2 is Phe or Tyr
  Variant (7)..(7): Xaa in position 7 is Cys or Gly
  Variant (8)..(9): Xaa in position 8 to 9 is any amino acid
  Variant (10)..(10): Xaa in position 10 is Ala or Val
  Variant (12)..(13): Xaa in position 12 to 13 is any amino acid
  Variant (14)..(14): Xaa in position 14 is Ala, Cys or Val
VXDGHGXXXXAXXX

SEQ ID NO: 5489 - protein, 17 aa, Artificial sequence
  protein pattern
  Variant (3)..(3): Xaa in position 3 is Cys or Ser
  Variant (4)..(4): Xaa in position 4 is any amino acid
  Variant (5)..(5): Xaa in position 5 is Ala, Ile or Val
  Variant (8)..(8): Xaa in position 8 is any amino acid
  Variant (10)..(15): Xaa in position 10 to 15 is any amino acid
  Variant (16)..(16): Xaa in position 16 is Leu or Met
  Variant (17)..(17): Xaa in position 17 is Ser or Thr
GDXXXVLXRXXXXXXXX

SEQ ID NO: 5490 - protein, 12 aa, Artificial sequence
  protein pattern
  Variant (3)..(3): Xaa in position 3 is any amino acid
  Variant (6)..(6): Xaa in position 6 is Ala, Gly or Ser
  Variant (10)..(11): Xaa in position 10 to 11 is any amino acid
  Variant (12)..(12): Xaa in position 12 is Phe, Leu or Met
LAXSRXIGDXXX

SEQ ID NO: 5491 - protein, 20 aa, Artificial sequence
  protein pattern
  Variant (3)..(3): Xaa in position 3 is Lys or Arg
  Variant (4)..(4): Xaa in position 4 is Ala or Pro
  Variant (5)..(7): Xaa in position 5 to 7 is any amino acid
  Variant (8)..(8): Xaa in position 8 is Asp or Arg
  Variant (10)..(11): Xaa in position 10 to 11 is any amino acid
  Variant (14)..(16): Xaa in position 14 to 16 is any amino acid
  Variant (19)..(19): Xaa in position 19 is any amino acid
DHXXXXXXEXXRIXXXGGXV

SEQ ID NO: 5492 - protein, 26 aa, Artificial sequence
  protein pattern
  Variant (2)..(4): Xaa in position 2 to 4 is any amino acid
  Variant (5)..(5): Xaa in position 5 is any or no amino acid
  Variant (7)..(9): Xaa in position 7 to 9 is any amino acid
  Variant (11)..(14): Xaa in position 11 to 14 is any amino acid
  Variant (16)..(16): Xaa in position 16 is any amino acid
  Variant (18)..(18): Xaa in position 18 is Asp or Asn
  Variant (19)..(19): Xaa in position 19 is any amino acid
  Variant (20)..(20): Xaa in position 20 is Ser or Thr
  Variant (21)..(23): Xaa in position 21 to 23 is Ile or Val
  Variant (24)..(24): Xaa in position 24 is Ala, Ile or Val
  Variant (25)..(25): Xaa in position 25 is any amino acid
  Variant (26)..(26): Xaa in position 26 is Phe or Leu
AXXXXLXXXAXXXXSXDXXXXXXXXX

SEQ ID NO: 5493 - DNA, 1005 bp, Arabidopsis thaliana
  CDS (1)..(1005)
atgtccgatgctccgtcgtcttccccggatgccacggcgtcgcactggtgctatcactgcaacaaacgcgtcgtcgttgaaaccttagatgactttgtcgtgtgctgcgaatgtaacaaaggtttcgtcgagtcaattcaaccgactcccgccgcttattcatcgccggcgccaccgcagccactttccccagatctgaatgtagaagactccagtattggctcgcatttcctccagatgctccgcttgttagcccacgcgccttctcagcgttcaccaccacgacaccttgatgttttatcttacgaagatgatttcttcaggttggagctcaatagtagaaacgaaatcgacgatgacgaagacgaagatgaagatgatggagatgaagaagaagaggatgaggaagagaatttaaccgtcaacgacgaagaagacgaagaagatgatctgaggaggagaaatcgttttcctctcacgacgacgcagtcgagaaccggaagaaacagaattctcgattgggctgagattttgatgggaatcgaagacaattcgattgagttccgtatggaatcagatcgatacgcaggaaatccggctgattacatagacgatgcagccggatacgaagctttgctacagaatttagcagaaggagatggtggtggtggcggaggaaggagaggcgcaccaccggctgcgaaatcggcaatagaggcattggagactttcgaggttagttcttcggagggagagatggttatggtttgtgctgtgtgtaaagatggaatggtgatgggagaaactggtaagaagttaccgtgtggacattgttaccacggagattgtattgtgccatggttaggaacaaggaactcttgtcctgtctgtagattccagcttgagactgatgatgctgaatatgaggaagagaggaaaaaaagaacttctaccgtgtcagattctgctgctgcttcttcttcttcttcaacttctcgttactga

SEQ ID NO: 5494 - protein, 334 aa, Arabidopsis thaliana
MSDAPSSSPDATASHWCYHCNKRVVVETLDDFVVCCECNKGFVESIQPTPAAYSSPAPPQPLSPDLNVEDSSIGSHFLQMLRLLAHAPSQRSPPRHLDVLSYEDDFFRLELNSRNEIDDDEDEDEDDGDEEEEDEEENLTVNDEEDEEDDLRRRNRFPLTTTQSRTGRNRILDWAEILMGIEDNSIEFRMESDRYAGNPADYIDDAAGYEALLQNLAEGDGGGGGGRRGAPPAAKSAIEALETFEVSSSEGEMVMVCAVCKDGMVMGETGKKLPCGHCYHGDCIVPWLGTRNSCPVCRFQLETDDAEYEEERKKRTSTVSDSAAASSSSSTSRY

SEQ ID NO: 5495 - DNA, 1928 bp, Glycine max
  CDS (266)..(1279)
agttcgggtggagagagaagttcaattttcctaactgaaattgtgacaaaattatagacatttcgttagtatttttctacttgtttattggagaaaatgaaccgttaaataagacccactaattacattatcaaaataacaaaaaatgagaaagatcctttaccaatttgaaggataatactaaacaagtagtattattatcgattttattgtaccttccaaacaaaccctgcagcgatttgtttccttccatctccgccgtaccatgtcggaagcaccaccgcctccaactgccgatgcgtcaccgcctccgtactggtgctaccactgcgagaagcgcgtctccgtcgaaacgctcgcgaatctccccgacgtcgtctgcggcgagtgcaagaacggctttgtggaatccatgcccacgccgtcgcgctctcgctccccctccgcctcctccgacgacccctacttcggctcgcagttcctccaggtccttcgcctaatcgctcagtcggcgcgtgacgacgacgcgtcgcctccgccgccgccgagccgctctccggagaacgatttcctcaggatcgagctcggcggctgggacaacgacgaggagaacgaaaacgacgacgataacggcgacgaggagttcgaggaacacgaggaggcggaggatcgctccggcaacgaagatccgcacggaggagacgacgaggatctgagaagaaggaggcgcgagctacttcggcttcggattagggatttggcgactcgtacgaggagcatgcggaaccggatcttggattgggccgagattctgatgggcctcgaggacaattccatcgagttccgcctccagctgccagaatccgaccgctacgtcggaaatcccgaggattacgtcgacgcggcagagtacgaggcgctgctgcagacgctggcggagagcgacgggggaggcaggaggggagcgccgccggcgtcgaaggccgcgctggaagccttgccgacggtgaaaattgcgtcggaaagcgaagccgtggcgtgcgctatatgtaaagatttgctcggtgttggagacgcggcgaagaggttgccgtgcgggcatcggtatcatggagattgcattgttccttggttgagttctcgaaattcttgccctgtttgcaggtttgagctaccaacggatgataaggaatacgaggaagagagagtggttatcgctgcttcttcgaattcgaacggagcttcgagttccggtggaggtggaagtgccattgtttgattccgcttggtatgttccgtcatgctctgctctgctctgttctgttctgccatttgtgtaatatatttcgtggtttctgaatttctctttcttttttttttggtattagtggatttaaatcaaagcttgcgccatgttattatttattttatttgaagcttttattatgtagttggcttcttagctctcggatgatgctaagatacttgtatatagcatttgaatcaatgtgaatgtgatcatatcacactatctcaatggaatttacactttctccctgtgattaatttatttgaagcttttattatgtagttggcttcttagctttcagatgatgctaagaaacttgtatatagcatttgaatcaatgtgaatgtgatcatatcacattacttgaatggaatttgatggattaagctaattatgtcattgttgctactttggcatcatgcctaattggtttacttgatgcatgctcttcttttttcaggctgtgtcctttgtgtaataaattggaaagattgttgtttcttttatggtgtgtttggtagagaggagagaaataatattggagagaaaatttgtatttttttatattcatcctcagatatattacaagtgattctaatagtactcttttatttaaaaa

SEQ ID NO: 5496 - protein, 337 aa, Glycine max
MSEAPPPPTADASPPPYWCYHCEKRVSVETLANLPDVVCGECKNGFVESMPTPSRSRSPSASSDDPYFGSQFLQVLRLIAQSARDDDASPPPPPSRSPENDFLRIELGGWDNDEENENDDDNGDEEFEEHEEAEDRSGNEDPHGGDDEDLRRRRRELLRLRIRDLATRTRSMRNRILDWAEILMGLEDNSIEFRLQLPESDRYVGNPEDYVDAAEYEALLQTLAESDGGGRRGAPPASKAALEALPTVKIASESEAVACAICKDLLGVGDAAKRLPCGHRYHGDCIVPWLSSRNSCPVCRFELPTDDKEYEEERVVIAASSNSNGASSSGGGGSAIV

SEQ ID NO: 5497 - DNA, 1886 bp, Glycine max
  CDS (499)..(1563)
atctcggtatagggctggagccagggaaacttcactttttgtaaggaacttgtcaagttcataaatttcctttataatgtcatcaccaatagcatttttttaactatattgatatatgatcgatgatgaaacaaaatttgcaccagtgaggcgctgatgcaccaacacaatttgtttccgtacaccgtcaacacctgtgtaacccacccatgaatctgtgcaacttctgtgtcctctctgaatctgttaacaccaaccatgaagacagatcatcatcaggtcattgcctcatcacaactaagccacaccatttcacgaatcagcaaccatcctacgatcatcaggaggaggagcactgtccaaaggtttggctctgatttttgccgaaaatctcagggcaagagaactttggaaacacaaaatgtttgatgaggttctgattgaagacattatgcgtaatggacgcctgaataacatcagtgttgatggcagccaataatgccttccaaacacaaacaaaccctgcagcgatttgtttccttccatctccgccgtaccatgtcggaagcaccaccgtctcagccatcgcctccaaccgccaacgcgtcaccaccgccgtactggtgctaccactgcgagaagcgcgtctccatcgaaacgctcgcgaatctccccgacgtcgtctgcggtgagtgcaagaacggcttcgtggaatccatccacacgccgtcgcgctctcgctccccctccgcctcctccgacgacccctacttcggctcgcagttcctccaggtccttcgcctaatcgctcagtcggcgcgtgacgacgacgcgtcgcctccgccgccgccgagccgctctccggagaacgatttcctcaggatcgagctcggtggctgggacaacgacgaggagaacgacaacgacaacgataacgacgacgaggagttcgaggaacacgaggaggcagaggatcgctccggcaacgaggatccgcacggaggagacgacgaggatctgagaagaaggaggcgcgagctacttcggcttcggattagggatttggcgacgcgtacgaggagcatgcggaaccggatcttggattgggccgagattctgatgggcctggaggacaattccatcgagttccgcctccagctgccagaatccgaccgctacgtcgggaatcccgaggattacgtcgacgcggcggagtacgaggcgctgctgcatacgctggcggaaagcgacggcggaggtaggagaggagcgccgccggcgtcgaaggcggcggtggaggcgttgccgacggtgaagattgcgtccgaaagcgaagccgtggcgtgcgctatatgtaaggatttgctcggtgttggagacttggcgaagaggttgccgtgcgggcatgggtatcatggagattgcattgttccttggttgagttctcgaaattcttgccctgtttgcaggtatgagctaccaacggatgataaggaatatgaggaagagagagtggttaactctgcttcgagttccggtggaggtggaagtgccattgtttgattccgcttggtatgctccgtcttgctctgttctcttctgccatttgtgtaatatatttcgtggtttctgaatttcttctttttttgttgttggcattagtggatttaaatcaaagcttgcgccatgttattattaatttatttgaagcttttattatgtagttggcttcttagctttcagatgatgctaagatacttgtatatagcatttgaatcaatgtgaatgtgatcatatcacactacctcaatggaattttcactttctccctgtttctactttcgcatcatgcctaattggattacttgatgcatgctcttattttt

SEQ ID NO: 5498 - protein, 354 aa, Glycine max
MPSKHKQTLQRFVSFHLRRTMSEAPPSQPSPPTANASPPPYWCYHCEKRVSIETLANLPDVVCGECKNGFVESIHTPSRSRSPSASSDDPYFGSQFLQVLRLIAQSARDDDASPPPPPSRSPENDFLRIELGGWDNDEENDNDNDNDDEEFEEHEEAEDRSGNEDPHGGDDEDLRRRRRELLRLRIRDLATRTRSMRNRILDWAEILMGLEDNSIEFRLQLPESDRYVGNPEDYVDAAEYEALLHTLAESDGGGRRGAPPASKAAVEALPTVKIASESEAVACAICKDLLGVGDLAKRLPCGHGYHGDCIVPWLSSRNSCPVCRYELPTDDKEYEEERVVNSASSSGGGGSAIV

SEQ ID NO: 5499 - DNA, 948 bp, Arabidopsis thaliana
  CDS (1)..(948)
atggaagatgcatcagagactagctactggtgtcacatgtgctcccgatcggtgattccattgattcaagacgaaatcatcaaatgcaatttctgtcaaagtggttttgttgaagaaatggataataatgatgaccatcaggctgctgattctctctggactcctatcttgatggagatgatgaacaacaatcacgaccaacattctaccaatcaggaagactcagaatctattcttgaagatgaagacgaagacgaagatgatggtgatgatggtgatcagaacaatgatggagaaattgatataactcatcaacttgaagagattaggaggataaggactagacattcaactgctattgttaatctgcttcaggggattcgagctggattattgatcgaatccgagaacaacgaggataatcccgataatagcgagcttgtcgtcttgatcaactcatttaaccaaaggatcagggttcatcaagattctgtagacaccacttctgttccttctggatctttgggtgactatttcattggacctggattcgagacgttgcttcagcgtttggctgagaatgatctgaacaacaggtatgggacacctccagctacaaaagaagcggttgaggcattggcgatggtgaaaatcgaagatagtttgttgcagtgtagtgtgtgtttggatgattttgagattggaatggaggctaaagagatgccgtgtaagcataagtttcatagtgactgcttgttgccatggcttgagcttcatagctcatgccctgtttgcagatatctgcttcctacaggagatgatgatgagccaaagactgatgcagaaacatcgagaaacgatgataacaatgaagatatcagtaatgcttctatggctagtaatggatcatcaccagactcaagttcgaacaattcatcggttaactaa

SEQ ID NO: 5500 - protein, 315 aa, Arabidopsis thaliana
MEDASETSYWCHMCSRSVIPLIQDEIIKCNFCQSGFVEEMDNNDDHQAADSLWTPILMEMMNNNHDQHSTNQEDSESILEDEDEDEDDGDDGDQNNDGEIDITHQLEEIRRIRTRHSTAIVNLLQGIRAGLLIESENNEDNPDNSELVVLINSFNQRIRVHQDSVDTTSVPSGSLGDYFIGPGFETLLQRLAENDLNNRYGTPPATKEAVEALAMVKIEDSLLQCSVCLDDFEIGMEAKEMPCKHKFHSDCLLPWLELHSSCPVCRYLLPTGDDDEPKTDAETSRNDDNNEDISNASMASNGSSPDSSSNNSSVN

SEQ ID NO: 5501 - DNA, 987 bp, Arabidopsis thaliana
  CDS (1)..(987)
atgtcttccggcgtaaattcaactggctccgccgcagcagcaccggaggttgacaagatgttcttctgctaccagtgcaatcaaacagtcacaatctcaatttcctcatccgctgatcctttttgtccaatttgtaaccaagggtttcttgaagaatacgaagaccctaaccctaatcaatccctcaatttcaaccctaactcttctgattcctttttccccatggccgatcctttctccaccttgctcccgctcatattcggctcttccgctgccgctccttccggcatggacttcatgagcttattcggtccttcgatgcaaccacaggctcgttccactcagcagaatcctcagtctgacgcgtttgatccgtttacgtttcttcagaatcatctccagactttgcgatctagcggtacgcactttgagttcgtgatcgagaatcatccttcggatccaggtaatcgtatgcctgggaatttcggtgattacttctttggtccaggtcttgagcagttgattcagcaactagctgagaatgatcctaatcgttacggaactcctcctgcttccaaatccgccattgatgctcttcctactgttaaggtaacgaaggatatgttgaaatcggagatgaaccaatgcgcggtgtgtatggatgagtttgaggatggtagcgatgttaagcagatgccttgtaagcacgtctttcatcaggactgtttgctcccttggctggagttgcataattcgtgtcctgtttgtcgattcgagttgcctacggatgatcctgattatgagaacaggagtcaaggaagtcaggggagtggtgatggacaaggatcggttgagggtcagcagacgccgaggtttagtatacaacttccttggccgttcaggagacaagatggctctggttcaggctcgggagcacctggtactggtggaggtaatcttgagaccaggggtgaagatttggattga

SEQ ID NO: 5502 - protein, 328 aa, Arabidopsis thaliana
MSSGVNSTGSAAAAPEVDKMFFCYQCNQTVTISISSSADPFCPICNQGFLEEYEDPNPNQSLNFNPNSSDSFFPMADPFSTLLPLIFGSSAAAPSGMDFMSLFGPSMQPQARSTQQNPQSDAFDPFTFLQNHLQTLRSSGTHFEFVIENHPSDPGNRMPGNFGDYFFGPGLEQLIQQLAENDPNRYGTPPASKSAIDALPTVKVTKDMLKSEMNQCAVCMDEFEDGSDVKQMPCKHVFHQDCLLPWLELHNSCPVCRFELPTDDPDYENRSQGSQGSGDGQGSVEGQQTPRFSIQLPWPFRRQDGSGSGSGAPGTGGGNLETRGEDLD

SEQ ID NO: 5503 - DNA, 1188 bp, Arabidopsis thaliana
  CDS (1)..(1188)
atgatgccaaattctagatcggcgacaataactccgacgacagaatcaaccaccacaacaacaacaacaacaacgactctaacgacgtcgtattggtgttacagttgtacacgattcatcagcgtttgggaagatcaagacgcaaacgctggagtcttatgtccttattgcaacggtggattcatcgaagagattgaagattcttctaattccaccgtcgcggcgattccggcttcgactccggaagttagatcggttgaggaaacacatagatctataattagacgtcgtagatctaatcgccggacgtcctttaatccggtaatcgtcttacacggcggaggaggaggaggagccggtgagagagttgagaacgaagaaggtgacggagctactagagaacgacgagcttatgagttttattacgatgatggatctggttcaggtctaagacctcttcctgattctgtatctgagatcttgatgggatctggattcgaacggttacttgaacaattgagtcagatcgaagcgtcaggtaacggaatcggtagatctgggaatccaccggcgtcgaaatcagcgattgaatctttacctagagtcgaaatctcagattgtcatacgaaagcagaagctaattgcgccgtgtgtacggaggttttcgaagccggaatcgaaggtcgtgagatgccgtgtaaacacatatttcacggtgattgtattgttccatggctttcgattcggaattcgtgtcctgtgtgtagatttgagttaccttcagatccaatccaacggagtaatgaagaagaacatgccgttgggatgacgatttggagattacctggtggtggtttcgctgttggtaggtttaacgcgggagtgagagaaggtgagaggatattgccggtggtattgacggagatggatggtggtggacttggtagtaatgaaggaccgagaaggatatcttgggttagagctcatgagacaccggagatgagtaggaatggtggtcgttctggtaatggtggtagattgagaagagctgttcgtggaatggtttcgtttatgagaagagttagaccaagtcgtggctcttcgaattcgaatgttattgatttggatagtgatggtgaaactagagttatgaatcgatcaacttcgttgatcagaagatttttctga

SEQ ID NO: 5504 - protein, 395 aa, Arabidopsis thaliana
MMPNSRSATITPTTESTTTTTTTTTTLTTSYWCYSCTRFISVWEDQDANAGVLCPYCNGGFIEEIEDSSNSTVAAIPASTPEVRSVEETHRSIIRRRRSNRRTSFNPVIVLHGGGGGGAGERVENEEGDGATRERRAYEFYYDDGSGSGLRPLPDSVSEILMGSGFERLLEQLSQIEASGNGIGRSGNPPASKSAIESLPRVEISDCHTKAEANCAVCTEVFEAGIEGREMPCKHIFHGDCIVPWLSIRNSCPVCRFELPSDPIQRSNEEEHAVGMTIWRLPGGGFAVGRFNAGVREGERILPVVLTEMDGGGLGSNEGPRRISWVRAHETPEMSRNGGRSGNGGRLRRAVRGMVSFMRRVRPSRGSSNSNVIDLDSDGETRVMNRSTSLIRRFF

SEQ ID NO: 5505 - DNA, 1191 bp, Arabidopsis thaliana
  CDS (1)..(1191)
atggaggaaacaatggcagctaggtattggtgtcacatgtgttcacaaatggtgaatccagtaatggaatctgagatcaaatgtcccttttgccaaagcggattcatcgaagaaatgagcggtaatggcggtggaggtggtggcagaggcataagagatgttcaagattcagaaaccgattttggaacagaccgtgcattgtctctatgggcaccaatcttgcttggaatgatgagtagtcctcgaagacgaagaaggtttagaagatcagagtttggtgaagagaatgatgataatggtgatgacttgactactaatgctgatgggaatgggaatgatagtaacaacagtaataataacgtgtatcgtcatcatcgagctaggagacatggtggagagattgatttagatagagagtttgaatctatcttgaggagaagacgaagaagctcagggaatatattgcagttgcttcaagggattcgtgcagggattgcttctgagtatgaaagctctgataacaattgggataattctcgagagagggatagagttataatgattaatccgtataaccaatcgctagttgttccttcggatcagaatcagaatcatccttcattgacttcacttggagattacttcattggacctggtttagatcttttgcttcagcatttggctgagaatgatcctaataggcaagggactccacctgctcgtaaagaagctgttgaagctttaccaacggttaagataatggaacctttgcaatgttctgtttgtttggatgattttgagaaaggtacggaagctaaagagatgccttgtaagcataagtttcatgttcggtgtattgttccctggcttgagcttcatagttcttgtcctgtgtgtcgttttgagcttccttctagtgctgatgatgatgatgagactaagactgattccgagagagtgctgagaacaagaaatgttcgggaaacgagtaacggaaacgttgttgagaatgtgggaaatgcggatagaggaagagaggatgaggtgaggagtggaaatgggagacggttttcgtttccatggccgtttagtggattgttctcgtcttcttcttcttcgtcttcttcaacctctggatctcaatctggtgagaacaatttcttctcaagatcttctggttcttctcgctga

SEQ ID NO: 5506 - protein, 396 aa, Arabidopsis thaliana
MEETMAARYWCHMCSQMVNPVMESEIKCPFCQSGFIEEMSGNGGGGGGRGIRDVQDSETDFGTDRALSLWAPILLGMMSSPRRRRRFRRSEFGEENDDNGDDLTTNADGNGNDSNNSNNNVYRHHRARRHGGEIDLDREFESILRRRRRSSGNILQLLQGIRAGIASEYESSDNNWDNSRERDRVIMINPYNQSLVVPSDQNQNHPSLTSLGDYFIGPGLDLLLQHLAENDPNRQGTPPARKEAVEALPTVKIMEPLQCSVCLDDFEKGTEAKEMPCKHKFHVRCIVPWLELHSSCPVCRFELPSSADDDDETKTDSERVLRTRNVRETSNGNVVENVGNADRGREDEVRSGNGRRFSFPWPFSGLFSSSSSSSSSTSGSQSGENNFFSRSSGSSR

SEQ ID NO: 5507 - DNA, 1056 bp, Arabidopsis thaliana
  CDS (1)..(1056)
atggaagaagcagttgtaacgaggtattggtgtcatatgtgttctcaaactgtgaatccagtcatggaagctgagatcaaatgtcccttttgtcaaagtgggtttgttgaagaaatggaagatgacgacgatcatgattcttctgatccggctgatgttagagcaaacaactctctttgggcgcctatcttgatggaacttatgaatgatcctgtgcgtcgtaggagaaaccagagtgttgagtctgttgaagataatcaaaacgaggtacagaccgagaacaatgaagacgatggagaaaatgatttggattggcagcttcaagagattctcaggagaaggagaagacattccgctgctgttttgcagttgcttcaggggatacgagcagggttgtctgtagaatctgagagtactggtaatggaggtaataatccgggacgggtgatcttgatcaatacctccaatcagactatcacggttcaaaactctgctgatatggattctgtacctgctggttctttaggtgactatttcattggtcctggatttgaaatgttgcttcaacgtctagctgagaatgatcccaacagatatggaacacctcctgctaaaaaagaagctgtcgaggctttggctactgtgaaaatcgaagagactctgcaatgttcggtttgtttagatgattttgagattggaactgaggcaaagctgatgccctgtacgcacaagtttcatagtgactgcttgttaccatggcttgagcttcacagttcatgcccggtttgcagatatcagttacctgcagatgaagccaagactgattcagtaacaacaacgagcgataacaatggaagcagtagtgcttctgctacaaccagccatggagctgagaacagcgatggaaaccggcgccaagaagaagaagaagaagaagaagaggaggaggaggaggagaacgagaacaatgacggaagcggattctcgatcccgtggccgtttagcaccttgttctcctcgtcgcaagatagcaatgcaccaacggattctagttaa

SEQ ID NO: 5508 - protein, 351 aa, Arabidopsis thaliana
MEEAVVTRYWCHMCSQTVNPVMEAEIKCPFCQSGFVEEMEDDDDHDSSDPADVRANNSLWAPILMELMNDPVRRRRNQSVESVEDNQNEVQTENNEDDGENDLDWQLQEILRRRRRHSAAVLQLLQGIRAGLSVESESTGNGGNNPGRVILINTSNQTITVQNSADMDSVPAGSLGDYFIGPGFEMLLQRLAENDPNRYGTPPAKKEAVEALATVKIEETLQCSVCLDDFEIGTEAKLMPCTHKFHSDCLLPWLELHSSCPVCRYQLPADEAKTDSVTTTSDNNGSSSASATTSHGAENSDGNRRQEEEEEEEEEEEEENENNDGSGFSIPWPFSTLFSSSQDSNAPTDSS

SEQ ID NO: 5509 - DNA, 1224 bp, Arabidopsis thaliana
  CDS (1)..(1224)
atgccgtcaacgccgacgacgccgactacaacaacgccgatcacggcttcgtattggtgttacagctgtacgcgtttcgtcagcgtttgggctgatcaaggcacaacaaccgtcggtagcgtcgcttgccctcactgcgacggcggttttatcgaacagattaacgattcttcctccgccgctaccgaattaacgattccggcttctactgaagtaagatcgatcaataacaaccgtagatccgtgattagacgccggagatccggtcgtcgtccgtcctttaatccggtcatcgtacttcaaggaggcgccggcgagagagaagagggagaagaaggagatgcggctagagatcgacgcgcttttgagttttattacgatgacggatccggatcgggtcttagaccgcttccggattctgtatctgagatcttgatgggatctggattcgagcggttacttgaacagctaagccaaatcgaagcgtcggctactggaattggtagatctggaaaccctccggcgtctaaatcggcgattgagtctttacctagagtcgaaatctcggattgccacataggctcggaggctaattgcgctgtttgcacggagattttcgagacggagacggaggcgcgtgagatgccgtgtaaacaccttttccacgacgattgcatcgtaccgtggctatcgattcgaaactcttgtcccgtgtgcagattcgagctaccttcagagcctaatcgacggagcaacaacaacgaggaggataacgccgtggggatgacgatttggagacttcccggtggtggattcgccgtagggaggtttaacgcagcaatgagagacggagagagagttttgccagtggtgttaacagaaatggatggtggtgggattggtaatagccaggatggtcctagacggatctcatgggttaggtcacacggtacactcgaatcggatagtaacggtactggctcaggttccggctccggtggaagattgaggaggatggttcgtggaatggtgtcgttaatgaggagagtgagaccaaaccgtagctcttcttcttcatcagctgcgatatcaacttcttctgataatctggatttgaacattgaagtagaatctagggttttggataggtcaaattcagtgatgagaagatacttcagaagaaacagaagtaacagggattcttcgtcttcagttcttcattga

SEQ ID NO: 5510 - protein, 407 aa, Arabidopsis thaliana
MPSTPTTPTTTTPITASYWCYSCTRFVSVWADQGTTTVGSVACPHCDGGFIEQINDSSSAATELTIPASTEVRSINNNRRSVIRRRRSGRRPSFNPVIVLQGGAGEREEGEEGDAARDRRAFEFYYDDGSGSGLRPLPDSVSEILMGSGFERLLEQLSQIEASATGIGRSGNPPASKSAIESLPRVEISDCHIGSEANCAVCTEIFETETEAREMPCKHLFHDDCIVPWLSIRNSCPVCRFELPSEPNRRSNNNEEDNAVGMTIWRLPGGGFAVGRFNAAMRDGERVLPVVLTEMDGGGIGNSQDGPRRISWVRSHGTLESDSNGTGSGSGSGGRLRRMVRGMVSLMRRVRPNRSSSSSSAAISTSSDNLDLNIEVESRVLDRSNSVMRRYFRRNRSNRDSSSSVLH

SEQ ID NO: 5511 - DNA, 1143 bp, Drosophila melanogaster
  CDS (1)..(1143)
atggcagaggcaatggttgtggaggaccgccccgcggaagccaagcgattcttctgccacatgtgcaacgtggagatcaacattcccaactcagacttcacctgtccgctgtgcgccaacggtttcgtggaggagctgccggcaaatgcgccggagatggattcttcgacggctggagcatccggcagtgccagatccggaagcagcggtagtggctcttctggctcacacgacaccctgagcagaggcagctcatcgagcggatctcaggtgaatgttgagtcgctgcgtaacgatattgtgtcgctgctaaacatgcggaatgtgcccaacttggaaattaccatcgagccaaacagacggcacagcaacgtgctgcatctaggcggctttggtggtccctcgggtagtgactctgcccgcggcctgaccgccggcggacgagtgcgtccggcaaatttggaccgactggacaatgttctctttgattttctgcagagcctgccactggccggcgccacggccgaaatagtaactggacccggtggaggaggtgtaggcggcggcggtaactcgcacatgttcttcatgggaaacccgggagattatgcgtggggccgagagggactagacaccattgtcacccaaatgctcaaccaaatggaaacttcaggaccgccgccattgtcggcgcagcgcataaacgagatacccaatgtgcagatcaatgccgaggaggtaaaccgcaagatccagtgctctatatgctgggacgacttcaagattgacgagacggtacgcaagctgccctgctcgcacctgtatcacgagaactgcatcgtgccttggctaaacctgcacagcacctgccccatatgccgcaagtcactggcagacgatggcaacgatgcggacgacgaatttgtcatgctcgatgccttcggaccagagatggcggccgatggcagtaattccgaaaggagatcggccagcaccgccacaggaacggacaatccctcgccggctaataatcccagtcaggcagcggcggaaggcggccgaacacgtccggatgctaatcccgcccaggcagcacgcaacaacatctttacctttgacgacgacaacatgtttctggactag

SEQ ID NO: 5512 - protein, 380 aa, Drosophila melanogaster
MAEAMVVEDRPAEAKRFFCHMCNVEINIPNSDFTCPLCANGFVEELPANAPEMDSSTAGASGSARSGSSGSGSSGSHDTLSRGSSSSGSQVNVESLRNDIVSLLNMRNVPNLEITIEPNRRHSNVLHLGGFGGPSGSDSARGLTAGGRVRPANLDRLDNVLFDFLQSLPLAGATAEIVTGPGGGGVGGGGNSHMFFMGNPGDYAWGREGLDTIVTQMLNQMETSGPPPLSAQRINEIPNVQINAEEVNRKIQCSICWDDFKIDETVRKLPCSHLYHENCIVPWLNLHSTCPICRKSLADDGNDADDEFVMLDAFGPEMAADGSNSERRSASTATGTDNPSPANNPSQAAAEGGRTRPDANPAQAARNNIFTFDDDNMFLD

SEQ ID NO: 5513 - DNA, 1113 bp, Oryza sativa subsp
  CDS (1)..(1113)
atgtcgaatccggccgcctactacgccgccgtcgcgcggaagcagtacttctgctaccaatgcaaccgcaccgtcctcctcccggcctccgccgccgccgccggggcgctctcctgcccggagtgccgcggggatttcatcgaggaggtcaacgtccccgcccccgccatcatccccttccccttcgccttccccccgatgatgcccaccgccacctccgcctccgccgccgccgccgccgcggcctcgccgacccagtcctcctcctcgtccgccgccacgtcgccatccagcgacctctccgccttcctcaacagcatgctcggcccgctcaacctccgcaccgacgagcggatgccgggaaccacctccgccgcgggcacggcgacccccgaggacgagcccgacgggttcgacgcggtcacgttcttccagaactacctccagaatctcatggacggcggcgccaacatccaggtcctcctcgacgacgccagcgtcggcctcgcccccggcatcggccgcgtcggcggcgccagcttcggggactacttcgtcggcccgggcctggagcagctcatcgagcagctcgccgagaacgacccgaaccgctacggcacgccgccggcggccaagtcggctctctccacgctccccgatgtcatcgtgaccgacgccatggtcgccgcggcggatggcgccgagtgcgccgtctgcaaggaggatttctcgcctggggaaggggccaagcagatgccctgcaagcacatgtaccacgccgactgcatcatgccatggctggatctccacaattcatgccccatatgccgctttgagctgcctactgatgaccctgattacgaggggcgtaagaaatcaaacccacagccaactgctggcgttgatgccggagctgcatctgggagttctactgctgctgaggagcgagaggagagtggggagagtgcgaggttggtcgaacggcggtttaacgtgtcgctgccatggccttttagtggattaggatcgcaaacgccgcagcaggatgggagcaatgggggcgctggtgccagtggctcgaaggatggaggcgcatccagtgacaaaaaataa

SEQ ID NO: 5514 - protein, 370 aa, Oryza sativa subsp
MSNPAAYYAAVARKQYFCYQCNRTVLLPASAAAAGALSCPECRGDFIEEVNVPAPAIIPFPFAFPPMMPTATSASAAAAAAASPTQSSSSSAATSPSSDLSAFLNSMLGPLNLRTDERMPGTTSAAGTATPEDEPDGFDAVTFFQNYLQNLMDGGANIQVLLDDASVGLAPGIGRVGGASFGDYFVGPGLEQLIEQLAENDPNRYGTPPAAKSALSTLPDVIVTDAMVAAADGAECAVCKEDFSPGEGAKQMPCKHMYHADCIMPWLDLHNSCPICRFELPTDDPDYEGRKKSNPQPTAGVDAGAASGSSTAAEEREESGESARLVERRFNVSLPWPFSGLGSQTPQQDGSNGGAGASGSKDGGASSDKK

SEQ ID NO: 5515 - DNA, 873 bp, Vitis vinifera
  CDS (1)..(873)
atggacgaatcgccaatacagtctgattctttgcactattggtgctatcattgcgaagagcatgtctccactgaaaccctactggatctgtctgacgtcatctacaacgaatgtaagaacgacttcgttgagacaatcggcgtcatgctgacagctttggagcctcgaagcgctgatcaaatcgacgagcactctttagtatacatgctcacgcgacgcctccgacatatcactcaaccgtcgagtgacaacgaggatctgccttcaccgcctccagatcacgcatctgaagacgactttctgagaatcatgctcgaacccgaaggttatattggaaattcgaaagattacattgatgcaaccggatacgaggagttgtcgcaaaacctggttgagagcgacaaaactgtgagaagaggaactccaccagcatcgaaatctgcaatttccacattaccaagtgttgagattaagttggagaggcaggttttgaattgcgctatttgtaaagatgtggtctccatttgcgagactactaggaaattgccatgtggccatggatactatggggattgcatcatcatttggttgaatcccaggaattcttgtcctatgtgtaggtttgaattacccacagatgattctaaatatgaagaagagaagaaggatccttgttctttgatctcgataagctgtcagagtattcttcattggtttttcagtgaacatgtgttacaatgtaaatgctccagtctgtggcggtacaggataaggcacttgcaactccttatccgatcactccaatcaacggttgatgatgtgattactaagatttggacatttacagaacaggacatagggctgcatccttga

SEQ ID NO: 5516 - protein, 290 aa, Vitis vinifera
MDESPIQSDSLHYWCYHCEEHVSTETLLDLSDVIYNECKNDFVETIGVMLTALEPRSADQIDEHSLVYMLTRRLRHITQPSSDNEDLPSPPPDHASEDDFLRIMLEPEGYIGNSKDYIDATGYEELSQNLVESDKTVRRGTPPASKSAISTLPSVEIKLERQVLNCAICKDVVSICETTRKLPCGHGYYGDCIIIWLNPRNSCPMCRFELPTDDSKYEEEKKDPCSLISISCQSILHWFFSEHVLQCKCSSLWRYRIRHLQLLIRSLQSTVDDVITKIWTFTEQDIGLHP

SEQ ID NO: 5517 - DNA, 1005 bp, Vitis vinifera
  CDS (1)..(1005)
  misc_feature (120)..(120): y is t or c
  misc_feature (513)..(513): y is t or c
atggacgaatcgccgatacagtccgatactttgcactactggtgctaccaatgcgacaagcacgtctccatcgaaaccctaccggatctgcctgacgtcatctgcaacgaatgtaagacyggcttcgtcgagacaatcggcgtcgcgccgacagctccggagcctcgaaacgctgatcagatcgacgagcgctctttggtatacgcgtttacgcgacgcctccgacatatcgctcagccgccgagtgacgacgaagatccgccttcactgcctccagatcacgcatctgaagacgactttctgagaatcgatcttgacggttgggacaatgacgaggatgaagacgtgagcgagaacgatggagagggagaagaacaagaagaagaagaagatcgatctgataacgagaacgaagggaatgtatatcgcccagagatagatcgagatcacctccggaggcgtcgcgagatgttacgccgtcgtattcataacctcgctgccgcctccggcaayccgaacgcagtccttgattgggcgatcttgatggcatcagaggacagcacaatcgaatttcattttcagatgcccgaacccgaaggttatactggaaatccggaagattacgttgatgcagctggatacgaggagttgttgcagaacctggccgagagcgacggagctgcgagaagaggagctccaccggcatcgaaatctgcaatttccgcattaccgagtgttgagattaagtcggaggagcaggttttagcttgcgctatttgtaaagatgtggtctccatttgcgagattgctaggaaattgccgtgtggccatggataccatggggattgcatcgtcccttggttgaattccaggaattcttgccctgtgtgtaggtttgaattacccacagatgattctgagtatgaagaagagaggaagaagagattggtcccaacttctggaggagcttcaggttcaggtggagagaattcggattctggttga

SEQ ID NO: 5518 - protein, 334 aa, Vitis vinifera
MDESPIQSDTLHYWCYQCDKHVSIETLPDLPDVICNECKTGFVETIGVAPTAPEPRNADQIDERSLVYAFTRRLRHIAQPPSDDEDPPSLPPDHASEDDFLRIDLDGWDNDEDEDVSENDGEGEEQEEEEDRSDNENEGNVYRPEIDRDHLRRRREMLRRRIHNLAAASGNPNAVLDWAILMASEDSTIEFHFQMPEPEGYTGNPEDYVDAAGYEELLQNLAESDGAARRGAPPASKSAISALPSVEIKSEEQVLACAICKDVVSICEIARKLPCGHGYHGDCIVPWLNSRNSCPVCRFELPTDDSEYEEERKKRLVPTSGGASGSGGENSDSG

SEQ ID NO: 5519 - DNA, 1071 bp, Medicago truncatula
  CDS (1)..(1071)
atggacgaaacaatggcggcaagatattggtgtcacgcgtgttctcaaatagtcagtcccgtcatgggaatggagatcaaatgtccactttgccaaagtggatttattgaagaaatgagcagtgctactggtatcagtgacttgcaaaatacaccagaaactgattttggagtggatcgttctccctctctttgggcaccaatcttgctaggcatgatgggtaatccgcggcttcgtcgaagattgagacgaatagagcttgaagatgattatgaaagtggtaatcgtgatgatgatcatggtggtgtaggacattatgatcgagagcttgagtccatccttcgaaggaggagaagaagctcagctaccattcagcaattgctccaaggcataagagctggactgacatctgaatcacacgagaatactgacagtgatgaccgtgttagggaaagagaaagagagcatgtaatcttgattaatccttttaatcagactattattgttcaaggttcctatgattcaaaccgagatcaaagtgataatcataacccaattggggctcttggtgactatttcgtagggcctggtttggatctattgttgcaacatttgtctgagaatgaccctaataggtatggaactccacctgcaccgaaggaagccgttgaatctctacctactgtgaagattaacgagaatttgcagtgttctgtctgtttggatgattttgaagttggttctgaagctaaagagatgccatgtaaacataggtttcatagtgcttgtatcctaccctggctggagcttcatagttcttgccctgtttgcaggtctcaattgcgagtggatgaacctaagcaagactctgatgtgtcaaggaatcacagaaatcaaagggatgatgaaattattggacatgccaatgccaatgctgaaggagatagtgaagggagaagtccaagtgggggtagaagattctcatttccatggcctttcaatggattattttcttcatcatcttctagttccaatgcaaatggaaatggtactcaatcagaaagaaactga

SEQ ID NO: 5520 - protein, 356 aa, Medicago truncatula
MDETMAARYWCHACSQIVSPVMGMEIKCPLCQSGFIEEMSSATGISDLQNTPETDFGVDRSPSLWAPILLGMMGNPRLRRRLRRIELEDDYESGNRDDDHGGVGHYDRELESILRRRRRSSATIQQLLQGIRAGLTSESHENTDSDDRVREREREHVILINPFNQTIIVQGSYDSNRDQSDNHNPIGALGDYFVGPGLDLLLQHLSENDPNRYGTPPAPKEAVESLPTVKINENLQCSVCLDDFEVGSEAKEMPCKHRFHSACILPWLELHSSCPVCRSQLRVDEPKQDSDVSRNHRNQRDDEIIGHANANAEGDSEGRSPSGGRRFSFPWPFNGLFSSSSSSSNANGNGTQSERN

SEQ ID NO: 5521 - DNA, 948 bp, Arabidopsis thaliana
  CDS (1)..(948)
atggaagatgcatcagagactagctactggtgtcacatgtgctcccgatcggtgattccattgattcaagacgaaatcatcaaatgcaatttctgtcaaagtggttttgttgaagaaatggataataatgatgaccatcaggctgctgattctctctggactcctatcttgatggagatgatgaacaacaatcgcgaccaacattctaccaatcaggaagactcagaatctattcttgaagatgaagacgaagacgaagatgatggtgatgatggtgatcagaacaatgatggagaaattgatataactcatcaacttgaagagattaggaggataaggactagacattcaactgctattgttaatctgcttcaggggattcgagctggattattgatcgaatccgagaacaacgaggataatcccgataatagcgagcttgtcgtcttgatcaactcatttaaccaaaggatcagggttcatcaagattctgtagacaccacttctgttccttctggatctttgggtgactatttcattggacctggattcgagacgttgcttcagcgtttggctgagaatgatctgaacaacaggtatgggacacctccagctacaaaagaagcggttgaggcattggcgatggtgaaaatcgaagatagtttgttgcagtgtagtgtgtgtttggatgattttgagattggaatggaggctaaagagatgccgtgtaagcataagtttcatagtgactgcttgttgccatggcttgagcttcatagctcatgccctgtttgcagatatctgcttcctacaggagatgatgatgagccaaagactgatgcagaaacatcgagaaacgatgataacaatgaagatatcagtaatgcttctatggctagtaatggatcatcaccagactcaagttcgaacaattcatcggttaactaa

SEQ ID NO: 5522 - protein, 315 aa, Arabidopsis thaliana
MEDASETSYWCHMCSRSVIPLIQDEIIKCNFCQSGFVEEMDNNDDHQAADSLWTPILMEMMNNNRDQHSTNQEDSESILEDEDEDEDDGDDGDQNNDGEIDITHQLEEIRRIRTRHSTAIVNLLQGIRAGLLIESENNEDNPDNSELVVLINSFNQRIRVHQDSVDTTSVPSGSLGDYFIGPGFETLLQRLAENDLNNRYGTPPATKEAVEALAMVKIEDSLLQCSVCLDDFEIGMEAKEMPCKHKFHSDCLLPWLELHSSCPVCRYLLPTGDDDEPKTDAETSRNDDNNEDISNASMASNGSSPDSSSNNSSVN

SEQ ID NO: 5523 - DNA, 1161 bp, Arabidopsis thaliana
  CDS (1)..(1161)
atgggcttcagcccaaaatctgtaatcatcgtttctgagttggagtcggccacatatgacataactgagaattacttttctctctcctctgacggttcttttcttccttcgtcctctcgttttttttgtttcgtcgtctctctctcgcgctctgaaaaattcgcagaatccgtcatgtcttccggcgtaaattcaactggctccgccgcagcagcaccggaggttgacaagatgttcttctgctaccagtgcaatcaaacagtcacaatctcaatttcctcatccgctgatcctttttgtccaatttgtaaccaagggtttcttgaagaatacgaagaccctaaccctaatcaatccctcaatttcaaccctaactcttctgattcctttttccccatggccgatcctttctccaccttgctcccgctcatattcggctcttccgctgccgctccttccggcatggacttcatgagcttattcggtccttcgatgcaaccacaggctcgttccactcagcagaatcctcagtctgacgcgtttgatccgtttacgtttcttcagaatcatctccagactttgcgatctagcggtacgcactttgagttcgtgatcgagaatcatccttcggatccaggtaatcgtatgcctgggaatttcggtgattacttctttggtccaggtcttgagcagttgattcagcaactagctgagaatgatcctaatcgttacggaactcctcctgcttccaaatccgccattgatgctcttcctactgttaaggtaacgaaggatatgttgaaatcggagatgaaccaatgcgcggtgtgtatggatgagtttgaggatggtagcgatgttaagcagatgccttgtaagcacgtctttcatcaggactgtttgctcccttggctggagttgcataattcgtgtcctgtttgtcgattcgagttgcctacggatgatcctgattatgagaacaggagtcaaggaagtcaggggagtggtgatggacaaggatcggttgagggtcagcagacgccgaggtttagtatacaacttccttggccgttcaggagacaagatggctctggttcaggctcgggagcacctggtactggtggaggtaatcttgagaccaggggtgaagatttggattga

SEQ ID NO: 5524 - protein, 386 aa, Arabidopsis thaliana
MGFSPKSVIIVSELESATYDITENYFSLSSDGSFLPSSSRFFCFVVSLSRSEKFAESVMSSGVNSTGSAAAAPEVDKMFFCYQCNQTVTISISSSADPFCPICNQGFLEEYEDPNPNQSLNFNPNSSDSFFPMADPFSTLLPLIFGSSAAAPSGMDFMSLFGPSMQPQARSTQQNPQSDAFDPFTFLQNHLQTLRSSGTHFEFVIENHPSDPGNRMPGNFGDYFFGPGLEQLIQQLAENDPNRYGTPPASKSAIDALPTVKVTKDMLKSEMNQCAVCMDEFEDGSDVKQMPCKHVFHQDCLLPWLELHNSCPVCRFELPTDDPDYENRSQGSQGSGDGQGSVEGQQTPRFSIQLPWPFRRQDGSGSGSGAPGTGGGNLETRGEDLD

SEQ ID NO: 5525 - DNA, 1110 bp, Oryza sativa
  CDS (1)..(1110)
atggaacaaggtcagggagatagatactggtgccaccactgcgaggaagtgatcgaacctgtggagcctgatatgaagtgtcctagctgtgacagcgggttcgtggaagagatggggtctgcaggctttgagccatcgaccaacttgaggtctgatcgtatctccctctgggcaccactgctgctcgggatgatgggaggctcatcgcggcgagcaaggcggctccgaaggcagatcatggaggatgatgacgacgacgatgacgatgaggatgatgaagatgattcagaccatgagcttgaagacttgtttaggaggcagaggaggggctcatctcttgtaaggctgctccagaccctccgggatgacttgaggggcttggatgacattggcagggatagtgacagagacagggaaagggagagaagggagagggagaggctgagggagcgggagagggagagggagaggatgagagagagggagagagaacggaggagagaaaggacagaaagcttgatactgatcaactccaacaatgaggccattattctccaaggaacatttggacctgatgacaaccaggatgactcgagcaatacaagttctggtgtttcacttggtgactactttcttggtcctggattagatatcctcttgcagcatttggcggaaagtgatcttaatcgttctggtacaccacctgccaagaaggaagctgtagaagcattgccaactgtgaacatccaggaagtgttaggctgttctgtctgtcttgaggatttcgaaatggggacagaagcgaaggagatgccttgtcaacataagttccactcccagtgcatacttccatggctggagctacacagttcttgcccaatctgtaggtttcagttgcctaccgaggagtcgaaaaacccatgtgaatcagccggtggaattgtgtcagtgaacgatgatggagatgatgctggtacaagtagtgacgtagatagtgctaaccaacctggtagtcctatattctctgctttgagtgcacttttctcaaatccatcatcctcatcctcatcctcatctgatgataatgcaccacactcttctgagagctga

SEQ ID NO: 5526 - protein, 369 aa, Oryza sativa
MEQGQGDRYWCHHCEEVIEPVEPDMKCPSCDSGFVEEMGSAGFEPSTNLRSDRISLWAPLLLGMMGGSSRRARRLRRQIMEDDDDDDDDEDDEDDSDHELEDLFRRQRRGSSLVRLLQTLRDDLRGLDDIGRDSDRDRERERRERERLRERERERERMRERERERRRERTESLILINSNNEAIILQGTFGPDDNQDDSSNTSSGVSLGDYFLGPGLDILLQHLAESDLNRSGTPPAKKEAVEALPTVNIQEVLGCSVCLEDFEMGTEAKEMPCQHKFHSQCILPWLELHSSCPICRFQLPTEESKNPCESAGGIVSVNDDGDDAGTSSDVDSANQPGSPIFSALSALFSNPSSSSSSSSDDNAPHSSES

SEQ ID NO: 5527 - DNA, 972 bp, Oryza sativa
  CDS (1)..(972)
atggcagaagctgcaatcacaaggtactggtgccatgaatgcgagcaggccattgaggaggccatggtggatgagatcaagtgcccatcctgtggtggcgggttcgttgaagagatgaccgatgaggagattgagagactgaccaacaggcagccagagccgggtttctcgcaatggaaccctattgagcatccaggagaaacgatggacagcgacgatgaagataatgatttaggtcgtgagtttgagggttttatcaggaggcatcgacgggcatcaactctacgacgcgtgcttgacagcatccatgatgaccttgcagatgaccaagaaagggacagttccattctgatcaacgccttcaaccaagccctcgctctgcaaggctcagtgcttgatcctgatgagggccaaggtgaccaaggcggttcaacaaatgatgatggcttactggaggagtatgtcctcggagcaggtctgagcctgctgcttcaacatttggctgagagcgacccaagtcggaatggtacccctcctgcaaagaaagaggcggttgaagcgctgcccactgtgaaaatcgaagaggttgtcagctgttcagtctgccttgatgatcttgaggtggggtcccaggctaaacaaatgccatgtgaacataagtttcattcttcttgtatcctgccatggcttgaattacatagttcctgcccggtttgccggtttgagctgccttctgaggagacaaaagacttgaacgagcctagcaacattggtagagtggaggacagccatgaggaagtcagagctgatggccctggaaacgtcagcgagagcagtaacagaccctgggctattgttccttggttgaatgagctattctcaactcgtgaggcacagaatgctggaggtgtttctacggatcaacaatcaccgcacacttctggaaccaacccaaatgcagggcacagttga

SEQ ID NO: 5528 - protein, 323 aa, Oryza sativa
MAEAAITRYWCHECEQAIEEAMVDEIKCPSCGGGFVEEMTDEEIERLTNRQPEPGFSQWNPIEHPGETMDSDDEDNDLGREFEGFIRRHRRASTLRRVLDSIHDDLADDQERDSSILINAFNQALALQGSVLDPDEGQGDQGGSTNDDGLLEEYVLGAGLSLLLQHLAESDPSRNGTPPAKKEAVEALPTVKIEEVVSCSVCLDDLEVGSQAKQMPCEHKFHSSCILPWLELHSSCPVCRFELPSEETKDLNEPSNIGRVEDSHEEVRADGPGNVSESSNRPWAIVPWLNELFSTREAQNAGGVSTDQQSPHTSGTNPNAGHS

SEQ ID NO: 5529 - DNA, 1113 bp, Oryza sativa
  CDS (1)..(1113)
atgtcgaatccggccgcctactacgccgccgtcgcgcggaagcagtacttctgctaccaatgcaaccgcaccgtcctcctcccggcctccgccgccgccgccggggcgctctcctgcccggagtgccgcggggatttcatcgaggaggtcaacgtccccgcccccgccatcatccccttccccttcgccttccccccgatgatgcccaccgccacctccgcctccgccgccgccgccgccgcggcctcgccgacccagtcctcctcctcgtccgccgccacgtcgccatccagcgacctctccgccttcctcaacagcatgctcggcccgctcaacctccgcaccgacgagcggatgccgggaaccacctccgccgcgggcacggcgacccccgaggacgagcccgacgggttcgacgcggtcacgttcttccagaactacctccagaatctcatggacggcggcgccaacatccaggtcctcctcgacgacgccagcgtcggcctcgcccccggcatcggccgcgtcggcggcgccagcttcggggactacttcgtcggcccgggcctggagcagctcatcgagcagctcaccgagaacgacccgaaccgctacggcacgccgccggcggccaagtcggctctctccacgctccccgatgtcgtcgtgaccgacgccatggtcgccgcggcggatggcgccgagtgcgccgtctgcaaggaggatttctcgcctggggaaggggccaagcagatgccctgcaagcacatttaccacgccgactgcatcatgccatggctggatctccacaattcatgccccatatgccgctttgagctgcctactgatgaccctgattacgaggggcgtaagaaatcaaacccacagccaactgctggcgttgatgccggagctgcatctgggagttctactgctgctgaggagcgagaggagagtggggagagtgcgaggttggtcgaacggcggtttaacgtgtcgctgccatggccttttagtggattgggatcgcaaacgccgcagcaggatgggagcaatgggggcgctggtgccagtggctcgaaggatggaggcgcatccagtgacaaaaaataa

SEQ ID NO: 5530 - protein, 370 aa, Oryza sativa
MSNPAAYYAAVARKQYFCYQCNRTVLLPASAAAAGALSCPECRGDFIEEVNVPAPAIIPFPFAFPPMMPTATSASAAAAAAASPTQSSSSSAATSPSSDLSAFLNSMLGPLNLRTDERMPGTTSAAGTATPEDEPDGFDAVTFFQNYLQNLMDGGANIQVLLDDASVGLAPGIGRVGGASFGDYFVGPGLEQLIEQLTENDPNRYGTPPAAKSALSTLPDVVVTDAMVAAADGAECAVCKEDFSPGEGAKQMPCKHIYHADCIMPWLDLHNSCPICRFELPTDDPDYEGRKKSNPQPTAGVDAGAASGSSTAAEEREESGESARLVERRFNVSLPWPFSGLGSQTPQQDGSNGGAGASGSKDGGASSDKK

SEQ ID NO: 5531 - DNA, 909 bp, Brassica napus
  CDS (1)..(909)
atggaagaagaagcggcagttgcatactggtgccacatgtgttctcgaactgtggatccactaatggaagctcagatcaaatgccccttttgtgctagtggcttcgttgaagagatggccgaggaagaggaggaagaacaagaacactctccaaatcctctctgggctcccatcttgatgcaactcgtgaatgatccttccctccgcgcaaggaaccagagtgttgatgaagatactcaaaacaacgaggcagagaacgatgtggattctcagctccaagagattctcaggaggagaaggggaagacgtcccgtttccgttatgcaattacttgatggtgacagagagagagctggaagcttgatcgtggtctctggtggttctttgagtgagtatttcatcggtcctggcttcgaagccctgcttcagcgtttaacagataacgatcccaacagatacggaacacctcctgctcaaaaagaagccgttgaggctttggccactgtgaatatccaagagggtactctgcagtgttcggtgtgtttggatgattttgagattggggtggaagcaaaagagatgccttgtgagcacaagtttcaccgtgactgcttgctcccgtggcttgagcttcatagttcgtgtccggtttgtaggtacgagttaccttcggatgagactaagacggagactgaaagagcagaaccaaatggtgacggtggtagaagtgagtcttcttcctttgcaagcagtcaaggaagtgagaatagcgatggaagtcaccaccctgaggaggaggaggaagaagagagcgatgatgatggggttgaactctcaatcccgtggctgcttagcagcttgttctcgtcatcccaagacagcagcaatccatcgagtggtacacactga

SEQ ID NO: 5532 - protein, 302 aa, Brassica napus
MEEEAAVAYWCHMCSRTVDPLMEAQIKCPFCASGFVEEMAEEEEEEQEHSPNPLWAPILMQLVNDPSLRARNQSVDEDTQNNEAENDVDSQLQEILRRRRGRRPVSVMQLLDGDRERAGSLIVVSGGSLSEYFIGPGFEALLQRLTDNDPNRYGTPPAQKEAVEALATVNIQEGTLQCSVCLDDFEIGVEAKEMPCEHKFHRDCLLPWLELHSSCPVCRYELPSDETKTETERAEPNGDGGRSESSSFASSQGSENSDGSHHPEEEEEEESDDDGVELSIPWLLSSLFSSSQDSSNPSSGTH

SEQ ID NO: 5533 - DNA, 933 bp, Zea mays
  CDS (1)..(933)
atgacagaagctgcagttattacaaggtactggtgccatggatgcgagaaggtcatcgaggaggccatgggggaggagatcaagtgcccgttttgcggtggtggattcatcgaagagatggccggggaggattccgaggggttgcagttagagcgggagtggggaacgccgccaggggacagcgaggacgacgatgacgaccatatagcccatgagttcgagggctttatcaggaggcacggacgggcatcagctctgcgccgggtgctcgacagcatccaggacgaccttagagccgacagggaaagggacaactccgtcctcatcaacgccttcaaccaagccctcgcctcgcaaggctcggcgctgctggatgccgacgaggcccgagacggccgaggtggatccagcaacagcaacgacgatggcttgctggaagagtatgatgtcctgggggctgggctgagcctactgcttcagcatctggccgagaacgacccgaaccggtacggcacccctccggcgaagagagaggcggtcgaagctctgcccactgtccagatagcggaggccgtcagctgttcggtctgcctcgacgatcttgagctggggtccccggcgaagcaaatgccctgtgggcataggttccactcttcttgcatcctgccatggcttgagctccacagctcttgccccgtgtgccggttcgagctgccgtctgaagagacgaaagatctgaacgagcctagcgatgtgcacagaagaacagagagcgcccgagagaacgacagcgagagcggtaacagcgcgtggccccttgtaccttggttcttcagcgggctgttctcggtacctgaaccgcacactgacagaggcactctgaccaccgatcaacagagcccttccaccaacccaaatgctggaggaaattga

SEQ ID NO: 5534 - protein, 310 aa, Zea mays
MTEAAVITRYWCHGCEKVIEEAMGEEIKCPFCGGGFIEEMAGEDSEGLQLEREWGTPPGDSEDDDDDHIAHEFEGFIRRHGRASALRRVLDSIQDDLRADRERDNSVLINAFNQALASQGSALLDADEARDGRGGSSNSNDDGLLEEYDVLGAGLSLLLQHLAENDPNRYGTPPAKREAVEALPTVQIAEAVSCSVCLDDLELGSPAKQMPCGHRFHSSCILPWLELHSSCPVCRFELPSEETKDLNEPSDVHRRTESARENDSESGNSAWPLVPWFFSGLFSVPEPHTDRGTLTTDQQSPSTNPNAGGN

SEQ ID NO: 5535 - DNA, 951 bp, Brassica napus
  CDS (1)..(951)
atgtcttccggcggaaactcaactgcctccaccgcccccgcggtcgaaaagatgttcttttgctaccagtgcaacctttttattaacatctcaatctcaatctcctccgccgctgatcctttctgccctctttgctccggcggctttcttgaagaatacgacgaacccgtccctactctacccccgaatctcaatcccgaatccggtttcttccccatggccgatcctttctccaccttgctccctctcctcttcggctcctcctccgctcctccttcctccacaaacccgagcttcttcggaccccgctctacccagaaccagcctcaaggcggcgcctttgatccggtttccttcctccagaaccatctccagcatctccaatccagcggcacgcacgtgcagttcttgatcgaggatcatcctctggatccgtctaaccgagccccggggcatgtcggggactacttcttcggccctggtctcgagcagctgattcagcagctagcggagaatgatcccaaccgttacggaactcctccggcttcgaaatcggctatcgaggggctgccgactgttaaggtgacgaaggatatgctgaggtctgagatgaaccagtgcgctgtttgtatggatgagtttgaggacggtggggatgtaaagcagatgccttgcaagcacgtgtttcatcaggattgtttgatgccgtggctggagttgcataactcttgtccggtctgtcggtatgagttgcccacggatgatcctgagtatgagagtaggggtcagggtcaaggaggggaggctagtggggctgtggagacggggaggaggtttagtatacaggtgcctttgccgtttaggggacttgatggtgagggttctgggtcgggtgcacctggaagtggaggtggagctaatctcgagaccaggggggatgatttggattga

SEQ ID NO: 5536 - protein, 316 aa, Brassica napus
MSSGGNSTASTAPAVEKMFFCYQCNLFINISISISSAADPFCPLCSGGFLEEYDEPVPTLPPNLNPESGFFPMADPFSTLLPLLFGSSSAPPSSTNPSFFGPRSTQNQPQGGAFDPVSFLQNHLQHLQSSGTHVQFLIEDHPLDPSNRAPGHVGDYFFGPGLEQLIQQLAENDPNRYGTPPASKSAIEGLPTVKVTKDMLRSEMNQCAVCMDEFEDGGDVKQMPCKHVFHQDCLMPWLELHNSCPVCRYELPTDDPEYESRGQGQGGEASGAVETGRRFSIQVPLPFRGLDGEGSGSGAPGSGGGANLETRGDDLD

SEQ ID NO: 5537 - DNA, 1035 bp, Glycine max
  CDS (1)..(1035)
atggcagcaaggtattggtgtcacatgtgctctcaaatggtcaatcccatcatggatatggaaatcagatgcccgttttgccaaagtggatttgttgaagaaatgggtaacacccccagtagcagcagcattcccaatacatcagaatctgattttgaatctgatcgggctctctccctttgggcgcccatcttgctaggcatgatgggcaatccacgtcatcctagaagactcagacaaatagccaatgataatggtaatcgtgattatgttgatggtgtagcagatcatggtagagaaactgaatatgatcaagagtttgagtccatccttcggaggaggagaaactcagctaccattctacaattgctccaaggtataagaactggactggcatctgaatcatatgagaatactgatggccatgaccatgacagggaaagagaaagagaaagagaaagagagcacatgatcttgatcaatcctttaaatcagactattattgttcaaggttcctatgagtcaaaccgggatcaaagtgataatcatagctccgttgggtccctgggtgattatttcacagggccgggtttcgatatattgttgcaacatttggctgagaatgatcctaataggtatggaactccacctgctcagaaggaggccattgaagcgctgcctaccgtcataatcaatgagaattcgcagtgttctgtgtgtctggatgattttgaagttggttctgaagccaaagagatgccttgtaaacataggtttcatagtgggtgtatccttccctggctggagcttcatagttcttgtccagtttgcaggcttcagttgccattggatgagtctaagcaagactctgatctgtcaagggatagcagaagccaaagggaggatgaaagtattgaacatgacaatgatgaagaaagagatggcgaagggagaaatgcaagtgggggtagaagattctcattggcatggcctttcaatggattattttcttcatcaaactcttcatcctcttaa

SEQ ID NO: 5538 - protein, 344 aa, Glycine max
MAARYWCHMCSQMVNPIMDMEIRCPFCQSGFVEEMGNTPSSSSIPNTSESDFESDRALSLWAPILLGMMGNPRHPRRLRQIANDNGNRDYVDGVADHGRETEYDQEFESILRRRRNSATILQLLQGIRTGLASESYENTDGHDHDREREREREREHMILINPLNQTIIVQGSYESNRDQSDNHSSVGSLGDYFTGPGFDILLQHLAENDPNRYGTPPAQKEAIEALPTVIINENSQCSVCLDDFEVGSEAKEMPCKHRFHSGCILPWLELHSSCPVCRLQLPLDESKQDSDLSRDSRSQREDESIEHDNDEERDGEGRNASGGRRFSLAWPFNGLFSSSNSSSS

SEQ ID NO: 5539 - DNA, 1011 bp, Glycine max
  CDS (1)..(1011)
atgtcaagtggagcaacacactggtgttatgcatgcagacagccaattgtgcttgatgggagagatcctgtttgcccttactgtgatggaggatttgtgcaagaacttgacgagttgcgaggaattgcacccaaccataaccataccttttcgtcacagtcaggagactttcatcaaatgcctgacattttcgatgctatacatgcttttatggggcagagaggttctgaccagagatttgggcttatggacgccgttgataatttcatgaggcatagaatggccggaagaaactcaaactttgatgttagagggaggtctggttctctcccagttcctgaacagagttggggcgtttatagttccggtccttatttaatatttcacggtcaagttcctggattcaccttgtctgctggcagcccaagaggtggtcctaggcgtgttgattttggtgactactttatgggtcctggactggaagaacttattgagcaactcaccatgaatgatcagcgtggtccagccccagctgcacgatcttcaattgatgcaatgcctactattaagataacacaggcgcatcttcgctcggattcacactgtccagtttgtaaggaaaaatttgaattgggcactgaagccagagagatgccatgcaaccatatttaccattctgactgtattgttccttggttggttcagcataactcatgtcctgtttgccgtgttgagctgccacctcaaggacaggctagttcccgtggtactcgaagttggggaggaaggaatgccagcaacagcagcagcagtggcagcaatgatagctccaggggcagagagaacagccatcagaaccatggaaggagaaatccattttcatttttgtggccattccgctcgtctaactcgaacaataatcattattctgagactgggggaagcagctcttcaaccactcctgaccagaataatggaacaagttatagcggttggccctttgatcgctaa

SEQ ID NO: 5540 - protein, 336 aa, Glycine max
MSSGATHWCYACRQPIVLDGRDPVCPYCDGGFVQELDELRGIAPNHNHTFSSQSGDFHQMPDIFDAIHAFMGQRGSDQRFGLMDAVDNFMRHRMAGRNSNFDVRGRSGSLPVPEQSWGVYSSGPYLIFHGQVPGFTLSAGSPRGGPRRVDFGDYFMGPGLEELIEQLTMNDQRGPAPAARSSIDAMPTIKITQAHLRSDSHCPVCKEKFELGTEAREMPCNHIYHSDCIVPWLVQHNSCPVCRVELPPQGQASSRGTRSWGGRNASNSSSSGSNDSSRGRENSHQNHGRRNPFSFLWPFRSSNSNNNHYSETGGSSSSTTPDQNNGTSYSGWPFDR

SEQ ID NO: 5541 - DNA, 1002 bp, Zea mays
  CDS (1)..(1002)
atgacagaagctgcagttacaaggtactggtgccatggatgtgtgagggttgttgaggaggccatgggggaggagatcaagtgcccattttgtggtggtggattcattgaagagatgattggtgaggaatttgatgggttggccagccagcagtcagagcgggattcatcacaatggggagcgtcgaacaacccctttgagcagccaagggcggaggcggacagtgaggatgaagaagatgatgatgattacgatgatgatataggccgtgcatttgagagtttcatcaggaggcatgggcggccatcagctctccgtcgggcgtttgacagcatccaggacgaccttaaagctgatagggatagtgacttctccattctgatcaatgccttcaaccaaaccctcgctttgcaacgctcagtgcttgatgctgatgaggcccgagatgaccaaggtggatctagcaatgatgatggcttgatggaagaatatgtcctgggggctgggctaaccctgctgcttcaatatttgactgagaatgatccaagccagtatggcacccctcctgcaaacaaagaggcggttgacgctctgcccactgtccaaatagcagaggctgtcagctgttcagtctgccttgatgatcttgagctagggtcccaggcaaagcaaatgccttgtgagcataagttccactctccttgtatactgccatggcttgaactccatagctcctgccctgtgtgccggtttgagctgccatctgaagagacagaagatttggatgagcctagcaatgtggacagaacagagaacacccatgaggaagtcagggccgatggccctgaagatgacagtgagagcagtaacagagcgtgggcccttgttccttggttcagtgggctattctcaacacctgaaccacaaactgtcagaggcgctttcactgatcagcagactcgctccacttctggaaccaacatgaatgctggcgaaagctga

SEQ ID NO: 5542 - protein, 333 aa, Zea mays
MTEAAVTRYWCHGCVRVVEEAMGEEIKCPFCGGGFIEEMIGEEFDGLASQQSERDSSQWGASNNPFEQPRAEADSEDEEDDDDYDDDIGRAFESFIRRHGRPSALRRAFDSIQDDLKADRDSDFSILINAFNQTLALQRSVLDADEARDDQGGSSNDDGLMEEYVLGAGLTLLLQYLTENDPSQYGTPPANKEAVDALPTVQIAEAVSCSVCLDDLELGSQAKQMPCEHKFHSPCILPWLELHSSCPVCRFELPSEETEDLDEPSNVDRTENTHEEVRADGPEDDSESSNRAWALVPWFSGLFSTPEPQTVRGAFTDQQTRSTSGTNMNAGES

SEQ ID NO: 5543 - DNA, 1158 bp, Zea mays
  CDS (1)..(1158)
atgtcgactccagccgccgcctactacgccgccgccgcgcgcaagcaatacttttgctaccaatgcaaccgcaccgttctcatcgcggcctccgccgccgccgccggggagctctcgtgccccgagtgccacggcgacttcctcgaggaggtcaccgtccctgcccccaccttcatcccgctgcccttcccgttcccctttgcccccaccacgatccccgccgccagcaccaccccggcccccgccccagcagccggctccggtgggtccccttccttatcgtcctcgtcctcttccgccgcgacctccccttcccagcccaacgacatctcctccatcctcaactccttcctgggactaggcgaacaacccatcagggtcggcggctctgcctcgcgcgccgccgccggcacggccacccccgagaacgagcccgagcccttcgacccggtcatgttcttccagaattacatccatagcctcgttgagggaggcgccaacatccaggtcctcctcgacgacgccagcgtcaccctcggctccggacccggcctcgggcgtatcggcggggcaagctttggggattacttcgtcggcccaggcctcgaacaactcatcgagcagctcgccgagaacgaccccaaccgctatggcacgccgccggctgccaaatcggccctctcctcgctccccgacgtcctcgtgactcatgccatggtcgcagctgcggagggcgctgagtgcgccgtctgcaaggaggatttctcgcctggagaggtggccaagcagatgccctgcaagcacatctaccacactgactgcattgtgccgtggcttgagcttcacaactcgtgccccatctgccgatttgagctgcctactgacgatcctgattacgaggggcggaagggcactaatcctcagccggctgttggtgtggctgctgctgcatctgggagctctactgctgctgagggacagatggaggagaggcaggagaatccaagggtggttgagaggaggttcaatgtgtcgctgccgtggccattcagtggactgggagggcaaacatcgcagcagaatgggaacagtggaggcagtggtagcaactcacaaggaaatgcacaggatggtgacccacccagcaacaagaattga

SEQ ID NO: 5544 - protein, 385 aa, Zea mays
MSTPAAAYYAAAARKQYFCYQCNRTVLIAASAAAAGELSCPECHGDFLEEVTVPAPTFIPLPFPFPFAPTTIPAASTTPAPAPAAGSGGSPSLSSSSSSAATSPSQPNDISSILNSFLGLGEQPIRVGGSASRAAAGTATPENEPEPFDPVMFFQNYIHSLVEGGANIQVLLDDASVTLGSGPGLGRIGGASFGDYFVGPGLEQLIEQLAENDPNRYGTPPAAKSALSSLPDVLVTHAMVAAAEGAECAVCKEDFSPGEVAKQMPCKHIYHTDCIVPWLELHNSCPICRFELPTDDPDYEGRKGTNPQPAVGVAAAASGSSTAAEGQMEERQENPRVVERRFNVSLPWPFSGLGGQTSQQNGNSGGSGSNSQGNAQDGDPPSNKN

SEQ ID NO: 5545 - DNA, 936 bp, Zea mays
  CDS (1)..(936)
atgacagaagctgcagttattacaaggtactggtgccatggatgcgagaaggtcatcgaggaggccatgggggaggagatcaagtgcccgttttgcggtggtggattcatcgaagagatggccggggaggattccgaggggttgcagttagagcgggagtggggaacgccgccaggggacagcgaggacgacgatgacgaccatatagcccatgagttcgagggctttatcaggaggcacggacgggcatcagctctgcgccgggtgctcgacagcatccaggacgaccttagagccgacagggaaagggacaactccgtcctcatcaacgccttcaaccaagccctcgcctcgcaaggctcggcgctgctggatgccgacgaggcccgagacggccgaggtggatccagcaacagcaacgacgatggcttgctggaagagtatgatgtcctgggggctgggctgagcctactgcttcagcatctggccgagaacgacccgaaccggtacggcacccctccggcgaagagagaggcggtcgaagctctgcccactgtccagatagcggaggccgtcagctgttcggtctgcctcgacgatcttgagctggggtccccggcgaagcaaatgccctgtgggcataggttccactcttcttgcatcctgccatggcttgagctccacagctcttgccccgtgtgccggttcgagctgccgtctgaagagacgaaagatctgaacgagcctagcgatgtgcacagaagaacagagagcacccgagagaacgacagcgagagcggtaacagcgcgtggccccttgtaccttggttcttcagcgggctgttctcggtacctgaaccgtcgcacactgacagaggcactctcaccaccgatcaacagagcccttccaccaacccaaatgctggaggaaattga

SEQ ID NO: 5546 - protein, 311 aa, Zea mays
MTEAAVITRYWCHGCEKVIEEAMGEEIKCPFCGGGFIEEMAGEDSEGLQLEREWGTPPGDSEDDDDDHIAHEFEGFIRRHGRASALRRVLDSIQDDLRADRERDNSVLINAFNQALASQGSALLDADEARDGRGGSSNSNDDGLLEEYDVLGAGLSLLLQHLAENDPNRYGTPPAKREAVEALPTVQIAEAVSCSVCLDDLELGSPAKQMPCGHRFHSSCILPWLELHSSCPVCRFELPSEETKDLNEPSDVHRRTESTRENDSESGNSAWPLVPWFFSGLFSVPEPSHTDRGTLTTDQQSPSTNPNAGGN

SEQ ID NO: 5547 - DNA, 1116 bp, Zea mays
  CDS (1)..(1116)
atggatgaaggtcagggagttaggtattggtgccacatgtgtcaggaggtgatagatcctatgcccgagatgaagtgcccaggctgcgagggcgggtttgtggaggagatggactccgaagacttcgagccagctgcgaacgcgaggtctgatcgctccgtctctctcttggctccactgctgcttggtatgatggggggttcgtcgcgcagatcaagactcaggagggaggccatggttgaagctgatgccgaccaggatgacgaagaggatgattcagaccatgagcttgaactttccaggaggaggcggaggaggaggcgctcatcagcgcttttcagtgtgcttgaggctatgcgtgaccgtgatgaagtaaggggctcggatgacaccgacagtgatacagagagagacctggagagagggagaagggagaggatggagaggcagagggagaggttaaggcagatcgagagggtgagtgctcgtggcagagagaggacggaaagcttaatactgatcaactccaacaacgaggctattattctgcagggaacattcggatctgatgacaaccaagaggactcaagcaacacaagttctggtgtatcacttggggattactttcttggtcctgccttagacactctcttgcagcgtttggcggagagtgacctcagtcgttctggcacaccgcctgccaagaaggaagcagtcgccgcgctaccaaccgtgaacatcgaggaagcgttgggctgttcagtctgtcttgaggatttcgagatgggaggagaagcgaagcagatgccctgtcagcataagttccactcgcactgcatactcccgtggctggagctccacagctcttgcccaatctgccggtttcagttgcctactgaggagacgaagaacaacccatgcgaatcagccagcaccgcagggaccgtgaacggcggtggagacaacgctgctgcaagcggcagcgatacagaaagtactaaccacaatgaagatgaccattccgatagccctatcttctctgctctgagcacactcttctctgatccgttctcatccgacgatgatgaaagtgttccacactcttacgagaactga

SEQ ID NO: 5548 - protein, 371 aa, Zea mays
MDEGQGVRYWCHMCQEVIDPMPEMKCPGCEGGFVEEMDSEDFEPAANARSDRSVSLLAPLLLGMMGGSSRRSRLRREAMVEADADQDDEEDDSDHELELSRRRRRRRRSSALFSVLEAMRDRDEVRGSDDTDSDTERDLERGRRERMERQRERLRQIERVSARGRERTESLILINSNNEAIILQGTFGSDDNQEDSSNTSSGVSLGDYFLGPALDTLLQRLAESDLSRSGTPPAKKEAVAALPTVNIEEALGCSVCLEDFEMGGEAKQMPCQHKFHSHCILPWLELHSSCPICRFQLPTEETKNNPCESASTAGTVNGGGDNAAASGSDTESTNHNEDDHSDSPIFSALSTLFSDPFSSDDDESVPHSYEN

SEQ ID NO: 5549 - DNA, 936 bp, Zea mays
  CDS (1)..(936)
atgacagaagctgcagttaatacaaggtactggtgccatggatgcgagaaggtcatcgaggaggccatggtgggggaggatatcaagtgcccgttttgcggtggtgggttcatcgaagagatggccggggaggattccgaggggttgcagttagagcgggagtggggaacgccgccaggggacagcgaggacgacgatgacgacgatatagcccatgagttcgagggctttatcaggaggcacggacgggcatcggctctgcgccgggtgctcgacagcatccaggacgaccttagagccgacagggaaagggacaactccgtcctcatcaacgccttcaaccaagccctcgcctcgcaaggctcggcgctgctggatgccgacgaggcccgagacggccgaggtggatccagcaacagcaacgacgatggcttgctggaagagtatgatgtcctgggggctgggctgagcctactgcttcagcatctggccgagaacgacccgaaccggtacggcacccctccggcgaagagagaggcggtcgaagctctgcccactgtccagatagcggaggccgtcagctgttcggtctgcctcgacgatcttgagctggggtccccggcgaagcaaatgccctgtgggcataggttccactcttcttgcatcctgccatggcttgagctcctcagctcttgccccgtgtgccggttcgagctgccgtctgaagagacgaaagatctgaacgagcctagcgatgtgcacagaagaacagagagcgcccgagagaacgacagcgagagcggtaacagcgcgtggccccttgtaccttggttcttcagcgggctgttctcggtacctgaaccgcacactgacagaggcactctgaccaccgatcaacagagcccttccaccaacccaaatgctggaggaaattga

SEQ ID NO: 5550 - protein, 311 aa, Zea mays
MTEAAVNTRYWCHGCEKVIEEAMVGEDIKCPFCGGGFIEEMAGEDSEGLQLEREWGTPPGDSEDDDDDDIAHEFEGFIRRHGRASALRRVLDSIQDDLRADRERDNSVLINAFNQALASQGSALLDADEARDGRGGSSNSNDDGLLEEYDVLGAGLSLLLQHLAENDPNRYGTPPAKREAVEALPTVQIAEAVSCSVCLDDLELGSPAKQMPCGHRFHSSCILPWLELLSSCPVCRFELPSEETKDLNEPSDVHRRTESARENDSESGNSAWPLVPWFFSGLFSVPEPHTDRGTLTTDQQSPSTNPNAGGN

SEQ ID NO: 5551 - DNA, 20 bp, Artificial sequence
  primer
atgtccgatgctccgtcgtc

SEQ ID NO: 5552 - DNA, 20 bp, Artificial sequence
  primer
tcagtaacgagaagttgaag

SEQ ID NO: 5553 - protein, 312 aa, Artificial sequence
  consensus sequence
  Variant (2)..(3): Xaa in position 2 to 3 is any amino acid
  Variant (5)..(15): Xaa in position 5 to 15 is any amino acid
  Variant (16)..(23): Xaa in position 16 to 23 is any or no amino acid
  Variant (25)..(26): Xaa in position 25 to 26 is any amino acid
  Variant (28)..(29): Xaa in position 28 to 29 is any amino acid
  Variant (32)..(32): Xaa in position 32 is any amino acid
  Variant (34)..(110): Xaa in position 34 to 110 is any amino acid
  Variant (111)..(214): Xaa in position 111 to 214 is any or no amino acid
  Variant (216)..(218): Xaa in position 216 to 218 is any amino acid
  Variant (220)..(222): Xaa in position 220 to 222 is any amino acid
  Variant (224)..(224): Xaa in position 224 is any amino acid
  Variant (226)..(226): Xaa in position 226 is any amino acid
  Variant (228)..(229): Xaa in position 228 to 229 is any amino acid
  Variant (230)..(236): Xaa in position 230 to 236 is any or no amino acid
  Variant (238)..(238): Xaa in position 238 is any amino acid
  Variant (242)..(242): Xaa in position 242 is any amino acid
  Variant (244)..(244): Xaa in position 244 is any amino acid
  Variant (246)..(248): Xaa in position 246 to 248 is any amino acid
  Variant (251)..(251): Xaa in position 251 is any amino acid
  Variant (253)..(259): Xaa in position 253 to 259 is any amino acid
  Variant (260)..(266): Xaa in position 260 to 266 is any or no amino acid
  Variant (268)..(268): Xaa in position 268 is any amino acid
  Variant (271)..(276): Xaa in position 271 to 276 is any amino acid
  Variant (278)..(283): Xaa in position 278 to 283 is any amino acid
  Variant (286)..(286): Xaa in position 286 is any amino acid
  Variant (288)..(289): Xaa in position 288 to 289 is any amino acid
  Variant (291)..(292): Xaa in position 291 to 292 is any amino acid
  Variant (294)..(295): Xaa in position 294 to 295 is any amino acid
  Variant (299)..(302): Xaa in position 299 to 302 is any amino acid
  Variant (306)..(306): Xaa in position 306 is any amino acid
  Variant (309)..(310): Xaa in position 309 to 310 is any amino acid
CXXCXXXXXXXXXXXXXXXXXXXCXXCXXGFXEXXXXXXXXXXXXXXXXXXXXXXXXXXXXXXXXXXXXXXXXXXXXXXXXXXXXXXXXXXXXXXXXXXXXXXXXXXXXXXXXXXXXXXXXXXXXXXXXXXXXXXXXXXXXXXXXXXXXXXXXXXXXXXXXXXXXXXXXXXXXXXXXXXXXXXXXXXXXXXXXXXXXXXXXXXXXXXXXXXXXXGXXXLXXXLXEXDXXXXXXXXXGXPPAXKXAXXXLPXVXXXXXXXXXXXXXXCXVCXXXXXXGXXXXXXPCXHXXHXXCXXPWLXXXXSCPXCRXXLP

SEQ ID NO: 5554 - protein, 31 aa, Artificial sequence
  protein pattern
  Variant (2)..(18): Xaa in position 2 to 18 is any amino acid
  Variant (19)..(20): Xaa in position 19 to 20 is any or no amino acid
  Variant (22)..(22): Xaa in position 22 is any amino acid
  Variant (23)..(23): Xaa in position 23 is any or no amino acid
  Variant (25)..(26): Xaa in position 25 to 26 is any amino acid
  Variant (27)..(27): Xaa in position 27 is Asp or Gly
  Variant (29)..(29): Xaa in position 29 is Ile, Leu or Val
  Variant (31)..(31): Xaa in position 31 is Glu, Ser or Thr
YXXXXXXXXXXXXXXXXXXXCXXCXXXFXEX

SEQ ID NO: 5555 - protein, 40 aa, Artificial sequence
  protein pattern
  Variant (2)..(11): Xaa in position 2 to 11 is any amino acid
  Variant (12)..(12): Xaa in position 12 is any or no amino acid
  Variant (14)..(14): Xaa in position 14 is any or no amino acid
  Variant (16)..(16): Xaa in position 16 is Ala, Ser, Thr or Val
  Variant (17)..(17): Xaa in position 17 is Asp or Glu
  Variant (18)..(18): Xaa in position 18 is Gly, Asn or Ser
  Variant (20)..(23): Xaa in position 20 to 23 is any amino acid
  Variant (24)..(24): Xaa in position 24 is any or no amino acid
  Variant (26)..(27): Xaa in position 26 to 27 is any amino acid
  Variant (28)..(28): Xaa in position 28 is Gly or Pro
  Variant (30)..(31): Xaa in position 30 to 31 is any amino acid
  Variant (32)..(32): Xaa in position 32 is Ala, Glu or Ser
  Variant (34)..(34): Xaa in position 34 is any amino acid
  Variant (35)..(35): Xaa in position 35 is Ala, Asp, Glu or Ser
  Variant (36)..(36): Xaa in position 36 is Ala, Gly, Ser or Thr
  Variant (37)..(37): Xaa in position 37 is Ile or Leu
  Variant (38)..(39): Xaa in position 38 to 39 is any amino acid
  Variant (40)..(40): Xaa in position 40 is Leu or Val
YXXXXXXXXXXXQXLXXXDXXXXXGXXXAXXXAXXXXXXX

SEQ ID NO: 5556 - protein, 52 aa, Artificial sequence
  protein pattern
  Variant (2)..(2): Xaa in position 2 is Ala or Ser
  Variant (3)..(3): Xaa in position 3 is Ile or Val
  Variant (5)..(5): Xaa in position 5 is any amino acid
  Variant (6)..(6): Xaa in position 6 is any or no amino acid
  Variant (8)..(14): Xaa in position 8 to 14 is any amino acid
  Variant (15)..(15): Xaa in position 15 is any or no amino acid
  Variant (17)..(17): Xaa in position 17 is any amino acid
  Variant (18)..(18): Xaa in position 18 is any or no amino acid
  Variant (21)..(21): Xaa in position 21 is any amino acid
  Variant (23)..(23): Xaa in position 23 is any amino acid
  Variant (24)..(24): Xaa in position 24 is Phe or Tyr
  Variant (26)..(27): Xaa in position 26 to 27 is any amino acid
  Variant (29)..(29): Xaa in position 29 is Ile or Leu
  Variant (30)..(30): Xaa in position 30 is Leu, Met or Val
  Variant (34)..(34): Xaa in position 34 is Asp, Glu, Gly, Asn or Ser
  Variant (35)..(36): Xaa in position 35 to 36 is any amino acid
  Variant (37)..(37): Xaa in position 37 is Asn or Ser
  Variant (38)..(38): Xaa in position 38 is Ser or Thr
  Variant (41)..(41): Xaa in position 41 is Ile or Val
  Variant (44)..(45): Xaa in position 44 to 45 is any amino acid
  Variant (47)..(48): Xaa in position 47 to 48 is any amino acid
  Variant (49)..(49): Xaa in position 49 is Asp, Glu, Gly or Ser
  Variant (50)..(50): Xaa in position 50 is Ala, Asp, Glu or Gly
  Variant (51)..(51): Xaa in position 51 is any amino acid
  Variant (52)..(52): Xaa in position 52 is Asp, Glu or Lys
CXXCXXDXXXXXXXXKXXPCXHXXHXXCXXPWLXXXXXCPXCRXXLXXXXXX

SEQ ID NO: 5557 - DNA, 1269 bp, Azotobacter vinelandii
  CDS (1)..(1269): transl_table=11
atgtctgatctcaagaccgccgccctcgaatatcacgctcagccgcgtcccgggaagctgagcgtggaactgaccaaacccacgcaaaccgcccgcgacctgtcgctggcctacagccccggcgtcgccgagccggtacgggaaatcgcccgcgatcccgaactggcctaccgctataccggcaagtcgaacctggtcgccgtcatttccgacggtaccgcgatcctcggcctcggcaacctcggcccgctggcctccaagccggtcatggagggcaagggggtgctgttcaagcgcttcgccggcgtcgacgtgttcgacatcgaggtggatgccgagagcccgcaagccttcatcgacaccgtcaagcgcatttccgtgaccttcggcggcatcaatctggaggacatcaaggcgccggagtgcttcgagatcgagcgcgccctgatcgagcaatgcaatatcccggtgtttcatgacgatcagcacggtaccgccatcgtcaccgccgccggtatgctcaatgccctggagatcgccggcaagagcttgccgaccgccaggatcgcctgccttggcgccggcgccgcggccatctcctgcatgcgcctgctggtcagcctgggcgccagggtcgagaacatccacatgatcgaccgccagggagtcatccatgccggacgcgacgacctgaaccagtacaaggcggtgttcgcccacgagaccgacaagcgcaccctggccgatgccctcgacggtgccgacgtattcgtcggcctgtccggagccaacctgctgagtgcggagaacctgctgcgcatggcgccgaacccgatcgtcttcgcctgctccaacccggacccggagatcagcccggaactggcccatgccacccgcggcgacgtgatcatggccaccggtcgttccgactatccgaaccaggtcaacaacgtgctgggcttccccttcatcttccgtggcgccctggatgtacgtgcgacccgcatcaacgaagagatgaagatcgccgcggctcatgccctgcgcgaactggccaagctgccggtgccgaaggcggtctgcgaggcctacggggtgtcgggcctggagttcggtcgcgagtacatcattccgaagcccatggacccgcggctgatcaccgtggtatccgacgccgtggcccgtgccgccatcgagagtggcgtggcctccctgccgtatccgcgacactacccgctgcagtcggtggaagaggtgttcaacagctga

SEQ ID NO: 5558 - protein, 422 aa, Azotobacter vinelandii
MSDLKTAALEYHAQPRPGKLSVELTKPTQTARDLSLAYSPGVAEPVREIARDPELAYRYTGKSNLVAVISDGTAILGLGNLGPLASKPVMEGKGVLFKRFAGVDVFDIEVDAESPQAFIDTVKRISVTFGGINLEDIKAPECFEIERALIEQCNIPVFHDDQHGTAIVTAAGMLNALEIAGKSLPTARIACLGAGAAAISCMRLLVSLGARVENIHMIDRQGVIHAGRDDLNQYKAVFAHETDKRTLADALDGADVFVGLSGANLLSAENLLRMAPNPIVFACSNPDPEISPELAHATRGDVIMATGRSDYPNQVNNVLGFPFIFRGALDVRATRINEEMKIAAAHALRELAKLPVPKAVCEAYGVSGLEFGREYIIPKPMDPRLITVVSDAVARAAIESGVASLPYPRHYPLQSVEEVFNS

SEQ ID NO: 5559 - DNA, 2280 bp, Klebsiella pneumoniae subsp. pneumoniae MGH 78578
  CDS (1)..(2280): transl_table=11
atggatgagcagttaaaacagagcgccctcgacttccacgaatttccggttcccggaaaaatccaggtctcgccgaccaaacctctcgccacccagcgcgatctggcgctggcctactcgccgggcgtcgcagccccctgcctggaaatcgaaaaagatccgctggccgcctacaaatacactgcccgtggcaacctggtggcggtcgtctccaacggcaccgcggtgctggggctcggcaacatcggcgcgctggccggtaagccggtaatggagggcaaaggcgtcctgtttaagaaatttgccggtatcgatgtgtttgatatcgaagtcgatgagctggatccggacaaattcattaacgtcgtcgccgccctcgaaccaaccttcggcggtatcaacctggaagatattaaagcgccggagtgtttctacatcgagcagcagctgcgcgagcggatgaatatcccggtcttccatgacgatcagcacggcacggcgatcatcagcaccgcggcgatcctcaacggtctgcgcgtcgtcgagaagaatctgtccgacgtgcggatggtggtctccggcgcgggcgcggcggcgatcgcctgtatgaatctgctggtggcgctggggatgcaaaagcacaacatcgtggtctgcgattcgaaaggcgttatctataaagaccgtgagccgaacatggcggaaaccaaagccgcctatgcggtggaagacgacggcaaacgcaccctcgatgacgtgatcgacggcgccgacattttcctcggctgctccggtccaaaagtgctgactcaggagatggtgaagaagatggcgcgggcgccgctgatcctcgccctggccaacccggagccggaaattctgccgccgctggcgaagcaggtccgcgatgacgccatcatctgtaccggccgctccgactaccctaaccaggtcaacaacgtactttgcttcccgttcatcttccgcggcgcgctggacgtcggcgcgacggcgatcaacgaagagatgaagctggcggcggtgcatgcaattgccgagctggcccatgccgagcagagcgaagtggtggcctccgcctacggcgatcaggatttaagctttggtccggagtacatcattccgaagccattcgacccgcggctgatcgtcaagatcgcccccgcggtggcgaaggcggcgatggattccggggtggcaacgcgcccgatcgctgattttgacgcctatatcgagaagctgagcgagttcgtctataaaaccaacctgtttatgaagcctatcttctctcaggcgcgcaaagagccgaagcgcgtggtgctggcggaaggggaggagacccgggtgctgcacgccactcaggagctggtgtcgctggggctggccaaaccgattctggtggggcgcccgagcgtgattgaaatgcgcatccagaagctgggcctgcagatcaaggccggcgttgactttgagatcgtcaataatgaatccgacccgcggtttaaagagtactggagcgagtactaccagctgatgaagcgccgcggcattacccaggagcaggcgcagcgggcggtgattagcaacaccacggtgattggcgccatcatggtgcatcgcggtgaagcggatgcgatgatctgcgggactattggcgagtaccacgatcactaccgcgtggtgcagccgctgtttggctatcgagacggcgtcagcaccgccggggcgatgaatgcgctgctgctgccgagcggcaacacctttatcgccgatacctatgtcaatcacgatccgtcgccggaagagctggcggagatcaccctgatggcggcggaaagcgtgcgacgctttggtattgaaccgcgcgtggcgttgctgtcgcactccaactttggctctgccgactgtccgtcagccagcaaaatgcgtaaaaccctggagctggtgaaggcccgcgccccggagctgatgatcgatggcgaaatgcatggcgacgccgcgctggtggaaagcatccgcaacgatcgcatgccggacagcccgctgaagggggcggccaatattctggtgatgccgaatatggaagccgcccggatcagctataacctgctgcgcgtctccagttcggaaggggtgaccgtcgggccggtgctgatgggggtggcgaagccggtgcatatcctgacgccgatcgcctccgtacgtcgcatcgtcaatatggtggcgctggcggttgtcgaagcgcaaaccgaaccgctgtaa

SEQ ID NO: 5560 - protein, 759 aa, Klebsiella pneumoniae subsp. pneumoniae MGH 78578
MDEQLKQSALDFHEFPVPGKIQVSPTKPLATQRDLALAYSPGVAAPCLEIEKDPLAAYKYTARGNLVAVVSNGTAVLGLGNIGALAGKPVMEGKGVLFKKFAGIDVFDIEVDELDPDKFINVVAALEPTFGGINLEDIKAPECFYIEQQLRERMNIPVFHDDQHGTAIISTAAILNGLRVVEKNLSDVRMVVSGAGAAAIACMNLLVALGMQKHNIVVCDSKGVIYKDREPNMAETKAAYAVEDDGKRTLDDVIDGADIFLGCSGPKVLTQEMVKKMARAPLILALANPEPEILPPLAKQVRDDAIICTGRSDYPNQVNNVLCFPFIFRGALDVGATAINEEMKLAAVHAIAELAHAEQSEVVASAYGDQDLSFGPEYIIPKPFDPRLIVKIAPAVAKAAMDSGVATRPIADFDAYIEKLSEFVYKTNLFMKPIFSQARKEPKRVVLAEGEETRVLHATQELVSLGLAKPILVGRPSVIEMRIQKLGLQIKAGVDFEIVNNESDPRFKEYWSEYYQLMKRRGITQEQAQRAVISNTTVIGAIMVHRGEADAMICGTIGEYHDHYRVVQPLFGYRDGVSTAGAMNALLLPSGNTFIADTYVNHDPSPEELAEITLMAAESVRRFGIEPRVALLSHSNFGSADCPSASKMRKTLELVKARAPELMIDGEMHGDAALVESIRNDRMPDSPLKGAANILVMPNMEAARISYNLLRVSSSEGVTVGPVLMGVAKPVHILTPIASVRRIVNMVALAVVEAQTEPL

SEQ ID NO: 5561 - DNA, 2283 bp, Xanthobacter autotrophicus Py2
  CDS (1)..(2283): transl_table=11
atggcgtccaacatttccgaggatctgcgttccggggcgctcgtctatcatcgcctgccgaagcccgggaaactggagatccaggccaccaagcccctcggcaaccagcgcgacctcgcgctcgcctattcccccggcgtcgccgccgcctgtgaagccatcgccgccgatccgctgctggcggcggaactgaccatccgcgccaatctcgtcgccgtcgtctccaacggaaccgccgtgctcggcctcggcgacatcggcccgctcgccggcaagccggtgatggagggcaaggccgtcctgttcaagaagttctccggcatcgacgtgttcgacatcgaaatcgacgccaagaccgtcgagcgcatggtcgacgtggtcagcgcgctggagcccaccttcggtggcatcaacctggaagacatcaaggctcccgagtgcttcgaggtggaagcccagctgcgcgagcgcatgaagatcccggtcttccatgacgaccagcacggcaccgccatcatcgtcggcgcggcggtgcgcaacgccatggaggtgggcaagcgcaagatcgaggagctgaagatcgtcgcctcgggcgccggcgcggcggccctcgcctccctcaacctgctgctcacgctgggtgccaagaaggagaacatctgggtctgcgacatcgagggcgtggtctatgacggccgcaacaccctgatggatccctacaaggagaagttcgcccagaagaccgacaagcggaccctggacgaggtgatcgagggcgcccacatcttcctcggcctctccgccggcggcgtgctgaagccggagatggtgaagaagatggcggaccacccgctcatcctcgccctcgccaatccggtgccggagatcatgcccgaggtcgcccgcgaggcgcgccccgatgccatgatctgcaccggccgctcggacttccccaaccaggtcaacaatgtcctgtgcttcccctacatcttccgcggggcgctggacgtgggggcgaccgacatcaaccccgagatgaagatggcggcggtggaggccattgcggcgctggcccgcgagaccccctccgacgtggtggcccgcgcctatggcggcgagacccgcgccttcggcgccgattcgctcattccctcgccgttcgacccgcgcctcatcctgcgcatcgcgccggcggtggcgaaggcggccatggacaccggcatcgccacccggcccatcgctgacatggacgcctatatcgagcggctggaccatttcgtgttccgctccggcttcatcatgcggccgctgtttgcccaggcgaagcgcaacatcaagcgcgtggtctatgccgaaggcgaggacgagcgggtgctgcgcgcggtgcaggcggtggtggaggagggcatcgcccgtcccatcatcgtcgcccgtcccaatgtgctggagacccgcctgaagcgcttcggcctttcggtgcggccgggccatgacttcgatctcatcaacccggaagacgatccgcgttatcgtgactatgtgcgcgactatgtggagatcgccggccgccgcggcgtgacgccggacgctgcccgcaccctggtgcgcacccatcccaccgtgatcgcggcgctggccgtgaagcgcggcgaggcggatgccatgctgtgcggcatcgagggccgcttcacccgccacctgcggcaggtgcgcgacatcatcggcctcgcgccgggggtgaaggagctggcggcgctgtcgctgctcatcacctcccacggcaacttcttcatctgcgacacccagatccagaccgagcccaccgccgccgacctcgccgagatgaccgtgctggccgccgcccatgtccgtcgcttcggcctggagccgcgggtggcgctgctgtcgcactccaatttcggcagccacgagacgctgtcggccaaaagggtgcgctcggcgctctccatcatccgcgagcgtgagccgaacctggaggtggatggcgagatgcaggcggattccgccctgctggaggacatccgcaagcgggtgctgcccaactcgaccctcaccggcgcggccaacgtactggtgatgcccgacctcgacgccgccgacatcgccttcaacatgctgaaggtgctgggcgacgcgctgccggtgggtccgatcctgatgggcacggccaagcccgcccacatcctcggcccgtcggtcaccgcccgtggcatcgtcaacatgaccgccgtcgcggtggccgaggcccagaccgaggcctga

SEQ ID NO: 5562 - protein, 760 aa, Xanthobacter autotrophicus Py2
MASNISEDLRSGALVYHRLPKPGKLEIQATKPLGNQRDLALAYSPGVAAACEAIAADPLLAAELTIRANLVAVVSNGTAVLGLGDIGPLAGKPVMEGKAVLFKKFSGIDVFDIEIDAKTVERMVDVVSALEPTFGGINLEDIKAPECFEVEAQLRERMKIPVFHDDQHGTAIIVGAAVRNAMEVGKRKIEELKIVASGAGAAALASLNLLLTLGAKKENIWVCDIEGVVYDGRNTLMDPYKEKFAQKTDKRTLDEVIEGAHIFLGLSAGGVLKPEMVKKMADHPLILALANPVPEIMPEVAREARPDAMICTGRSDFPNQVNNVLCFPYIFRGALDVGATDINPEMKMAAVEAIAALARETPSDVVARAYGGETRAFGADSLIPSPFDPRLILRIAPAVAKAAMDTGIATRPIADMDAYIERLDHFVFRSGFIMRPLFAQAKRNIKRVVYAEGEDERVLRAVQAVVEEGIARPIIVARPNVLETRLKRFGLSVRPGHDFDLINPEDDPRYRDYVRDYVEIAGRRGVTPDAARTLVRTHPTVIAALAVKRGEADAMLCGIEGRFTRHLRQVRDIIGLAPGVKELAALSLLITSHGNFFICDTQIQTEPTAADLAEMTVLAAAHVRRFGLEPRVALLSHSNFGSHETLSAKRVRSALSIIREREPNLEVDGEMQADSALLEDIRKRVLPNSTLTGAANVLVMPDLDAADIAFNMLKVLGDALPVGPILMGTAKPAHILGPSVTARGIVNMTAVAVAEAQTEA

SEQ ID NO: 5563 - DNA, 1839 bp, Bombyx mori
  CDS (1)..(1839)
atgagtccagcgccccccgctcactgtaacaaaactggcgttccgttctcggcagtcaagcagtcgcaagcgacaagcggacggaagtgtacgtatagcgaaatggaacgtgatcgtatcggattatggggctccggggacggacagcccaccagcggcctctccggcctcgaccacctcaagcaccccggcctcaacaagggcatggcttttaccatcgaagagcgtcagctcttgggcatacacgggttgttaccaccacgagtcaagacgcaagaggagcaggttgaactatgcaagctctcgatcgacagatacgaaaatccacttaacaagtacatctatcttatggggctcttggaccgcaatgagcatctgttctaccgtttcgtcgcggataacgtggctgaaatgatgccaattgtgtacactccgacggttggcctggcctgtcagaagttcggccttgtgtaccgccgaccaaggggcctcttcatcacgatccacgataagggacatgtatacgatgttcttaagaactggccggagacggacgtccgcgccattgttgtaaccgacggagaacgtattctgggtctgggcgacttgggcgcatgcgggatgggcatccctgtgggcaaactcgcgctctacaccgcgctcggaggcatcaagccgcatcagtgtctgcccatcactatcgacgtgggtacgaacacccagtcgatgctggacgacccgctgtacatcgggctccggcagcggcgcgtgcgcggccccgactacgacgagctgctcgacgagttcatgcgcgccgtcgtgcgccgctacgggcagaactgtctcgtgcagttcgaggacttcgggaacgctaacgcttttaggctcctcgagaagtacaggaacaagtactgcactttcaacgacgacatccaggggacggcggccgtggcggtggccggactactcgccagtctcagactcacacagaagaggctgtccgacaacgtcatcgtcttccagggagccggagaggccgctttgggtatcgcggagctgtgcgttatggccatgaagggcgagggcacgccggagcaggaggcgaggtgccgcatctggatggtggactcgaagggcctcatcgtcaagaacagaccggagggagggcttaacgttcacaaggagaggttcgctcaggaccacgcgcccgtcaggaccttggcagaagttgtggaagtggccagaccatcagtgcttattggagcggccgccatcggtggtgctttcactcctgagatattgaggaagatggcaaacttcaacgagaagccagtcatcttcgctctctcgaaccccaccagcaaggcggagtgtaccgctgaagaagcctacagtaacaccgacgaccgtgctatattcgcgtcggggtcaccgttcccggagtaccgcagtaagtcgggcgcgttgttccgcccgggacaaggcaacaactcgtacatcttcccgggactcgcgctcggcatcatctgcgccgggatactggacatctcggacgacttcatgctactcgccgccgaggctttagcggaaattgtgtcggatgatgatctcgcatacggaagcttgtacccgcctctgcacatgataaaggattgttccgttaagatcgcgaagaagattgtcgaacacgcctacaatacaggcaaggcgtcggtgcagccgcagccgctcgacacggaggagttcatccgcgcgcagatgtacagcgtggagtacggcgccgcgctgccgcccgcctacccgtggccggacaaccagccgcgggtcgcgatcatctaa

SEQ ID NO: 5564 - protein, 612 aa, Bombyx mori
MSPAPPAHCNKTGVPFSAVKQSQATSGRKCTYSEMERDRIGLWGSGDGQPTSGLSGLDHLKHPGLNKGMAFTIEERQLLGIHGLLPPRVKTQEEQVELCKLSIDRYENPLNKYIYLMGLLDRNEHLFYRFVADNVAEMMPIVYTPTVGLACQKFGLVYRRPRGLFITIHDKGHVYDVLKNWPETDVRAIVVTDGERILGLGDLGACGMGIPVGKLALYTALGGIKPHQCLPITIDVGTNTQSMLDDPLYIGLRQRRVRGPDYDELLDEFMRAVVRRYGQNCLVQFEDFGNANAFRLLEKYRNKYCTFNDDIQGTAAVAVAGLLASLRLTQKRLSDNVIVFQGAGEAALGIAELCVMAMKGEGTPEQEARCRIWMVDSKGLIVKNRPEGGLNVHKERFAQDHAPVRTLAEVVEVARPSVLIGAAAIGGAFTPEILRKMANFNEKPVIFALSNPTSKAECTAEEAYSNTDDRAIFASGSPFPEYRSKSGALFRPGQGNNSYIFPGLALGIICAGILDISDDFMLLAAEALAEIVSDDDLAYGSLYPPLHMIKDCSVKIAKKIVEHAYNTGKASVQPQPLDTEEFIRAQMYSVEYGAALPPAYPWPDNQPRVAII

SEQ ID NO: 5565 - DNA, 1371 bp, Archaeoglobus fulgidus DSM 4304
  CDS (1)..(1371): transl_table=11
atgtatcgtgtaaaaacatttaagtactatagtacgtataagatttgtatgattgaagaggtgtttgaattgacccagaacggaagggcaaagaaatggcacgctttttatgggggaaagatagagatactcccgaaagttcccattcgaactcttgacgacttcagcatatggtacacacccggagtggcggaagtttgcaacgaaattgccgaggacgaggaaaaggcctacgattatacgaacaagtggaacctcatcgcaataatcacggacggctcaagaactctcggtttggggaacattgggccgaaagcagcgatgcccgttatggaaggcaaagctctccttttcaaattcctcggtgcggttgacgctttcccgatcgctcttgcggagcaggatgctgacaggtttatcgagattgttaaagccatctcaccaacttttggaggtgtaaaccttgaggatatttcctctccgaagtgcttctacatccttgaaaggctgcaaaaggagcttgacatcccagtctggcacgacgaccagcaggggacggctacggccacacttgcagccctcatcaacgccctgaaaatcgtcgggaaggacatcagcgaggtgaagatttccataatcggagttggagcggccaacttcgccacaatcaggctgctgaaggctgcaggggctgatccgaagaagatgtttgttgttgacagcaaaggcattctgcacccagacagggctgacctgaaggagaagaagggatacaagtggcaggtggcgattgagaccaacggtgagagaaggaccgggggaatggaggaggctataaggggcactgatgtccttatagccgcaagcaagcccggtccggacgtcataaagaaggagtggattgctgaaatgaacgatgacgccatcgtattccctctggcaaacccaacaccggaaatctggccgtgggaggcgaaggatgcaggagcgaggattgttgggacggggaggagcgacttccccaaccaggtcaacaactccctcgtctttccgggagttttcaggggtgctttgacggtaagagcgagaaaaataacggacgagatgtgccttgccgctgccaacgcccttgcagagtttgctgaaaggaacggtcttagcgaggactacataattcccagaatgactgaaaaagaggtgttcccagaggtggcgacagccgttggcgtaaaggcggttgaactcgggctggctaggctggagctgagggaggaggagatttacgagatagccgagctgatgatttccgccacgcagaggaagataaagaagctctacgagcttgggtttatcaaggaacccccatcctga

SEQ ID NO: 5566 - protein, 456 aa, Archaeoglobus fulgidus DSM 4304
MYRVKTFKYYSTYKICMIEEVFELTQNGRAKKWHAFYGGKIEILPKVPIRTLDDFSIWYTPGVAEVCNEIAEDEEKAYDYTNKWNLIAIITDGSRTLGLGNIGPKAAMPVMEGKALLFKFLGAVDAFPIALAEQDADRFIEIVKAISPTFGGVNLEDISSPKCFYILERLQKELDIPVWHDDQQGTATATLAALINALKIVGKDISEVKISIIGVGAANFATIRLLKAAGADPKKMFVVDSKGILHPDRADLKEKKGYKWQVAIETNGERRTGGMEEAIRGTDVLIAASKPGPDVIKKEWIAEMNDDAIVFPLANPTPEIWPWEAKDAGARIVGTGRSDFPNQVNNSLVFPGVFRGALTVRARKITDEMCLAAANALAEFAERNGLSEDYIIPRMTEKEVFPEVATAVGVKAVELGLARLELREEEIYEIAELMISATQRKIKKLYELGFIKEPPS

SEQ ID NO: 5567 - DNA, 2280 bp, Mesorhizobium loti MAFF303099
  CDS (1)..(2280): transl_table=11
atggccaggaaaaccgagaacaacggtccgtccgtcagcgcgcaggaagcgctcgaattccatgcgatgggccggcctggcaagctggagatcgtcgccaccaagccgatgacgacgcagcgcgatctgagcctcgcctattcgccaggcgtcgccgtgccggtgcgcgccatcgccgaagaccccagccgcgccttcgactatacgacgcgtggcaacatggtcgccgtcatctccaacggcaccgccatccttggcctcggcaatctcggcgcactggcctccaagccggtgatggaaggcaaggcggtgctgttcaagcgcttcgccgatgtcgattccatcgacctcgaggtcgataccgaggatgccgacgaattcatcaactgcgtgcgcttcctcgggccgtccttcggcggcatcaacctggaagacatcaaggcgccggagtgcttcatcatcgagcagcgcctgcgcgaactgatggacatccctgtcttccacgacgaccagcatggcaccgccatcatctcggccgccggcctgatcaacgcgctggagatcaccggccgcgacatgaagaccaccaggctggtctgcaacggcgcgggcgccgccggcatcgcctgcatcgagctgatgaaggcgatgggcttcgcgcccgaaaacatcatcctgtgcgacaccaagggcgtggtcttccagggccgcaccgaaggcatgaaccagtggaagtcggcgcatgcggtcaagaccgaggcacgcagccttgccgacgcgctcgacggcgccgacgtcttcctcgggctctcggccaagggcgcgctgaccaccgccatggtgcagtcgatggccaagaacccgatcatcttcgccatggccaatcccgatccggaaatcacgccggaggaagtggccgagatccgcaccgacgccatcatggcgacgggccgttcggactatccgaaccaggtcaacaacgtgctcggcttcccctacatcttccgcggcgcgctggatgtgcgggcgaccaccatcaatgaagacatgaagatagccgctgcccgggcgctggccgaactggcgcgccaggacgtgcccgacgacgtcgctgccgcctatcagggcaaccggccgaaattcggtcccaactacatcattccggtgccgttcgacccgcggctgatctcggccattccgctggcggtggccaaggcggcgatggagtccggcgtcgcccgcaagccgatcctcgaccttgaccgctatgcgcaggaactgtcggcccgccgcgacccgatcgcctcgaccctgcagcgcatctacgaccgcgtgcggcgccaacccaagcgcatcgtcttcgccgagggcgaggaggagcaggtgatgcgcgccgccgtttcctatgtgaaccagcggctcggcaccgccatcctgctcggccgcgacgatgtcatcaaggaaaacgccaagcacgccggcatcgacctgaacaagcaaggcatcgagatcatcaatgcaaggctgtcgcgccgcaacggcatctacaccgactatctctacgagcgcatgcagcgcaaaggcttcctgttccgcgactgccagcgcctgatcaacaacgaccgcaaccatttcgccgcctgcatggtggcgctgggcgacgccgacggcatcgtcaccggcgtgacccgcaactattcgaccgcgctcgacgacatccgccgcgtcatcgacgccaagcccggccaccgcgtcatcggcgtctcgatcgtgctggcgcggggcaagactgtgctcgtcgccgacactgccgtgcacgacatgccgaacgccgagcagatcgccgacatcgccgaggaagcggcaggcttcgctcgacgcatgggctacgagccgaggctcgccatgctcgcctattccaccttcggccatccgcagggcgaacgttccgagcgcgtccaggaggccgtgcgcatcctcgacaagcgccgcgtcgatttcgaatatgacggcgaaatggccgccgatgtcgcgctcaatgcccgcgccatggcgcaatacccgttcatccgcctcaccggcccggccaatgtgctgatcatgccggccttccactcggcctcgatctcgaccaagatgctgcaggaactcggcggctcgacggtgatcggcccgctgttggtcggtctgaacaagccggtgcagatcgtctcgctgaacgccaaggactcggacatcgtcaacatggcggcgatcgccgcgtacacggccgggacttga

SEQ ID NO: 5568 - protein, 759 aa, Mesorhizobium loti MAFF303099
MARKTENNGPSVSAQEALEFHAMGRPGKLEIVATKPMTTQRDLSLAYSPGVAVPVRAIAEDPSRAFDYTTRGNMVAVISNGTAILGLGNLGALASKPVMEGKAVLFKRFADVDSIDLEVDTEDADEFINCVRFLGPSFGGINLEDIKAPECFIIEQRLRELMDIPVFHDDQHGTAIISAAGLINALEITGRDMKTTRLVCNGAGAAGIACIELMKAMGFAPENIILCDTKGVVFQGRTEGMNQWKSAHAVKTEARSLADALDGADVFLGLSAKGALTTAMVQSMAKNPIIFAMANPDPEITPEEVAEIRTDAIMATGRSDYPNQVNNVLGFPYIFRGALDVRATTINEDMKIAAARALAELARQDVPDDVAAAYQGNRPKFGPNYIIPVPFDPRLISAIPLAVAKAAMESGVARKPILDLDRYAQELSARRDPIASTLQRIYDRVRRQPKRIVFAEGEEEQVMRAAVSYVNQRLGTAILLGRDDVIKENAKHAGIDLNKQGIEIINARLSRRNGIYTDYLYERMQRKGFLFRDCQRLINNDRNHFAACMVALGDADGIVTGVTRNYSTALDDIRRVIDAKPGHRVIGVSIVLARGKTVLVADTAVHDMPNAEQIADIAEEAAGFARRMGYEPRLAMLAYSTFGHPQGERSERVQEAVRILDKRRVDFEYDGEMAADVALNARAMAQYPFIRLTGPANVLIMPAFHSASISTKMLQELGGSTVIGPLLVGLNKPVQIVSLNAKDSDIVNMAAIAAYTAGT

SEQ ID NO: 5569 - DNA, 1941 bp, Arabidopsis thaliana
  CDS (1)..(1941)
atgatctctctcactccctcgttgtttctgaacaagacggttgttcctggatgttccacacgcctctctctgcgccagcctagaactataattactcctcctgcttccttgagagtcttttcctctctcggatctaaccaggatcccaccggcagcgttttgattgagaccactgccacttcatcctcctctctcgagacctccgccgccgacattgttcccaaatccaccgtatctggtggagttcaggatgtctacggcgaggatgccgccaccgaggacatgcctatcactccttggtctctctctgtcgccagtgggtatacgttgttgcgtgatccacatcacaacaaaggccttgcctttagccacagagagcgtgacgctcactatctacgcggcctcctcccccccactgttatctcacaagatcttcaggttaaaaaaattatgcacactcttcgtcagtatcaagttcccttgcagaagtatatggctatgatggatctccaggagaccaacgagaggctgttttacaaacttctcattgatcacgtcgaggagttgctacccgttatctacactccaacggttggggaagcctgccagaagtatggtagcattttcctgcgtccacaggggctttttatcagcttgaaagaaaaaggtaagattcatgaagtgctgaggaactggcctgagaagaacatccaggtcattgttgtcactgatggggagcgcattttagggttaggagatcttggatgtcagggaatgggaatacctgttgggaaactttctctctacacagcccttggaggtgtccggccatctgcctgtctgcccgtaacaatcgatgttgggacaaacaacgaaaagctattgaacgatgagttctacatagggctccgccaaaggagagctacaggagaggaatactccgaacttatgcatgaattcatgacagcagtcaagcagaactatggggagaaagtcgttattcagtttgaagactttgccaaccataatgcttttgatctgttagctaagtatggtacaacacatcttgttttcaatgacgatattcagggcacagcatcagttgtgcttgctggacttatcgctgctcttagatttgtggggggatccttgtcagaccacagattcctcttcctcggggctggagaggctggcactggaatagctgaactaattgctcttgagatttcaaagaagtcccatattccattggaagaggctcggaagaatatttggctcgtggattcaaagggattgattgtcagttcccggaaagaatccattcaacatttcaaaaagccctgggctcatgaccatgaaccaataagggaacttgttgatgccgtcaaggcaatcaagccgacagttctgatcggaacatcaggtgtaggtcaaacattcactcaagacgtggtggaaaccatggcaaagctaaatgagaaacccatcattctttctctttcgaacccaacttctcagtcagaatgtacggcagaagaggcctatacgtggagtcagggacgggcgatctttgcaagtggaagcccatttgcgccagtagagtatgagggaaagacgtttgtgcctggacaggcaaacaacgcatacatcttccctgggtttggactcgggctaataatgtcagggacgatccgtgtccatgatgacatgcttctggcagcatcagaagctttggctgaggaactgatggaggaacactatgagaaggggatgatataccctcccttcaggaatatcagaaaaatctcagctcgtattgcagctaaggtggctgccaaggcctacgaactgggactggccacgaggttgcctcagcccaaggagctggagcagtgtgctgagagcagcatgtacagcccttcgtatcgaagctaccgctga

SEQ ID NO: 5570 - protein, 646 aa, Arabidopsis thaliana
MISLTPSLFLNKTVVPGCSTRLSLRQPRTIITPPASLRVFSSLGSNQDPTGSVLIETTATSSSSLETSAADIVPKSTVSGGVQDVYGEDAATEDMPITPWSLSVASGYTLLRDPHHNKGLAFSHRERDAHYLRGLLPPTVISQDLQVKKIMHTLRQYQVPLQKYMAMMDLQETNERLFYKLLIDHVEELLPVIYTPTVGEACQKYGSIFLRPQGLFISLKEKGKIHEVLRNWPEKNIQVIVVTDGERILGLGDLGCQGMGIPVGKLSLYTALGGVRPSACLPVTIDVGTNNEKLLNDEFYIGLRQRRATGEEYSELMHEFMTAVKQNYGEKVVIQFEDFANHNAFDLLAKYGTTHLVFNDDIQGTASVVLAGLIAALRFVGGSLSDHRFLFLGAGEAGTGIAELIALEISKKSHIPLEEARKNIWLVDSKGLIVSSRKESIQHFKKPWAHDHEPIRELVDAVKAIKPTVLIGTSGVGQTFTQDVVETMAKLNEKPIILSLSNPTSQSECTAEEAYTWSQGRAIFASGSPFAPVEYEGKTFVPGQANNAYIFPGFGLGLIMSGTIRVHDDMLLAASEALAEELMEEHYEKGMIYPPFRNIRKISARIAAKVAAKAYELGLATRLPQPKELEQCAESSMYSPSYRSYR

SEQ ID NO: 5571 - DNA, 1746 bp, Arabidopsis thaliana
  CDS (1)..(1746)
atggagaaagtgaccaactcagacttgaaatcctctgttgatggtggcgttgttgatgtgtatggagaagattcagccaccattgagcacaacataactccttggtctctctctgtttctagtggatattcattgctgagagatcctcgctacaacaaaggacttgctttcactgagaaagagagagacactcattacttgcgtggtcttctccctccagttgttcttgatcaaaagcttcaggagaagaggctgttgaacaatatccgacaatatcaattcccattacaaaagtacatggctctgacagaacttcaggaaagaaacgagagactgttttacaagctattgatagataatgttgaggagctacttcctattgtttatactccaactgttggtgaagcttgtcagaaatttggaagtattttcaggcgacctcagggtttattcatcagtttaaaagacaagggaaagattctagatgtgttaaagaactggcctgaaaggaacatacaggttattgttgttactgacggtgaaaggattttaggattaggagatcttggatgtcaggggatgggtataccggttggtaagttggcgttatattcagcacttggaggtgttcgtccttcagcgtgtttacctgtcaccattgatgtgggaacaaacaatgagaaactgttgaatgatgagttctacataggactcaggcaaaagagagcaacgggacaggaatatagtgaactcttgaatgaattcatgagtgctgtgaaacagaactatggtgaaaaagttcttattcagtttgaagattttgctaatcataatgcctttgagttgcttgcaaaatacagcgatactcatctcgtcttcaacgatgatatacaggggacagcatcagttgttttagcaggattagtttccgcacagaagttaacgaatagcccacttgcagagcataccttcctctttcttggtgctggtgaagctggaactggaatagcagaactcatagctctctatatgtcaaaacagatgaatgcttcggtagaggaaagccgcaagaaaatctggcttgttgattccaagggattgattgttaactcccgcaaagattcacttcaagactttaagaaaccatgggctcatgaacatgaaccagtcaaagacctcttaggtgctatcaaggcaataaaaccgactgttctgattggatcttctggcgttggacggtcttttacaaaagaagtgatagaagccatgtcctccattaatgagagaccactgataatggctctctctaaccccacaacacaatctgaatgtacagccgaagaagcttatacttggagtaagggccgtgccatttttgctagtggaagcccttttgatccagttgagtatgaaggaaaggtgtttgtatctacacaggcgaacaatgcgtacatattcccgggctttggacttggtttggttatctctggagcaatacgggtacatgacgatatgcttctagctgctgctgaggcattagctggacaagtaagcaaagagaactatgagaaaggaatgatatatccttcattctcttccatccggaaaatatcagctcagattgcagccaatgtagcaactaaggcgtatgaactaggattggcagggcggcttccacggccgaaagatattgtcaaatgtgcagagagtagcatgtacagccccacataccgtctctaccgttga

SEQ ID NO: 5572 - protein, 581 aa, Arabidopsis thaliana
MEKVTNSDLKSSVDGGVVDVYGEDSATIEHNITPWSLSVSSGYSLLRDPRYNKGLAFTEKERDTHYLRGLLPPVVLDQKLQEKRLLNNIRQYQFPLQKYMALTELQERNERLFYKLLIDNVEELLPIVYTPTVGEACQKFGSIFRRPQGLFISLKDKGKILDVLKNWPERNIQVIVVTDGERILGLGDLGCQGMGIPVGKLALYSALGGVRPSACLPVTIDVGTNNEKLLNDEFYIGLRQKRATGQEYSELLNEFMSAVKQNYGEKVLIQFEDFANHNAFELLAKYSDTHLVFNDDIQGTASVVLAGLVSAQKLTNSPLAEHTFLFLGAGEAGTGIAELIALYMSKQMNASVEESRKKIWLVDSKGLIVNSRKDSLQDFKKPWAHEHEPVKDLLGAIKAIKPTVLIGSSGVGRSFTKEVIEAMSSINERPLIMALSNPTTQSECTAEEAYTWSKGRAIFASGSPFDPVEYEGKVFVSTQANNAYIFPGFGLGLVISGAIRVHDDMLLAAAEALAGQVSKENYEKGMIYPSFSSIRKISAQIAANVATKAYELGLAGRLPRPKDIVKCAESSMYSPTYRLYR

SEQ ID NO: 5573 - DNA, 1767 bp, Arabidopsis thaliana
  CDS (1)..(1767)
atgggcaccaatcagactcagatctccgatgaatatgttaccggtaacagttccggtgtaggtgggggaatctctgatgtatacggtgaagatagtgccacgttggatcaacttgtcactccttgggttacctctgtcgcaagtgggtatacattgatgcgtgatccacgttacaataaaggacttgcttttactgataaagagagagatgctcattacataactggtcttcttcctcctgtagttttatctcaagatgttcaggagaggaaagtgatgcataatcttcgtcagtatacggttcctttgcaacgttacatggctctcatggatcttcaggaaaggaatgagagattgttttataagcttttgattgataatgtggaggagttgcttccggttgtgtatacaccgacggttggtgaggcttgccaaaagtatgggagcatttataggaggccacaaggtctttacatcagcttgaaagagaagggaaagattcttgaagtattgaagaattggccacagagagggattcaagttattgttgttaccgatggtgagcggattctcggtcttggagatcttggttgccagggaatgggaatccctgttgggaagctttctctttacacagctttgggaggaatccgtccatcggcttgccttccaataaccattgatgtgggtacaaacaatgagaagctgttgaataatgagttttacattggccttaaacagaagagggcaaatggcgaggaatatgcagagtttttgcaggagtttatgtgtgctgttaaacaaaactatggagagaaagtgttggtgcagtttgaagattttgcaaaccaccatgcgtttgagcttctctctaagtactgctcaagtcatctcgttttcaatgatgatatccaaggaactgcatctgtggtgcttgccgggcttattgcggctcagaaagtacttggtaaaagcctagctgaccatacctttttgttcttgggtgctggagaggctggaaccggaatcgctgagctaattgctcttaaaatttcgaaagagactggaaaaccaatcgatgagacccggaagaagatttggcttgtggactccaagggactgattgttagcgaacgcaaagaatcgcttcaacatttcaagcagccatgggcgcatgaccacaagcctgtcaaggagctcttggcagctgttaatgcaatcaagccaactgttcttattggaacctctggtgtgggtaagactttcacaaaggaagtagtggaggccatggctaccttgaacgagaaaccattgattcttgcactctcaaacccaacttctcaagccgagtgcacggcggaagaagcttacacatggaccaagggtcgtgcaatctttgcaagtggaagcccgtttgaccctgttcagtatgatggcaaaaaattcacgcctggccaggcaaacaactgttacattttccctggtctcggtcttggtttgatcatgtccggtgccattcgtgtccgtgatgacatgcttctagcagcttcggaagcgctggcctcccaagtgacggaagagaattttgcgaacggactgatctatccgccttttgcaaacatcagaaagatctctgctaacattgcagccagtgtgggagccaaaacctacgaactcggactggcatcgaatctgcctcgtcctaaggacctcgtaaagatggcagagagctgcatgtacagtcctgtctacagaaacttccgttaa

SEQ ID NO: 5574 - protein, 588 aa, Arabidopsis thaliana
MGTNQTQISDEYVTGNSSGVGGGISDVYGEDSATLDQLVTPWVTSVASGYTLMRDPRYNKGLAFTDKERDAHYITGLLPPVVLSQDVQERKVMHNLRQYTVPLQRYMALMDLQERNERLFYKLLIDNVEELLPVVYTPTVGEACQKYGSIYRRPQGLYISLKEKGKILEVLKNWPQRGIQVIVVTDGERILGLGDLGCQGMGIPVGKLSLYTALGGIRPSACLPITIDVGTNNEKLLNNEFYIGLKQKRANGEEYAEFLQEFMCAVKQNYGEKVLVQFEDFANHHAFELLSKYCSSHLVFNDDIQGTASVVLAGLIAAQKVLGKSLADHTFLFLGAGEAGTGIAELIALKISKETGKPIDETRKKIWLVDSKGLIVSERKESLQHFKQPWAHDHKPVKELLAAVNAIKPTVLIGTSGVGKTFTKEVVEAMATLNEKPLILALSNPTSQAECTAEEAYTWTKGRAIFASGSPFDPVQYDGKKFTPGQANNCYIFPGLGLGLIMSGAIRVRDDMLLAASEALASQVTEENFANGLIYPPFANIRKISANIAASVGAKTYELGLASNLPRPKDLVKMAESCMYSPVYRNFR

SEQ ID NO: 5575 - DNA, 1278 bp, Vibrio cholerae O1 biovar eltor str. N16961
  CDS (1)..(1278): transl_table=11
atgtccgatgacaatcgcctcaacccaacacctgaagaacaatttcgccaacgcgctctggattaccatgcttacccaaccgcgggcaaaattggtattgcactgaccaagccagccgattctgctgccgatctcgctctggcttatagcccaggtgtagctgagccagtgcgtgaaatcgcgcaaaacgttgacaatgtgtataagtacaccgcgaaaggcaacacggtggccgtgatctctaacggcaccgcaattttaggattgggaaatttaggcccgatggcctctaagcctgtcatggaaggtaaggcactgctgtttaaacgcttcgcaggattggattcgattgatattgaagtaaaacaccgcacgatcgacgaatttatcgatactgtcgctaacattgctgatactttcggcggtatcaacttagaagatatcaaagccccagactgctttgaaattgagcgccgcctgattgagcgttgtgatgtccctgtattccacgatgaccaacacggtactgcgattgtcaccgcggctggtatgcttaatgcgcttgagttgcaaggtaaacaactgaaagactgtattatcgtctgccttggtgcgggtgccgcagcagtggcgtgtatggagctactgatcaaatgcggggcaatgcgtgagaaaatctacatgctggatcgcaaaggcgtgatccacactcgccgtgatgatctcaatgaatacaaagcactgtttgccaacaacaccgacaagcgtacgttggaagatgtgattgcgggagcggatctgttcctcggcgtttctggccctaacttgctgccagcggatgcccttaagctgatggccgacaagcctgtggtgtttgcctgctccaacccagatcctgaaatcaagccagaaattgctcatcaagtgcgtaacgacatgatcatggggactggtcgcagcgactatccaaaccaagttaacaacgtgctctgtttcccgttcattttccgtggagcactcgatgtgcgcgcgagtgaaatcaatgaccagatgaaactggctgcagtagaggcgattcgccaactggcgaaagagcctgtgccagccgaagtgctggcagctgctggagtggataagctcagtttcggtattgattacatcattccaaaaccgatggaccctcgcctattgccacgcgtagcacgcgccgtcgcggaagcggcagtggaatcaggtgttgctcgtatcccaatgccagaaaactacatgcaggcttaa

SEQ ID NO: 5576 - protein, 425 aa, Vibrio cholerae O1 biovar eltor str. N16961
MSDDNRLNPTPEEQFRQRALDYHAYPTAGKIGIALTKPADSAADLALAYSPGVAEPVREIAQNVDNVYKYTAKGNTVAVISNGTAILGLGNLGPMASKPVMEGKALLFKRFAGLDSIDIEVKHRTIDEFIDTVANIADTFGGINLEDIKAPDCFEIERRLIERCDVPVFHDDQHGTAIVTAAGMLNALELQGKQLKDCIIVCLGAGAAAVACMELLIKCGAMREKIYMLDRKGVIHTRRDDLNEYKALFANNTDKRTLEDVIAGADLFLGVSGPNLLPADALKLMADKPVVFACSNPDPEIKPEIAHQVRNDMIMGTGRSDYPNQVNNVLCFPFIFRGALDVRASEINDQMKLAAVEAIRQLAKEPVPAEVLAAAGVDKLSFGIDYIIPKPMDPRLLPRVARAVAEAAVESGVARIPMPENYMQA

SEQ ID NO: 5577 - DNA, 2277 bp, Pasteurella multocida subsp. multocida str. Pm70
  CDS (1)..(2277): transl_table=11
atggatgcacaattacgtcaagctgctctcgattttcatgaatttccaacaccgggaaaaatagaagtgaccccgaccaaatcgctggcaacacagcgtgatttagcgctcgcctattcccccggtgttgcggtcccctgtttagaaatccaagcagatcccgctgcctcttatcgttatacctccagaggcaatttagttgctgtgatttccaatggcacggcggttttaggtttaggcaacattggtgcattagcgggaaaaccggtaatggaagggaaaggggtgttattcaaaaaatttgccggtgtcaacgtatttgatatcgaaattgacgaaagagatccagataaattagtcgatattattgcttcgctagaacccacttttggtggcattaacttggaagatattaaagccccagaatgtttctatattgaacaaaaattacgtgagcggatgaaaattcctgttttccatgatgaccaacatggtaccgctattatcagtgctgctgcgattttgaatggcttacgtatcgtgaaaaaagacattgccaaggttaaattgattgcctcgggcgcgggtgccgcatcgattgcgtgtttaaatttattggtcagtttaggtttaccgcgtgaaaatattatcgtctgtgattcaaaaggggtgattttccatggtcgcgatgaacgcatggatgaaactaaaaaattatatgcaattgaagacaatggtaaacgtacgttagcggaagtcatcaacgatgcggatattttcttaggttgctctgcggcgggaacattaacccaagacatggtaaaaaccatggcggccaacccattaatccttgcgttagctaaccctgatcccgaaattttaccacctttagcgaaagccgttcgtccagatgcaattgtttgcacgggacgttctgattacccaaaccaagtcaataacgtactctgtttcccatttattttccgtggggcattagatgtgagtgcaacagcaatcaacgaagagatgaaactcgcggcagtgcatgccattgcggatcttgcacttgccgaacaaagtgaagtggttacctcagcttatggcgaaacggaattatcttttggtccagaatatttaattcctaagccgtttgatccccgtttaattgtcaaaattgccccggcggtagccaaagcagccatggattcgggggtcgctacgcgtccaattaaagattttgatgcttacattgaaaaactcacgcagtttgtgtacaaaacaaacttgttcatgaaaccggtgttcgctcaagcgaagcaaaataaaaaacgtgttttactcaccgatggtgaagaatctcgtgttttacatgctgtgcaagaaatcgcaacattaggtattgcaaccccaattttattgggtcgtccaagtgtcatcgcacaaaagattaaacagcttggtttacacattcaagaagggcgtgattttgaattagtggacatcgaaaacaacccttattttgaggaatgttataaaacttaccacaacttgcttaaacgcaaaggcattacgccagccggtgcgcaacgtaaaatgctacataatccgactgtgattggtgcaaccttgctccaactcggcaaagccgatgccatgttatgtggtttagtcggtccttatgcttcacatttaagcaatattaaagaagtgattggtgtccaaccttgtgtcccaacgcccgcgacagtaaatgggctcgtgttgccaacaggtaacttattcattacagatacctttgttaaccacaacccaactgcacaagaattagctgagatcaccattatggcagccaatgaagtaagccgtttcggtattgaacctaaagttgccttagtctcccattctaattttggcacctttgatgatccaagtgcggtcaaaatgcgcgaagttttacacttagtaaaagaaaaagcaccagacttgatcattgatggcgaaatgcactgtgatgtcgctttaaatgagaaattgcgtcaggacatcatgccagacagtccattaaaaggtgcggcaaacttattggtgatgccaaatatggaagctgcacggatcagtttgaacctattacagggcactgctaccccaattacagtcggaccaattttaatggggatgaataaacctgttcatattctcacctccgcgtcttctgtacgccggatcattaatatggtcgcaattgcggcagccaatgttgaacccacttgtaagtag

SEQ ID NO: 5578 - protein, 758 aa, Pasteurella multocida subsp. multocida str. Pm70
MDAQLRQAALDFHEFPTPGKIEVTPTKSLATQRDLALAYSPGVAVPCLEIQADPAASYRYTSRGNLVAVISNGTAVLGLGNIGALAGKPVMEGKGVLFKKFAGVNVFDIEIDERDPDKLVDIIASLEPTFGGINLEDIKAPECFYIEQKLRERMKIPVFHDDQHGTAIISAAAILNGLRIVKKDIAKVKLIASGAGAASIACLNLLVSLGLPRENIIVCDSKGVIFHGRDERMDETKKLYAIEDNGKRTLAEVINDADIFLGCSAAGTLTQDMVKTMAANPLILALANPDPEILPPLAKAVRPDAIVCTGRSDYPNQVNNVLCFPFIFRGALDVSATAINEEMKLAAVHAIADLALAEQSEVVTSAYGETELSFGPEYLIPKPFDPRLIVKIAPAVAKAAMDSGVATRPIKDFDAYIEKLTQFVYKTNLFMKPVFAQAKQNKKRVLLTDGEESRVLHAVQEIATLGIATPILLGRPSVIAQKIKQLGLHIQEGRDFELVDIENNPYFEECYKTYHNLLKRKGITPAGAQRKMLHNPTVIGATLLQLGKADAMLCGLVGPYASHLSNIKEVIGVQPCVPTPATVNGLVLPTGNLFITDTFVNHNPTAQELAEITIMAANEVSRFGIEPKVALVSHSNFGTFDDPSAVKMREVLHLVKEKAPDLIIDGEMHCDVALNEKLRQDIMPDSPLKGAANLLVMPNMEAARISLNLLQGTATPITVGPILMGMNKPVHILTSASSVRRIINMVAIAAANVEPTCK

SEQ ID NO: 5579 - DNA, 1269 bp, Pseudomonas aeruginosa PAO1
  CDS (1)..(1269): transl_table=11
atgtccgatcttaaaaccgctgccctcgaatatcacgcacaaccccgtccgggaaaactgagtgtcgagctgaccaaacccaccgctaccgcccgggacctgtccctggcctacagcccgggtgtcgccgagccggtgcgtgaaatcgcccgcgatgccgagctggcctaccagtacaccggcaagggcaacctggtggcagtgatttccgacggcaccgcgattctcggcctgggtaacctcggcccgctggcctccaagccggtgatggaaggcaagggtgtgctgttcaagcgcttcgccggcatcgacgtgttcgacatcgaggtcgacgccgagagcccgcaggctttcatcgataccgtcaagcgtatttccatcaccttcggcggtatcaacctcgaggacatcaaggctcccgagtgtttcgagatcgagcgcgcgctgatcgaacagtgcgacatcccggtgttccacgatgaccagcacggcaccgccatcgtgaccgcggcgggcatgctcaacgcgctggaactggccggcaagaagctggaagaagcgaagatcgtctgcctcggcgccggcgctgccgccatctcctgcatgaagctgctggtgagcatgggcgccaaggtcgagaacatctacatgatcgaccgcaagggcgtgatccacgccggtcgcgacgatctgaaccagtacaagtcggtgttcgccaccgagaccgacaagcgcaccctggccgacgccctggagggcgccgacgtgttcgtcggcctgtccggcgccaacctgctggagccggaagacctcaagcgcatggcgccgaacccgatcgtgttcgcctgctcgaacccggacccggagatcaagccggaactggcccatgccacccgtaacgacgtgatcatggctaccggtcgttccgactatccgaatcaggtcaacaacgtgctcggtttccccttcatcttccgtggtgccctggacgtacgtgccacgcgcatcaacgaagagatgaagatcgccgccgccctggccctgcgcgacctggccaagcagccggtcccggaagacgtctgcgccgcctatggcgtggacaagctggaattcggccgcgagtacatcattccgaagccgatggacaagcgcctgatcaccgtggtctccgatgccgtggccaaggctgccatcgagaccggcgtggctaccctgccgtatccgaagaactatccgctgaaatcggtggacgacgtcttcaacggctga

SEQ ID NO: 5580 - protein, 422 aa, Pseudomonas aeruginosa PAO1
MSDLKTAALEYHAQPRPGKLSVELTKPTATARDLSLAYSPGVAEPVREIARDAELAYQYTGKGNLVAVISDGTAILGLGNLGPLASKPVMEGKGVLFKRFAGIDVFDIEVDAESPQAFIDTVKRISITFGGINLEDIKAPECFEIERALIEQCDIPVFHDDQHGTAIVTAAGMLNALELAGKKLEEAKIVCLGAGAAAISCMKLLVSMGAKVENIYMIDRKGVIHAGRDDLNQYKSVFATETDKRTLADALEGADVFVGLSGANLLEPEDLKRMAPNPIVFACSNPDPEIKPELAHATRNDVIMATGRSDYPNQVNNVLGFPFIFRGALDVRATRINEEMKIAAALALRDLAKQPVPEDVCAAYGVDKLEFGREYIIPKPMDKRLITVVSDAVAKAAIETGVATLPYPKNYPLKSVDDVFNG

SEQ ID NO: 5581 - DNA, 2253 bp, Halobacterium sp. NRC-1
  CDS (1)..(2253): transl_table=11
atgggactcgatgatgacgcgctggactaccacgccagcgatccaccgggcaaagtagagatctcgaccaccaagccgacgaacacccagcgtgacctctcgctggcgtactcgccgggcgtggccgcgccgtgtcgcgccatcgccgacgaccccacggaggcgttcactcacaccaccaagggcaacatggtcggggtcgtgtccaacgggtcggcggtcctggggctcggcgacatcggcgcgcaagccgcaaaacccgtcatggaggggaaaggcgtgctgttcaagcggtttgcggacatcgacgtgttcgacatcgagttggatcaggcgaccgccgacgagctggttgccaccgtctcggcgatggaacccacgttcggcggcatcaacctcgaagacatcaaagcgccggagtgcttcgaggtggagcgccggctcggcgacgccatggacgtgcccgtgttccacgacgaccaacacggcaccgccatcatctccggggcggcgctgttgaacgccgccgagatcgcgggcaaggacctcagcgacctcgatgtcgtcttctcgggggccggcgcgtcggccatcgccacggcgaagttctacgtcagcctgggcgtcgaccgcgagcacatcacgatgtgtgactcctcgggagtcatcaccgaggaccgcgacgtcaacgagttcaaggccgcgttcgcgcagcccgccgacagcggcggcgacctcgcggacgcgatggcgggcgcggacgtcttcgtcgggctgtccgtgggcggcatcgtgaaccaggcgatggtgcgctcgatggccgacgacccgatcgtgttcgcgatggccaaccccgacccggagatcgactacgagtccgcgaaagccgcccgcgaggacaccgtgatcatggccaccgggcgctcggactaccccaaccaggtgaacaacgtgttggggttcccgttcatcttccggggggcactcgacgtgcgcgcgaccgacatcaacgaggagatgaaagtcgccgccgcgaccgcgctggcggacctcgccaagcaggacgtgcccgacgaagtggtgaaagcctacggcgaccagccgctgcagttcggttccgagtacatcatcccgaagccactggacccacgcgtgctgttcgaggtcgcgcccgccgtcgcggacgcggcgatggagaccggcgtcgcgcgcaccgagttggacctcgtggactaccgggaggagctggaggcccgcctcgggaagagccgggagatgatgcgcatcgtcatcaacaaggccaaaagcgaacaacagcgcatcgcgctgggcgagggcggcgacgagaagatgatccgcgccgcccaccagatgcacgaggcggggatcgccgaccccgtgctgttgggcgaccgggacaccatccagggcaccgtcgacgcgctcagcctggatttcgacccggacgtcgtcgaccccgacgagggcgaccacagcgcgtacgccgacacgctctatgacctccgcaagcgcaagggcatcacgcgcaacgaggccgaatccctggtcgccagggaccccaactatctcgggtcgacgatggtcgaagcgggcgacgccgacgccttcctcacggggctcacgcaccactacccgtcggcgctgaagccgcccctgcaggtcgtgggcaccgccccggacaccgactacgtcgccggggtgtacatgctgacgttccagaaccgcgtggtgttctgcgcggacgcaacggtcaaccaggaccccgacgcggacgtgctcgcggaggtcgcacagcacaccgcggacctcgcgcgccggttcaacgtcgacccgcgggtggccgtgttgtcgtactcgaacttcggcagtgtggacaacgagggcacccgaaaaccccggcgggcggcacagcagctccgcgaggacgacgacatcgacttcccggtggacggcgagatgcaggccgacaccgctgtcgtcgaggacatcctccaggggtcgtacgagttcagcgacctggacaccgccgcgaacgtcctgattttcccgaacctggaggccgggaacatcgggtacaagctcttgcagcggttgggcggcgcggacgccatcggtccgatgctcgtgggcatgaacaagccggtgcacgtgctccagcgcggcgacgaggtcaaagacatcgtgaacctcgcggccgtcgcggcggccgacgcacagcagcgcgaggactga

SEQ ID NO: 5582 - protein, 750 aa, Halobacterium sp. NRC-1
MGLDDDALDYHASDPPGKVEISTTKPTNTQRDLSLAYSPGVAAPCRAIADDPTEAFTHTTKGNMVGVVSNGSAVLGLGDIGAQAAKPVMEGKGVLFKRFADIDVFDIELDQATADELVATVSAMEPTFGGINLEDIKAPECFEVERRLGDAMDVPVFHDDQHGTAIISGAALLNAAEIAGKDLSDLDVVFSGAGASAIATAKFYVSLGVDREHITMCDSSGVITEDRDVNEFKAAFAQPADSGGDLADAMAGADVFVGLSVGGIVNQAMVRSMADDPIVFAMANPDPEIDYESAKAAREDTVIMATGRSDYPNQVNNVLGFPFIFRGALDVRATDINEEMKVAAATALADLAKQDVPDEVVKAYGDQPLQFGSEYIIPKPLDPRVLFEVAPAVADAAMETGVARTELDLVDYREELEARLGKSREMMRIVINKAKSEQQRIALGEGGDEKMIRAAHQMHEAGIADPVLLGDRDTIQGTVDALSLDFDPDVVDPDEGDHSAYADTLYDLRKRKGITRNEAESLVARDPNYLGSTMVEAGDADAFLTGLTHHYPSALKPPLQVVGTAPDTDYVAGVYMLTFQNRVVFCADATVNQDPDADVLAEVAQHTADLARRFNVDPRVAVLSYSNFGSVDNEGTRKPRRAAQQLREDDDIDFPVDGEMQADTAVVEDILQGSYEFSDLDTAANVLIFPNLEAGNIGYKLLQRLGGADAIGPMLVGMNKPVHVLQRGDEVKDIVNLAAVAAADAQQRED

SEQ ID NO: 5583 - DNA, 2280 bp, Escherichia coli O157:H7 EDL933
  CDS (1)..(2280): transl_table=11
  misc_feature (529)..(529): s is g or c
  misc_feature (531)..(531): y is t or c
  misc_feature (687)..(687): k is g or t
atggatgaccagttaaaacaaagtgcacttgatttccatgaatttccagttccagggaaaatccaggtttctccaaccaagcctctggcaacgcagcgcgatctggcgctggcctactcaccaggcgttgccgcaccttgtcttgaaatcgaaaaagacccgttaaaagcctacaaatataccgcgcgcggtaacctggtggcggtgatctctaacggtacggcggtgctggggttaggcaacattggcgcgctggcaggcaaaccggtgatggaaggcaagggcgttctgtttaagaaattcgctgggattgatgtatttgacattgaagttgatgaactcgacccggacaaatttattgaagtcgtcgctgcgctcgaaccgaccttcggcggcatcaacctcgaagacattaaagcgccagaatgtttctatattgaacagaaactgcgcgagcggatgaatattccggtattccacgacgatcagcacggcacggcaattatcagcactgccgccatcctcaacsgyttgcgcgtggtggagaaaaacatctctgacgtgcgtatggtggtttccggcgcgggtgctgcagcaatcgcctgtatgaacctgctggtagcgttgggtctgcaaaaacataacatcgtggtttgcgattcaaaaggcgttatctatcagggccgkgagccaaacatggcggaaaccaaagccgcatatgcggtagtggatgacggcaaacgtaccctcgatgatgtgattgaaggcgcagatattttcctcggctgttccggcccgaaagtgctgacccaggaaatggtgaagaaaatggctcgagcgccaatgatcctggcgctggcgaacccggaaccggaaattctgccgccgctggcgaaagaagtgcgtccggatgccatcatctgtaccggccgttccgactacccgaaccaggtgaacaacgtcctttgcttcccgttcatcttccgtggcgcgctggacgttggcgcaaccgccatcaacgaagagatgaaactggcggcggtacgcgcgattgcagaactggcccatgcggaacagagtgaagtggtggcttcagcgtatggcgatcaggatctgagctttggccctgaatacatcattccaaaaccgtttgatccgcgtctgatagtcaagattgctcctgcggtcgcgaaagcggcgatggagtcgggcgtggcgacgcgtccgattgctgatttcgacgtctacatcgacaagctgactgagttcgtttacaaaaccaacctgtttatgaagccgattttctcccaggctcgcaaagcgccgaagcgcgtagttctgccggaaggggaagaggcgcgcgttctgcatgccactcaggaactggtaacgctgggactggcgaaaccgatccttatcggtcgtccgaacgtgatcgaaatgcgcattcagaaactgggcttgcagatcaaagcgggcgttgattttgagatcgtcaataacgaatccgatccgcgctttaaagagtactggaccgaatacttccagatcatgaagcgtcgcggcgtcactcaggaacaggcgcagcgggcgctgatcagtaacccgacagtgatcggcgcgatcatggttcagcgtggcgaagccgatgcaatgatttgcggtacggtgggtgattatcatgaacattttagcgtggtgaaaaatgtctttggttatcgcgatggcgttcacaccgcaggtgcaatgaacgcgctgctgctgccgagtggtaacacctttattgccgatacctacgtcaatgacgaaccagacgcagaagagctggcggagatcaccttgatggcggcagaaactgtccgtcgtttcggtattgaaccgcgcgttgctctgttgtcgcactccaactttggttcttctgactgcccgtcgtcgagcaaaatgcgtcaggcgctggaactggtcagggaacgtgcgccagaactgatgattgatggtgaaatgcacggcgatgcagcgctggtggaagcgattcgcaacgaccgtatgccggacagccctttgaaaggttctgccaatattctggtgatgccgaacatggaagctgcccgcattagttacaacttactgcgcgtttccagctcggaaggtgtgactgtcggtccggtgctgatgggcgtggcgaaaccggttcacgtgttaacgccgatcgcatcggtgcgtcgtatcgtcaacatggtggcgctggccgtggttgaagcgcaaacccaaccgctgtaa

SEQ ID NO: 5584 - protein, 759 aa, Escherichia coli O157:H7 EDL933
  misc_feature (177)..(177): The Xaa at location 177 stands for Arg, or Gly.
MDDQLKQSALDFHEFPVPGKIQVSPTKPLATQRDLALAYSPGVAAPCLEIEKDPLKAYKYTARGNLVAVISNGTAVLGLGNIGALAGKPVMEGKGVLFKKFAGIDVFDIEVDELDPDKFIEVVAALEPTFGGINLEDIKAPECFYIEQKLRERMNIPVFHDDQHGTAIISTAAILNXLRVVEKNISDVRMVVSGAGAAAIACMNLLVALGLQKHNIVVCDSKGVIYQGREPNMAETKAAYAVVDDGKRTLDDVIEGADIFLGCSGPKVLTQEMVKKMARAPMILALANPEPEILPPLAKEVRPDAIICTGRSDYPNQVNNVLCFPFIFRGALDVGATAINEEMKLAAVRAIAELAHAEQSEVVASAYGDQDLSFGPEYIIPKPFDPRLIVKIAPAVAKAAMESGVATRPIADFDVYIDKLTEFVYKTNLFMKPIFSQARKAPKRVVLPEGEEARVLHATQELVTLGLAKPILIGRPNVIEMRIQKLGLQIKAGVDFEIVNNESDPRFKEYWTEYFQIMKRRGVTQEQAQRALISNPTVIGAIMVQRGEADAMICGTVGDYHEHFSVVKNVFGYRDGVHTAGAMNALLLPSGNTFIADTYVNDEPDAEELAEITLMAAETVRRFGIEPRVALLSHSNFGSSDCPSSSKMRQALELVRERAPELMIDGEMHGDAALVEAIRNDRMPDSPLKGSANILVMPNMEAARISYNLLRVSSSEGVTVGPVLMGVAKPVHVLTPIASVRRIVNMVALAVVEAQTQPL

SEQ ID NO: 5585 - DNA, 2289 bp, Agrobacterium tumefaciens str. C58
  CDS (1)..(2289): transl_table=11
atgtccgacacgacgaaaaccgccagcacaagaacatcggttacggatcaggaagccctggatttccacgcgcagggcaggccgggcaaactggaaatcaccccgaccaagccgatggcaacgcagcgggatctgtcgcttgcctattcgcccggtgttgctgtgccggtgaaagccatcgccgaaaatccggcgaccgcttacgattataccacccgcggcaacatggtggccgtcatctcgaacggcaccgccatcctcgggctcggcaatctcggcgcgctcgcctccaagccggtcatggaaggcaagtcggtcctcttcaagcgtttcgccgatgtcgattccatcgatctcgaggtcgataccgaggacgccgatgaattcataaattgcgtgcgctaccttggcccctccttcggcggtatcaatctcgaagacatcaaggcgccggaatgtttcatcatcgaaagccgcctgcgcgagctgatggacattcccgtcttccatgacgaccagcacggcaccgccatcatcgccgccgccggcctcatcaacgccatcgaacttaccggccgcgacttcaagacgacaaagctcgtctgcaatggcgcaggcgctgccgcgattgcctgcatggacctcatcaaggccatgggtttcaacccggaaaacatcacgctctgcgataccaagggcgtgatctatcagggccgcaccgaaggcatgaaccagtggaaatccgcccatgcggtgaagaccgacagacggacgctgacggaggcgatgaacggtgcggatgtggtgttcggcctgtcgcagaagggcgctttcactgaagagatgatccgctctatggcgccgaagccgatcattttcgccatggccaacccggatccggaaatcacgccggaagaagtctcgcgcatccgcgacgacgcgatcatggcgaccgggcgttctgactacccgaaccaggtcaacaacgtcctcggtttcccctatatcttccgcggcgcgctcgacgtgcgtgcccgccagatcaacgacgcgatgaagattgccgccgcacaggcgctggccgatcttgcccgcgaagatgtgcctgacgacgtggccgccgcctatcagggcaaccgcccgcgcttcgggtcgcaatacatcattccggttcccttcgatccgcgcctgatctcggccattccggtggccgtggccaaagccgccatcgaaaccggcgtcgcccagcgcgaaatacccgatctcgacgcctatgcccgcgagctttccgcccgccgcgacccgatggcctctacgacgcagcgcctttacgagcgtgtgcgccgttcgcccaagcgcgtggtctttgccgaagcggaagaagagcaggtcatgcgcgcggcgatttcgttcacggcgcagggtctcggcacagccatcctgctcggccgtgacgatatcattaaggccaatgcagaacgcgcgggcatcgatctcgaccgcgccaatatcgaaatcaccaatgcccgtctctccagccgcgtcgatgcctatgtcgattatctctatgcgcgtctgcagcgcggcggtttcctgctgcgcgacgtgcagcgtctcatccataacgaccgcaaccatttcgccgcctgcatggtggcgatgggcgatgcggatgccgtggtgaccggcgttacccgcaattattccaccgcgctggaggatatccgccgctgtatcaacaccaagcctggccatcgcgtcatcggcgtttcgcttgttgtctcccgaaatcgcaccgtcttcgtcgctgataccgccgtgcacgacatgccgaatgcggaagaccttgccgatatcgcggaagaggcggcccacctcgcccgccgtttcggttatgagccacgcgtcgccatgcttgcctattccaccttcggccagccggtcggtgaacgctccgacaaggtgcgcgaagcggtgaaaatcctcgacaagcgcaatgtcaatttcgaggtggacggcgagatgtcggcggatgtggcgctgaaccatcagcgcatgcagagccagtatccctttgcccgcctttccggtgcggccaacgtgctggtcatgcccgccatccattccgcctccatctccaccaagatgctgcaggaactgggcggcgcgaccgtcatcggtccgcttctcgtcggcctcgacaaatcggtgcagatcacctccatgggtgccaaggacagcgatatcgtcaacatggcggccatcgcagcctataacgccggccgatga

SEQ ID NO: 5586 - protein, 762 aa, Agrobacterium tumefaciens str. C58
MSDTTKTASTRTSVTDQEALDFHAQGRPGKLEITPTKPMATQRDLSLAYSPGVAVPVKAIAENPATAYDYTTRGNMVAVISNGTAILGLGNLGALASKPVMEGKSVLFKRFADVDSIDLEVDTEDADEFINCVRYLGPSFGGINLEDIKAPECFIIESRLRELMDIPVFHDDQHGTAIIAAAGLINAIELTGRDFKTTKLVCNGAGAAAIACMDLIKAMGFNPENITLCDTKGVIYQGRTEGMNQWKSAHAVKTDRRTLTEAMNGADVVFGLSQKGAFTEEMIRSMAPKPIIFAMANPDPEITPEEVSRIRDDAIMATGRSDYPNQVNNVLGFPYIFRGALDVRARQINDAMKIAAAQALADLAREDVPDDVAAAYQGNRPRFGSQYIIPVPFDPRLISAIPVAVAKAAIETGVAQREIPDLDAYARELSARRDPMASTTQRLYERVRRSPKRVVFAEAEEEQVMRAAISFTAQGLGTAILLGRDDIIKANAERAGIDLDRANIEITNARLSSRVDAYVDYLYARLQRGGFLLRDVQRLIHNDRNHFAACMVAMGDADAVVTGVTRNYSTALEDIRRCINTKPGHRVIGVSLVVSRNRTVFVADTAVHDMPNAEDLADIAEEAAHLARRFGYEPRVAMLAYSTFGQPVGERSDKVREAVKILDKRNVNFEVDGEMSADVALNHQRMQSQYPFARLSGAANVLVMPAIHSASISTKMLQELGGATVIGPLLVGLDKSVQITSMGAKDSDIVNMAAIAAYNAGR

SEQ ID NO: 5587 - DNA, 2304 bp, Rickettsia conorii str. Malish 7
  CDS (1)..(2304): transl_table=11
atggatgaaatgaataaaataaattatgctgaggcccttgaatatcatgaaaaagataagcctggtaagatcgctatttctgcaacaaagtctttagttactcagcaagatttatcacttgcttattccccaggggttgcggctccttgccttgaaattgctaaaaatttagaggatgtatataaatatactgctcgcggtaatttagttgccgtaatctctaacggtactgccgtacttgggcttggtaatttaggagctgccgcttcaaaaccggtgatggaaggtaaagcggtactattcaaaaaatttgctgatattgatgcaattgacttggaagtgaatacggaagatcctgaagaatttattaatgccgtgaagtatctcagttatagttttgggggtattaatcttgaagatattaaagctccggaatgttttattatagaagaaaaattaaaatctttaatggatataccggtctttcatgacgatcagcatggaacagcgattattaccgccgcagggctaataaatgctgcgtatcttactaatcgcaagcttgaagatttaaaaatcgtagttaacggagcaggtgcagcagctattgcttgcattgatttattaattgctcttggagctgataaatcaaagattattgtatgtgatactaaaggcgttgtttacaaaggacgcctagaaggtatgaataaatggaaagaactatatgcaagtgataccaagtttagaactttagcggaaagcttaaataacgctgatgtatttatagggttatcggtaaaaggcgcagtaactaaagatatggtgagtagaatggcaagtaatccgattatttttgctatggctaaccctgatccggaaattactccggaagatatacaacttgtacgcgatgatgcgattatagcaacagggcgatctgattataataatcaaattaataatgttatgggatttccttatatttttagaggagcattagatataagagctaagactattaatacggaaatgaaaatagctgcagcaaaagccattgcagatttagcccgtagacctgtaccggaagaggtgtataaagcttattcagggcgtaagatggtttttggtaaggaatatatcattcctgtaccgtttgatcctcgtttaattaccgtagtagcagcggcggttgccgttgctgcaatagaaagcggcgttgctagggttaaagattttagtataggtaaatataaaaaagaattaggtagcagattaaatcctactgctaactatatgaatttcttagctgaaaaaattcataatgcaccgcttaaacggattgtttttgctgaaggtgaagaagaagaagtaatttctgccgctcttatgatgcgagacaagaaatacggtcatccgattataattggtcgtgttgaacgaattgaggttatgttaaaaaagataggtcaagatattagcttagacggaattcaaataatgaatgcggccttaagcgatagtttagagaaatatactgattatttatataaaagacttcagagaaaaggttatttataccgtgattgtgcaaagcttgttaaaactgataagaatattttcgctgcttgtatgttagcatgcggtgacggtgatgctcttctaaccggtgttacacaaagttatatcgatagtttagaagatatcatgaaagtcatttcaccaaaaactaatcgtagcatcctgggctattcaattatgattgctaaagataataatattattattgccgataattgtattacagaatatccaaacagttgggaacttgcacaaatagcaacccaaactgcagaaattgctaaaaatatgggaatcacgcctcgtgttgcacttctttctttttcaacattcggtaattcttctaaggcaaaaacagctcgtattcgtgaagcagtaaatatactagataattttagcaaggacaaagaagagctgagcggcatgaaggtagattttgaatatgacggagagatgtcggttaaagtggctttagatggtgatttacgtaaattatataaattttgtagattatcaggatctgcaaatgtattaattatgcctggtttaaattcagctgctatttctactgagttgttacaagaattttcgtcaaacagctttataggtcctataacaaacggttttgaaaaacccgttcaaatacttcaagctgcagcaacagctaatgaaatactaaaaatagcaacttttgcttgcgttgaagctataaacgaggtttaa

SEQ ID NO: 5588 - protein, 767 aa, Rickettsia conorii str. Malish 7
MDEMNKINYAEALEYHEKDKPGKIAISATKSLVTQQDLSLAYSPGVAAPCLEIAKNLEDVYKYTARGNLVAVISNGTAVLGLGNLGAAASKPVMEGKAVLFKKFADIDAIDLEVNTEDPEEFINAVKYLSYSFGGINLEDIKAPECFIIEEKLKSLMDIPVFHDDQHGTAIITAAGLINAAYLTNRKLEDLKIVVNGAGAAAIACIDLLIALGADKSKIIVCDTKGVVYKGRLEGMNKWKELYASDTKFRTLAESLNNADVFIGLSVKGAVTKDMVSRMASNPIIFAMANPDPEITPEDIQLVRDDAIIATGRSDYNNQINNVMGFPYIFRGALDIRAKTINTEMKIAAAKAIADLARRPVPEEVYKAYSGRKMVFGKEYIIPVPFDPRLITVVAAAVAVAAIESGVARVKDFSIGKYKKELGSRLNPTANYMNFLAEKIHNAPLKRIVFAEGEEEEVISAALMMRDKKYGHPIIIGRVERIEVMLKKIGQDISLDGIQIMNAALSDSLEKYTDYLYKRLQRKGYLYRDCAKLVKTDKNIFAACMLACGDGDALLTGVTQSYIDSLEDIMKVISPKTNRSILGYSIMIAKDNNIIIADNCITEYPNSWELAQIATQTAEIAKNMGITPRVALLSFSTFGNSSKAKTARIREAVNILDNFSKDKEELSGMKVDFEYDGEMSVKVALDGDLRKLYKFCRLSGSANVLIMPGLNSAAISTELLQEFSSNSFIGPITNGFEKPVQILQAAATANEILKIATFACVEAINEV

SEQ ID NO: 5589 - DNA, 2277 bp, Caulobacter crescentus CB15
  CDS (1)..(2277): transl_table=11
atggacgaggatttccgcaaagccgccttggactatcaccggctgccgcggcccgggaaactggcgatcgaggccaccaagcggatggccacccagcgcgacctcgccctcgcctattctcccggcgtcgccgcgccttgcatcgccatcgccgagaaccctgagctggcgcgcgactacaccgcgcgcggcaatctggttgcggtgatctcgaacggcaccgccgtgctgggcctgggcgacatcggcccgctggcctccaagccggtgatggaaggcaaggccgtcctcttcaagaagttcgccggcatcgacgtgttcgacatcgaggtcgacgccaaggatccagaccgcttcatcgaggtggtggcggcgctggagcccaccttcggcgggatcaatctcgaggacatcaaggcccctgaatgcttcgtcatcgagcgcaagctgcgcgagcggatgaacatcccggtcttccacgacgaccagcacggcaccgccatcgtctgcgccgcggccgttcgcaacgccctgctcgtccagggcaagcagctcaaggacgtcaagctggtcacctccggcgccggcgcggcggccctggcctgcgttgatctcctggtctcgatgggcctgccggtcgagaacgtcaccctgaccgacatcaagggcgtcgtgcacgccggccgcgagccggacatgcccgacaacatggcgcgctacgcccgccagaccgacgcccgcaccctgcccgaggtgctgccgggcgccgacatcttcctgggcctgtcggccccgcgcgtcttcaagccggaatggctgccactgctggcgcccaacccgctgatcctggccatggccaatcccgagccggagatcctgccggaactggtctatgaaagccgccccgacgcgatcatggccacgggccgcagcgactacgccaaccaggtcaacaacgtcctctgcttccccttcatcttccggggcgcgctggacgtcggcgccagcgagatcaacgaggcgatgaaggtcgccgcagtcgaggcgatcgccgaactggcgcgcgccgaggcctcagaagtggtggccagcgcctatggcggcgccgcgccggtgtttggctcgcagtacatcatccccaagcccttcgacccgcgcctgatcctgcagatcgccccggccgtggccaaggcggcgatggacagcggtgtggccacccgcccgatcgccgacttcgacgcctatcaggccgagctggagctgttcgtctatcgctccggccagctgatgcgtccggtcttcgagcgggctcgcaagcagccggtcaaggtcgcctatgccgaggccgaggacgagcgcgtgctgcgcgccgtacagaccgtcgtggacgaaggcctcgcctacccggtgctggtgggccggcgcgaggtcattaccggcaagattgaagaactgggactgcgtctggccggcaaggtcgaaatcatcgatccccaggccgacaaggatttgttcgcgccgctgatcgccgactaccagcgcctggtcggacgtcggggcgtgccgccgatcgcggccgagcgccgggtcaccggccgtcgcaccgtcgcagcctccatgctcctggcgaccggctatgtcgaggccgccctggtcggcggcagcggcgactggtggcagcacatgaagtacgccctgccgatcatcccgcgccgcgacaatgtcagccgggtctatgcgatgtcgtcgctgatcctggacaaggggacgctgttcttctgcgacacccacgtcaatgtcgatccgaccgcagagcagatcgccgaatgcacccagctggcggccgaggccgttcgccgctttggcctgacgcccaaggcggccctgctgtcgcattcttcgttcggggccagcgactcgccgaccgcccgcaagatgcgcgaagccctggccctgctccgcacccaggcgccggatctggaggtcgacggcgaaatgcatgccgacgccgcactcagccagcacctgcgcgatcgcatggtcgccgacagcccgctgaagggctcggccaatctgctggtcatgccgacgctggatgcggccaatatcggcctgaccctgctcagcgccgcgacggagtccctgctcgtcggcccggtgctgctgggcatggccaagccgcttcacgtgctgatccccagcgtgacggcgcgcggtatcgtcaacctgaccgccctggcggtgaatcaggcggtgtccgagcgcgcggccagctag

SEQ ID NO: 5590 - protein, 758 aa, Caulobacter crescentus CB15
MDEDFRKAALDYHRLPRPGKLAIEATKRMATQRDLALAYSPGVAAPCIAIAENPELARDYTARGNLVAVISNGTAVLGLGDIGPLASKPVMEGKAVLFKKFAGIDVFDIEVDAKDPDRFIEVVAALEPTFGGINLEDIKAPECFVIERKLRERMNIPVFHDDQHGTAIVCAAAVRNALLVQGKQLKDVKLVTSGAGAAALACVDLLVSMGLPVENVTLTDIKGVVHAGREPDMPDNMARYARQTDARTLPEVLPGADIFLGLSAPRVFKPEWLPLLAPNPLILAMANPEPEILPELVYESRPDAIMATGRSDYANQVNNVLCFPFIFRGALDVGASEINEAMKVAAVEAIAELARAEASEVVASAYGGAAPVFGSQYIIPKPFDPRLILQIAPAVAKAAMDSGVATRPIADFDAYQAELELFVYRSGQLMRPVFERARKQPVKVAYAEAEDERVLRAVQTVVDEGLAYPVLVGRREVITGKIEELGLRLAGKVEIIDPQADKDLFAPLIADYQRLVGRRGVPPIAAERRVTGRRTVAASMLLATGYVEAALVGGSGDWWQHMKYALPIIPRRDNVSRVYAMSSLILDKGTLFFCDTHVNVDPTAEQIAECTQLAAEAVRRFGLTPKAALLSHSSFGASDSPTARKMREALALLRTQAPDLEVDGEMHADAALSQHLRDRMVADSPLKGSANLLVMPTLDAANIGLTLLSAATESLLVGPVLLGMAKPLHVLIPSVTARGIVNLTALAVNQAVSERAAS

SEQ ID NO: 5591 - DNA, 2301 bp, Caulobacter crescentus CB15
  CDS (1)..(2301): transl_table=11
atggggaacgccgacatgagcgacgcggaacgcaagaccttcaccgacgcggaggccctggccttccaccgctatccgacccccggcaagatcgccatcgtgccgaccaagccgatggccacccagcgtgacctgagcctagcctattccccgggcgtcgccgtacccgtccacgccatcgccgccgatccggacatggcttatgagtacacctccaagggcaacctggtggcggtgatctcgaacggcaccgcgatcctgggcctcggtgacctgggggccctggcctccaagccggtgatggaaggcaagagcgtcctcttcaagcgcttcggcgacgtcgactcgatcgacatcgaggtcaccaccaaggatcccgacgagatcatcacggtggtcaagaacatcggcgtcaccttcggcggcatcaatctggaagacatcaagagccccgagtgcttccgcatcgagaccgagctgcaggagctgctcgacatcccggtgttccatgacgaccagcacggcacggcgatcatctgcgccgccggcctgatcaacgcctgccacatcaccggcaagaagatcgaggacgtgaaggtcgtgctgaacggccccggcgcggccggcatcgcctcgctggagctgatcaaggccatgggcgtgcgggccgagaactgcatcgccgtcgactccaagggcgtgctctatcgcggccgcactgagggcatgaaccagtggaagagcgcccacgcggtggagaccgacaagcgcacgctcgccgaggcggtggtcggcgccgacgtgctgctggggctttcggccaagggcgccttcacgcctgagatgatcgcctcgatggcccccaatccggtcatcttcgccatggccaatcccgacccggagatcacccccgaagaggtcaagcgcgtgcgcaaggacgcgatcatgggcacggggcgcagcgactatcccaaccaggtcaacaacgtcctgggcttcccctacatcttccgcggcgccctggacgtgcgggcccgccgcgtgaaccatgagatgaagatcgcctgcgcccaggccctggccatgctggcccgcgaggacgtgcccgacgaggtcgccgccgcctatcacggtcgccagctgaagttcggccccgactacatcatcccgtcggccttcgacccgcgcctgatctggtacgttcccccgttcgtggcccaggcggcgatggacacgggcgtcgcccgcaagccgatcgccgacatggacgcctatcgcgcgggtctggcccagcgcctggatccgaccgccggcttcctgcagaagatctccggctcggtgctggccaatcccaagcggatcgtcttcgccgagggtgaagaccccagcgtcatccgcgccgcctacgcctatcagagcggcgggttcggcaaggccatcctgtgcggccgcgagaacctggtgcacgagaacatgaagctggtgggcctggatcccgacacggcgggtctggagatcatcaacgcccgcctttcggatcgcaatccggactatgtggacgcgctctatgcccgcctacagcgccagggctatctgaagcgcgacgtccagcgcctgatcaaccaggaccgcaacagcttcgccgcctcgatggtcacgctgggcgaggccgacggcatggtcacgggcgtcacccgcagcttcgaccaggcgctggaagaggtgctgcgcgtcgtcgatcccgcccccggcggccggatcatgggcatgtcggtggtgctggccaagggccggacgatcttcgtggccgacaccaatgtcaccgagctgcccgaggccgaggaactggtcgagatcgcctgcgaggccgcccgtgcggtgcgccgcctgggcttcaagccgcgcgtggccttcatgagctattcgaccttcggcaatccgatggggctgcgctcggagaaggtgcgcgaagccgtcgccatgctcgacgagatggaggtcgacttcgagtacgaaggcgagatgccgcccgagctggcgctggatccggaaaagcgggccaactatccgttcatgcgcctgaccgacagcgccaacatcctgatcatgccggcgatccacgccgcctcgatctcgaccaagctggtgcagtcgctgggcggcgccacggtgatcggcccggtgctcctgggcctctccaagtcggtgcagatcgcgccgctgtcggcctcggtgtccaagatcctgaacatggccatgatggccgcctacgatcagccggtggacgacggcgaggggtga

SEQ ID NO: 5592 - protein, 766 aa, Caulobacter crescentus CB15
MGNADMSDAERKTFTDAEALAFHRYPTPGKIAIVPTKPMATQRDLSLAYSPGVAVPVHAIAADPDMAYEYTSKGNLVAVISNGTAILGLGDLGALASKPVMEGKSVLFKRFGDVDSIDIEVTTKDPDEIITVVKNIGVTFGGINLEDIKSPECFRIETELQELLDIPVFHDDQHGTAIICAAGLINACHITGKKIEDVKVVLNGPGAAGIASLELIKAMGVRAENCIAVDSKGVLYRGRTEGMNQWKSAHAVETDKRTLAEAVVGADVLLGLSAKGAFTPEMIASMAPNPVIFAMANPDPEITPEEVKRVRKDAIMGTGRSDYPNQVNNVLGFPYIFRGALDVRARRVNHEMKIACAQALAMLAREDVPDEVAAAYHGRQLKFGPDYIIPSAFDPRLIWYVPPFVAQAAMDTGVARKPIADMDAYRAGLAQRLDPTAGFLQKISGSVLANPKRIVFAEGEDPSVIRAAYAYQSGGFGKAILCGRENLVHENMKLVGLDPDTAGLEIINARLSDRNPDYVDALYARLQRQGYLKRDVQRLINQDRNSFAASMVTLGEADGMVTGVTRSFDQALEEVLRVVDPAPGGRIMGMSVVLAKGRTIFVADTNVTELPEAEELVEIACEAARAVRRLGFKPRVAFMSYSTFGNPMGLRSEKVREAVAMLDEMEVDFEYEGEMPPELALDPEKRANYPFMRLTDSANILIMPAIHAASISTKLVQSLGGATVIGPVLLGLSKSVQIAPLSASVSKILNMAMMAAYDQPVDDGEG

SEQ ID NO: 5593 - DNA, 1392 bp, Synechocystis sp. PCC 6803
  CDS (1)..(1392): transl_table=11
atggttagcctcacccccaatccgagttatagcgtcagcctactgttggaactccccaaccacgccggaactttggccagcgttacccaggcgatcgccgatgcggggggcagttttgggcaaatttccctgattgagagtaacttaaaactcacccggcgggaaattgcggtggatgcttccagcagtgagcacgccgaaaaaattattggggcagtgaaagctctggataatgtcaaattgctgaaggtgtccgatcgcacctttgatttacaccgtcagggcaaaattagcgtggttagtcgcattcccctcacctcccaatcggatttggccatggcctataccccaggggtggggcgcatctgtcgggcgatcgccgaagatccggaaaaggtttattccctgaccattaaaagcaatacggtggcggtggtgaccgatggcagtgcggtgttggggttgggtaacctggggccggaagcggctttaccagtgatggaaggcaaggccatgttattcaaggaatttgcccaactggacgcttttcccatctgtttggatacccaggatacggaggaaattattcgcaccgtcaaggcgatcgccccggtgtttggcggcgtaaatttggaagacattgccgctccccggtgttttgaaattgaagcccggctgaaaaaagaattaaatattcctgtatttcacgatgatcagcacggcaccgccattgttaccctggccgctttgttaaatgccctcaaatttgttggtaaagccatggccgctgtccgcattgtcatcaacggcgctggggctgctgggttggcgatcgccgaattgctcaaggaatccggagccaccgatatttggatttgcgactccaagggcattgtgggcaaacatcgcaccgatttaaacagcaaaaaacagagctttgcggtggatgcggaagggactttagccgatgctatggctggagctgatgtgtttttaggggtgagtgcgccgggggtagtgaccaaggaaatggtgcaatccatggccaaggacccgattgtgtttgccatggccaaccctatccccgaaattcagccggaattaatccaagaggatgcggcggttattgccacggggcgcagtgattaccccaaccaaattaacaatgtgcttgcctttccgggggttttccggggagccattgactgtagagctagcattattaccaccaccatgtgcatcgaagcggccaaggcgatcgcctctttggtgcacagcaacaccctagatagtgagcatattattccttcggtttttgacaatcgggtcgccactaccgtagccagtgcagtgcagttggccgcccgcaatgaaggggtggccggtcaatag

SEQ ID NO: 5594 - protein, 463 aa, Synechocystis sp. PCC 6803
MVSLTPNPSYSVSLLLELPNHAGTLASVTQAIADAGGSFGQISLIESNLKLTRREIAVDASSSEHAEKIIGAVKALDNVKLLKVSDRTFDLHRQGKISVVSRIPLTSQSDLAMAYTPGVGRICRAIAEDPEKVYSLTIKSNTVAVVTDGSAVLGLGNLGPEAALPVMEGKAMLFKEFAQLDAFPICLDTQDTEEIIRTVKAIAPVFGGVNLEDIAAPRCFEIEARLKKELNIPVFHDDQHGTAIVTLAALLNALKFVGKAMAAVRIVINGAGAAGLAIAELLKESGATDIWICDSKGIVGKHRTDLNSKKQSFAVDAEGTLADAMAGADVFLGVSAPGVVTKEMVQSMAKDPIVFAMANPIPEIQPELIQEDAAVIATGRSDYPNQINNVLAFPGVFRGAIDCRASIITTTMCIEAAKAIASLVHSNTLDSEHIIPSVFDNRVATTVASAVQLAARNEGVAGQ

SEQ ID NO: 5595 - DNA, 2280 bp, Salmonella enterica subsp. enterica serovar Typhi str. CT18
  CDS (1)..(2280): transl_table=11
atggatgagcagttaaaacaaagcgcccttgatttccacgaatttccggtacccggtaaaattcaggtttctccgactaagccccttgccacccaacgcgatctggcgttggcttactcgccaggcgtggcggcgccctgcctggaaatcgaaaaagatccgctggcagcctacaaatacaccgcgcgcggcaaccttgtcgcggtcatttccaacggtacagcggtgctggggttaggcaacatcggcgcgctggccggcaagccggtcatggaaggcaaaggcgttctgtttaaaaaattcgccggcatcgatgtgtttgacattgaagtcgatgagcttgatccggacaaatttatcaatgtggtcgcagcgctggagccgacctttggcggcattaacctcgaagacattaaagcgccggaatgtttctatattgagcagaaactgcgcgagcgcatgaacatcccggttttccatgacgatcagcacggaacggcgatcatcagtacggccgccattcttaatggcctgcgagtcgtagagaaaaatatttccgacgtgcggatggtcgtctccggcgcaggggcggcggcaatcgcttgtatgaacctgctggtcgcgttggggatgcagaagcacaacatcgtggtgtgcgactctaagggcgttatttacaaaggccgtgagccgaatatggcggagaccaaagcggcctatgcggtagacgacagcggcaagcgcacgctggatgaggtcattgacggcgcggatattttcctcggctgttcaggcccgaaagtgctgactcaggagatggtgaagaaaatggcccgcgcgccaatgattctggcgctggctaacccggaaccggaaattctgccgccgctggcgaaagaagtgcgtccggacgccatcatctgtaccggtcgttccgactatccgaaccaggtgaacaacgtattgtgcttcccgtttatcttccgcggcgcactggacgtcggcgcgacggcgatcaacgaagagatgaaactggcggcggtccgtgcgattgccgagctggcgcacgccgaacagagcgaagtggtggcctcggcctatggcgatcaggacctgagctttgggccggaatacattattccgaaaccgtttgacccgcgtctgattgtcaaaatcgctccggcggtcgcgaaagcggcaatggattccggcgtggcgacgcgcccgattgctgactttgatgcctatatcgataaactgaccgagtttgtctacaaaactaacctgttcatgaagccgatcttctcgcaggcacgcaaagatccgaagcgcgtagtgctgccggaaggggaagaggcgcgcgtgctgcacgcaacccaggagttgataaccctggggctggcgaagcccatcctgatcgggcgtccgagcgtgatcgaaatgcgtatccagaaactggggttacagatcaaagcgggcgttgatttcgagatcgtgaataatgaatccgatccgcgcttcaaagagtactggagcgagtattaccagatcatgaagcgtcgcggggtaactcaggaacaggcgcagcgtgcgatgatcggcaaccatacggccattggcgcgatcatggtgcagcgtggagaagcggatgcgatgatctgcggcaccatcggcgactaccatgagcatttcagcgtcgtgaaagccgtctttggctaccgtgacggcgtgcatacggcaggggcgatgaacgccttactgctgccaagcggcaacacttttatcgccgatacttatgttaacgaagatcccacgccggaacagttggcggagatcgccgtaatggcggcggaaaccgttcgccgctttggtattgagccgaaagtcgcgctgttgtcgcactctaactttggttcctcaaattcgctgtccgccagcaaaatgcgcgaaacccttgagcgggtacgcgaacgagcgcccgatctgatgattgacggtgagatgcacggtgatgcggcgttggtggaaagtattcgtaatgaccggatgccggatagtccgctgaagggagccgccaatattctggtgatgccgaatatggaagccgcccgcattagttacaacttactccgcgtctccagttccgaaggcgtcacggtcggcccggtcctgatgggcgtgtctaaaccggtacatgtattaacgccgatcgcctctgtacgccgtatcgtgaatatggtggcgttagcggtagttgaagcgcaaaccacgccgctttaa

SEQ ID NO: 5596 - protein, 759 aa, Salmonella enterica subsp. enterica serovar Typhi str. CT18
MDEQLKQSALDFHEFPVPGKIQVSPTKPLATQRDLALAYSPGVAAPCLEIEKDPLAAYKYTARGNLVAVISNGTAVLGLGNIGALAGKPVMEGKGVLFKKFAGIDVFDIEVDELDPDKFINVVAALEPTFGGINLEDIKAPECFYIEQKLRERMNIPVFHDDQHGTAIISTAAILNGLRVVEKNISDVRMVVSGAGAAAIACMNLLVALGMQKHNIVVCDSKGVIYKGREPNMAETKAAYAVDDSGKRTLDEVIDGADIFLGCSGPKVLTQEMVKKMARAPMILALANPEPEILPPLAKEVRPDAIICTGRSDYPNQVNNVLCFPFIFRGALDVGATAINEEMKLAAVRAIAELAHAEQSEVVASAYGDQDLSFGPEYIIPKPFDPRLIVKIAPAVAKAAMDSGVATRPIADFDAYIDKLTEFVYKTNLFMKPIFSQARKDPKRVVLPEGEEARVLHATQELITLGLAKPILIGRPSVIEMRIQKLGLQIKAGVDFEIVNNESDPRFKEYWSEYYQIMKRRGVTQEQAQRAMIGNHTAIGAIMVQRGEADAMICGTIGDYHEHFSVVKAVFGYRDGVHTAGAMNALLLPSGNTFIADTYVNEDPTPEQLAEIAVMAAETVRRFGIEPKVALLSHSNFGSSNSLSASKMRETLERVRERAPDLMIDGEMHGDAALVESIRNDRMPDSPLKGAANILVMPNMEAARISYNLLRVSSSEGVTVGPVLMGVSKPVHVLTPIASVRRIVNMVALAVVEAQTTPL

SEQ ID NO: 5597 - DNA, 1392 bp, Nostoc sp. PCC 7120
  CDS (1)..(1392): transl_table=11
atggcagacttaactcctaattccagttttagtgttactctccgattacagattcccaatcgtgtgggaatgctagcatctatcactcaagcgatcgcatctagtggtggtaatctcggtcaaatcgatttaatcgagcaaacacgccaagtttctctccgtgacttaactgttgatgctgctagtactgaacacgcggaaactattgtgcaagcagtcaaagccatacctgatattaagttagtcagcgtttacgatcgcacctttaatttacatcgtggcgggaaaatcagcatcaccagccggattcctctcaagagtgtatccgacttagcaatggcttatacccctggcgtgggtcgggtttgtacggcgatcgctcaagacccatcgcaagtatacaatttaactatcaaacaaaatactgtcgccattgtcactgatggtagtgcggttttaggattgggtaatcttggcccccatgcagctttaccagtgatggaaggtaaagccatgttatttaaggaatttgctgggttggatgcctttcctatttgcctcgctacccaagatacagaagagattatccaagccgtcaaaaatattgccccggtttttggcggtgtgaatttagaggatatcgccgcaccccgttgctttgaaattgagaagagattgcgcgatgaattagatattcctgtttttcacgatgaccaacatggtacagcaattgtcaccttggcagctttatttaactccttgaaactggtgcagaagtcactggccgacatccgcattgtgattaatggtgctggtgcagctggcgtggcgatcgcccggttactacggaaagctggggcagaaaaaatctggatgtgcgactctaaaggcattatctccaccactcgcaccgacctcaatgaagaaaaacaggagtttgccgtcaaagctcagggtacactagctggtgcagtccaaggcgcagatgtatttattggtgtgagtgcgcctggagtcttaacaccagagatggtaaagtctatggctaaagatgcgattgtttttgctatggctaatcccatacccgaaattcagccagaattgattagcaaggatgtagctgttatcgccacaggtcgcagtgactaccctaaccaaattaataacgtgttagcttttcctggggtattccgtggtgcgttggattgtcgcgcgcaaacaattaccaccaccatgtacttagaagcagccagtgcgatcgcttctttggttaatccctcagacttgagtcgggaacatattattccctcagtctttgatgaacgtgtcgttaccgccgtcgctgctgctgtgcaacgtgcagcgcgagaagaggggattgcacggggttaa

SEQ ID NO: 5598 - protein, 463 aa, Nostoc sp. PCC 7120
MADLTPNSSFSVTLRLQIPNRVGMLASITQAIASSGGNLGQIDLIEQTRQVSLRDLTVDAASTEHAETIVQAVKAIPDIKLVSVYDRTFNLHRGGKISITSRIPLKSVSDLAMAYTPGVGRVCTAIAQDPSQVYNLTIKQNTVAIVTDGSAVLGLGNLGPHAALPVMEGKAMLFKEFAGLDAFPICLATQDTEEIIQAVKNIAPVFGGVNLEDIAAPRCFEIEKRLRDELDIPVFHDDQHGTAIVTLAALFNSLKLVQKSLADIRIVINGAGAAGVAIARLLRKAGAEKIWMCDSKGIISTTRTDLNEEKQEFAVKAQGTLAGAVQGADVFIGVSAPGVLTPEMVKSMAKDAIVFAMANPIPEIQPELISKDVAVIATGRSDYPNQINNVLAFPGVFRGALDCRAQTITTTMYLEAASAIASLVNPSDLSREHIIPSVFDERVVTAVAAAVQRAAREEGIARG

SEQ ID NO: 5599 - DNA, 2346 bp, Ralstonia solanacearum GMI1000
  CDS (1)..(2346): transl_table=11
atgaccacggtggatacccagcctcaacagcccgcccgcacggacgaagaactcaaggcgcaacaacgcgccgccttgcgcaaggccgcgctggagtaccacgagtttccgaccccgggcaagatttccgtgacgccgaccaagccgctgtccaaccagcgcgacctggccctggcgtactcccccggcgtcgccgcggcctgcgaagagatcgtcgccgacgtctccaactccttccgctacaccgcccgcggcaacctggtcgccgtggtgaccaacggcaccgccgtgctcggcctgggcgatatcggccccgaagccgccaagccggtcatggaaggcaaggcgggcctgttcaagaagtttgccgggatcgatgtgtttgacatcgagatcaacgaaaaagacccgcagaagctggtcgatatcgtcgcttcgctggagccgaccttcggcggcatcaacctggaagacatcaaggcgccggagtgcttcttcgtcgagcgcgagctgcgcaagcgcatgaagattcccgtcttccacgatgaccagcacggcaccgccatcgtggtgggcgcaggcatcaccaacgcgctgaaggtggtcggcaaggacatcaagcaggtcaagctggtggcctcgggcgccggcgcggccgcgctggcctgcctggacctgctggtcgacctgggcctgccgcgcgagaacatctgggtgacggacctggccggcgtggtctacgagggccgtaccgagctgatggacccggacaaggccgtcttcgcgcaaaaaaccgacaagcgcacgctggccgaggtcatcgacggcgccgacatcttcctgggcctgtccgccgccggcgtgctcaagcaggacatggtcaagcgcatggccgaccggccgatcatcttcgcgttggccaacccgaacccggaaatcatgccggagctggccaaggaagtgcgcccggacgtcatcatgggcaccggccgcaccgattacccgaaccaggtcaacaacgtcctgtgcttcccgttcatcttccgcggcgcgctggacgtgggcgcgaccaccatcacgcgcgagatggaagtcgccgccgtgcacgccgtggccgagctggcccgccaggagcagagcgacatcgttgccacggcgtacggcatccaggacctgtcgttcggaccggaatacctgattccgaagcccttcgatccgcgcctgatcgtgaagatcgcgccggcggtggcgcaggccgccatggactccggcgtggcgcagcgcccgatcgaggacatggacgcctatcgccagcacctgcagcagttcgtctaccactcgggcacgctgatgaagccgatcttctcgacggccaagaaggtgccgatggagcacaagcgcatcgtcttcgccgagggcgaagaggagcgcgtgctgcgcgccgtgcaggtcgtcgtcgatgagaagctggccaacccgatcctgatcggccgcccgggcgtgatcgcccatcgcatcgagcgcttcggcctgcgcctgcgcgagggcgtcgacttcaccatcgtcaaccccgagcacgaccagcggttccgcgagtactgggagacctactacaagctgatggcgcgcaagggcgtcacgccgcagtacgccaagctagaggtgcgccgccgctccacgctgatcggcgccgtgatgatccacaagggcgaggccgacggcatgatctgcggtacggtcagcaacaccgccgcccatctgcgctatatcgaccaggtcatcggcggcaccaactgcgtgtacgcggcgatgaacggcctggtgctgccgggccgccagatcttcctgaccgacacgcacgtcaacatcgatccgagcgccgagcaactggccgagatcaccatcatggccgctgaagagctgtgccgtttcggcatcaagccgaaggtggcgctggtctcgcactcgaatttcggctcgtccgaggcgccttctgccgccaagatgcgtgaaaccctcgccatcctgcgtgaacgtgccccgcaactggaagtggacggtgaaatgcacggcgatgccgcgctcgaccagaagctgcgcgactcgctggtgccggattccacgctgaccggcgaagccaacctgctggtgatgccgaacatcgacgccgccaacatcgcctacaacctgctgaagacggcggccggcaacaacatcgccatcggcccgatcctgctgggtgccaagcgtccggtgcacatcctgacgccgtcggccacggtgcgccgcattctgaacatgacggcactgactgtcgtggacgccgcagcacaggcgcaacgctga

SEQ ID NO: 5600 - protein, 781 aa, Ralstonia solanacearum GMI1000
MTTVDTQPQQPARTDEELKAQQRAALRKAALEYHEFPTPGKISVTPTKPLSNQRDLALAYSPGVAAACEEIVADVSNSFRYTARGNLVAVVTNGTAVLGLGDIGPEAAKPVMEGKAGLFKKFAGIDVFDIEINEKDPQKLVDIVASLEPTFGGINLEDIKAPECFFVERELRKRMKIPVFHDDQHGTAIVVGAGITNALKVVGKDIKQVKLVASGAGAAALACLDLLVDLGLPRENIWVTDLAGVVYEGRTELMDPDKAVFAQKTDKRTLAEVIDGADIFLGLSAAGVLKQDMVKRMADRPIIFALANPNPEIMPELAKEVRPDVIMGTGRTDYPNQVNNVLCFPFIFRGALDVGATTITREMEVAAVHAVAELARQEQSDIVATAYGIQDLSFGPEYLIPKPFDPRLIVKIAPAVAQAAMDSGVAQRPIEDMDAYRQHLQQFVYHSGTLMKPIFSTAKKVPMEHKRIVFAEGEEERVLRAVQVVVDEKLANPILIGRPGVIAHRIERFGLRLREGVDFTIVNPEHDQRFREYWETYYKLMARKGVTPQYAKLEVRRRSTLIGAVMIHKGEADGMICGTVSNTAAHLRYIDQVIGGTNCVYAAMNGLVLPGRQIFLTDTHVNIDPSAEQLAEITIMAAEELCRFGIKPKVALVSHSNFGSSEAPSAAKMRETLAILRERAPQLEVDGEMHGDAALDQKLRDSLVPDSTLTGEANLLVMPNIDAANIAYNLLKTAAGNNIAIGPILLGAKRPVHILTPSATVRRILNMTALTVVDAAAQAQR

SEQ ID NO: 5601 - DNA, 2292 bp, Drosophila melanogaster
  CDS (1)..(2292)
atgggtaattccagttccatttgcgccgatcgcaatgtcataacaaatttcgatgaaaatggcacgccggtttatcccaccgccaacaattcgcagagtccttcctcatatagtcgcggcaaagagcgcgagctcggctgttacacgaagagaaacagcaacagcaacaacaacaatagccatgagagagagagtcagagctgttgtagtagtcgtgtgtgtaaaaatcatacgaccacaacgacaaccacactcgaatacgaactttccaatttcgcaaaactaacgacacgaatcacaacgcaaagtgccgccgaagtggacacatcgccgcatacggatacggaaacgcatagggacagagattcgaatccgggtaatatagccttagccaccgatttggaactgcccaagggtctgccgttatcgttatcctcgcgacaccactggaatcagctgcagagcagtttgcacgcccttcaccaccagcaacagcaacaacaacagcaactacgttcatacagctccactagcgaaacaaatttggaagacaagatgagcaaacccgattcgaaactagataaatacgcgcagcgcgatcgcctgggcctttggggcactggtgacaatgaggtggtcggcagcctctccggattcacccgactcttggacaagcgctactcaaagggcctggccttcacacacgaggagcgccagcagttgggcatccatggcatgctgccctatgtggtccgtgagcccagtgagcaggtggagcactgccgcgctctgctggcgcgactggatcaggatctggacaagtacatgtacctgatcagcctatcggagcggaacgagcgtctgttctacaacgtgctcagctcagacatcgcctacatgatgccactggtgtacacgcccaccgtgggattggcctgccagcgctacagtttgatccaccagaacgccaagggcatgttcatatccatcaaggacaagggacacatctacgacgtgctaaagaactggccggaaacggatgtgcgtgccatcgttgtcacggacggcgagcgcatcctgggactgggagatctgggcgccaacggaatgggtatacccgtgggcaaactgtccctgtatacggccttggcgggcattaagccatcgcagtgcctgcccatcaccttggatgtgggcaccaataccgaatccatcctggaggatcccctgtacatcggtctgcgcgaacgcagggccactggagatctgtacgatgagttcatcgatgagttcatgcatgcctgcgttcgtcgctttggtcaaaactgcctaatccagttcgaggactttgccaacgccaatgccttcaggctgttgtccaaataccgcgactccttctgcaccttcaacgacgatattcaaggaaccgcgtcggtggccgtggctggtctgctggcctcgctaaagatcaagaagacccagctgaaggataacacgctgttgttcctgggcgccggagaagcggctcttggtattgccaacctgtgcctgatggccatgaaggtggagggtctcaccgaggaggaggccaaggcccgcatctggatggtggatagccgtggtgtcatcacccgcgatcgtccaaagggcggactcaccgaacacaagctgcactttgcccagctgcacgaacccatcgatactttggcagaggcggtgcgaaaggtgcgtcccaatgtcctgattggagcggctgcgcagggcggcgccttcaaccaggagatccttgagctgatggccgatattaatgagacgccgatcatctttgcactgtccaatccgaccagcaaggcggagtgcaccgccgaggaggcgtatacgtacaccaaggggcgctgcatcttcgccagcggttcgccttttgctcctgtgacgtacaacaacaagaagttctatccgggtcagggcaacaactcgtacattttccctggcgtggcactgggtgttctgtgtgccggcatgctgaacattcccgagcaggtattcttggtcgccgccgagcgcttggcggagctggtctccaaggacgacctggccaagggcagcttgtatccaccactcagctccattgtcagctgttcgatggccattgccgaaaggattgtggagtacgcctacaaaaacggattggccactgttcgtccagagccggtcaataagctggcgttcatcaaggcccagatgtacgatctggactatccccgatccgtgcccgccacctataagatgtag

SEQ ID NO: 5602 - protein, 763 aa, Drosophila melanogaster
MGNSSSICADRNVITNFDENGTPVYPTANNSQSPSSYSRGKERELGCYTKRNSNSNNNNSHERESQSCCSSRVCKNHTTTTTTTLEYELSNFAKLTTRITTQSAAEVDTSPHTDTETHRDRDSNPGNIALATDLELPKGLPLSLSSRHHWNQLQSSLHALHHQQQQQQQQLRSYSSTSETNLEDKMSKPDSKLDKYAQRDRLGLWGTGDNEVVGSLSGFTRLLDKRYSKGLAFTHEERQQLGIHGMLPYVVREPSEQVEHCRALLARLDQDLDKYMYLISLSERNERLFYNVLSSDIAYMMPLVYTPTVGLACQRYSLIHQNAKGMFISIKDKGHIYDVLKNWPETDVRAIVVTDGERILGLGDLGANGMGIPVGKLSLYTALAGIKPSQCLPITLDVGTNTESILEDPLYIGLRERRATGDLYDEFIDEFMHACVRRFGQNCLIQFEDFANANAFRLLSKYRDSFCTFNDDIQGTASVAVAGLLASLKIKKTQLKDNTLLFLGAGEAALGIANLCLMAMKVEGLTEEEAKARIWMVDSRGVITRDRPKGGLTEHKLHFAQLHEPIDTLAEAVRKVRPNVLIGAAAQGGAFNQEILELMADINETPIIFALSNPTSKAECTAEEAYTYTKGRCIFASGSPFAPVTYNNKKFYPGQGNNSYIFPGVALGVLCAGMLNIPEQVFLVAAERLAELVSKDDLAKGSLYPPLSSIVSCSMAIAERIVEYAYKNGLATVRPEPVNKLAFIKAQMYDLDYPRSVPATYKM

SEQ ID NO: 5603 - DNA, 2331 bp, Agrobacterium tumefaciens str. C58
  CDS (1)..(2331): transl_table=11
atgacggtggaagacatgacctctcacgataagaacaacacgcccgccaacacggcaaaggccgacatcgaggaacaggcgctctttttccaccgctacccacgccccggcaagctggaaatccaggccaccaagccactcggcaaccagcgggatctggcgcttgcctattcgccgggtgttgccgccccctgcctcgccatccatgagaacccggaaatggcagcggaatataccgcgcgcgccaatctcgtcgccgtcatctcaaacggcacggcggtgctcggcctcggcaatatcggtccgctcgcttccaagcctgttatggaaggcaaggccgtcctcttcaagaaattcgccggtatcgacgtgttcgatatcgagatcgatgcgcccggcatcaacgacatggtctccaccatcgccgcgctggaacccaccttcggcggcatcaaccttgaggatatcaaggcgccggaatgtttcgaggtggaacgccagctgcgcgaaaagatgaacatcccggtcttccacgatgaccagcacggcacggcgatcatcgtcgccgccgccgtcaccaacgcgctggaactggccggaaaatcgctctcgagcgtcaagatcgttgcgtccggtgccggtgcggcagcgcttgcctgcctcaacctgctggtcgccatgggtgcaaacaaggaaaacatctgggtccacgatatcgaaggcctcgtttatgaaggccgcaacacgctgatggacgagtggaaagaagtttacgcccagaagacagacaagcgtgtgctggcggattcgatcgacggtgccgatgtcttcctcggcctttccgccgcgggcgtgctgaagccggaactcttggagcgcatggcggaaaatccgctgattctcgcgcttgccaaccccaatcccgaaatcatgccggaggctgcccgtgccgcccgcccggatgcgatgatttgcaccggccgttcggatttcccgaaccaggtcaacaatgttctctgcttcccctacatcttccgcggcgcgctggattgcggcgcaaccacgatcaacgaggaaatgaagatggccgccgtgcaggccattgcagagcttgcccgcgaggaagtctcggaagtcgccgccagagcctatagcggcgaaacgccgatctttggcccgaactatctcattccctcgccgttcgatccgcgcctcatcctgcgcattgcacccgccgttgcccgcgctgcggcggcaagcggcgtggccacccggccgatcaccgatttcgaggcctatttcgaccagctgaaccgtttcgtctggcgctccggcttcatcatgaagccggtcttcaatgccgccaaggcggccgaaaagaagcgcatcatctttgccgaaggcgaagacgagcgcgtgctgcgcgccgcccaggtgcttttggaagaaggcaccggcgtcccgatcctcatcggtcgcccgcagatcatcgaaacgcgcctgaagcgcttcggcctgcgcatccgcccgcatgcggatttcgccgtggtcaacccggaagacgatccgcgctaccgcgaatatgtggatgattatttcgccctcgtcggtcgcgccggcatcaacccggaagccgcccgcaccatcgtgcgtaccaactccaccgtcatcggtgcgctgtcggtgaagcgtggcgaagcggatgcgctgatctgtggtctggaaggccgttatgaccgccatctgcgcgacgtgaaccagatcatcggcaagcaggaaagtgtgcgctcctttgcgggcctcagccttctcattacccagcagggcgccctgttcctgaccgataccttcgtcaacaacgacccgacgtcagaagaagtggccgagatggcgatccttgcggcgaaggaaatccgtcgtttcggcattacgccgaagatcgcgctcgccagccattccaacttcggatcgcgtgactcggaaagcgcccgcaagatgcgccgcgcactgaagatcatccagcaggcagcgccagaactggaagtggatggtgagatgcagggcggctcggcactctccgaagcgctgcgcaagcgtgccatgcccaacagcgtgctgaccggcgaggcgaaccttctggtcttcccgaacctcgatgccgccaatatcacgctcggtgtcactcgcacgctgacggaaggcctgcatgtcggcccgatcctgctcggcacggccctgcccgcccacatcctgtcgcccagcgtcacctcgcgcggcgtcgtcaacatggcggcctttgccgtggtgcaggcctcgcacccttcggtgtga

SEQ ID NO: 5604 - protein, 776 aa, Agrobacterium tumefaciens str. C58
MTVEDMTSHDKNNTPANTAKADIEEQALFFHRYPRPGKLEIQATKPLGNQRDLALAYSPGVAAPCLAIHENPEMAAEYTARANLVAVISNGTAVLGLGNIGPLASKPVMEGKAVLFKKFAGIDVFDIEIDAPGINDMVSTIAALEPTFGGINLEDIKAPECFEVERQLREKMNIPVFHDDQHGTAIIVAAAVTNALELAGKSLSSVKIVASGAGAAALACLNLLVAMGANKENIWVHDIEGLVYEGRNTLMDEWKEVYAQKTDKRVLADSIDGADVFLGLSAAGVLKPELLERMAENPLILALANPNPEIMPEAARAARPDAMICTGRSDFPNQVNNVLCFPYIFRGALDCGATTINEEMKMAAVQAIAELAREEVSEVAARAYSGETPIFGPNYLIPSPFDPRLILRIAPAVARAAAASGVATRPITDFEAYFDQLNRFVWRSGFIMKPVFNAAKAAEKKRIIFAEGEDERVLRAAQVLLEEGTGVPILIGRPQIIETRLKRFGLRIRPHADFAVVNPEDDPRYREYVDDYFALVGRAGINPEAARTIVRTNSTVIGALSVKRGEADALICGLEGRYDRHLRDVNQIIGKQESVRSFAGLSLLITQQGALFLTDTFVNNDPTSEEVAEMAILAAKEIRRFGITPKIALASHSNFGSRDSESARKMRRALKIIQQAAPELEVDGEMQGGSALSEALRKRAMPNSVLTGEANLLVFPNLDAANITLGVTRTLTEGLHVGPILLGTALPAHILSPSVTSRGVVNMAAFAVVQASHPSV

SEQ ID NO: 5605 - DNA, 2325 bp, Brucella melitensis 16M
  CDS (1)..(2325): transl_table=11
atgaccaagaaaccttcctccccttcgacgcgctctgacttcgacgaagcggcgctgttcttccatcgctatccgaaaccgggaaagctggaaattcaggcgacgaaaccgctcggcaatcagcgcgacctggcgcttgcctattcgccgggcgttgcagcgccctgcctcgccatccatgacgatcccgcgaccgcagccgaatatacggcacgcggcaatctggttgccgttgtgtccaatggcacggccgttctgggcctcggcaatatcggcgcacttgcctccaagccggtgatggaaggcaaggcagttctgttcaagaaatttgccgatatcgatgttttcgacattgaaatcgatgcgcatgagatcaaccggattgtcgatgtggtgtccgctctggaacccactttcggcggcatcaatctggaagacatcaaggcgccggagtgcttcgaggttgaggaacagctccgcgagcggatgaatattccggtcttccatgatgatcagcatggaaccgcgatcatcgtcgcctctgccgtgctcaacggtctggagcttgccggcaagaagatcgaggaggcgaagatcgtcacctccggtgcgggtgctgccgcccttgcctgcctcaatctgctcgtcaatcttggcgcgaagcgtgagaatatctgggtctgcgatatcgagggcgtggtctatgacggccgcaacacgctcatggaccgctggaaggaagtctatgcgcaaaagaccgacgcgcgcacgcttgccgacgtcatcggcggggcagacgtattcctcgggctttcggctgcgggcgttctcaagcccgaacttttgaagcagatggccgaaaagccgctgattatggcgcttgccaatccaaagccggaaatcatgccggaggaagcgcgcgccgcgcgcgcggatgccatgatctgcacgggccgttcggattttcccaatcaggtcaataatgttctctgcttcccctatattttccgcggcgcgcttgacgtcggcgcaacggtcatcaacgaggaaatgaagcttgccgcagtgcgcgccatcgcttcgcttgcccgcgaagagccttcagatgtcgccgcccgcgcctattccggcgatacgccgaccttcggcccggattatatcattccctcgccgttcgatcagcgcctcatcctgcgcattgcgcctgccgtcgccaaggcggcgatggaaaccggcgtggcaacgcgcccgatcgaggatatggaagcctatctcgatcggctcaaccggtttgtcttccgctccggccttattatgaagccggtcttcgcggctgcccgcacgcaaggtgcgcccatgcgcgtgatctatgccgatggggaagatgagcgcgtgctgcgcgcagcacaggtggtgatcgaggagcgcatcgctgcaccgatactcgtcgggcgaccgcaggtcgtggagactcgcctgcgccgttacggcctcaaaatccgccccggcaccgatttcgagcttatcaaccccgaagacgatccgcgctatcgcgactatgtcgatctttatctgtcctatacgggccgtcagggcgttacgccggaagctgcgcgcacaatcgtccgcaccaactcgaccgccattgcagcccttgccgtgatgcgcgacgaggccgacgcgatgatctgcggccttgaaggccgttttgaacgccatctgcgcgtcgttcgccagattatcggcaaggtgcccggcatccgggattattcagccctgagcctgctcatctcgcagcgcggcgcgttgttcctcaccgatacctatgtcaatgccgaacccgatgcgaacgaaattgccgaaatggcagttcttgccgcccgcgagatcagccgcttcggtatcgaaccaaaggccgcgctcgtatcgcattcaaatttcggctcaaaggaatcggcaagcgcggaaaaaatgcgccaggctgcggccattctcgcggaaaaggctccagatcttgaatccgacggtgaaatgcatggcgatgccgctctttcgcagacgcttcgtgaccgggtcttcccaaactcgcgcctcaagggcgaagccaatcttctggtattcccgaacctcgatgcagcaaacatcacacttaatgtggtcaaggccgtcacggatgcgctgcatgttggcccaattcttcttggagcaacccgtccggcccatattctgacgccttccgtcacatcgcgcggtgtcgtcaacatgacggcgctggccgtcgtcgaagccttgcaaaagaacgccagcaatcgtcggcagaactaa

SEQ ID NO: 5606 - protein, 774 aa, Brucella melitensis 16M
MTKKPSSPSTRSDFDEAALFFHRYPKPGKLEIQATKPLGNQRDLALAYSPGVAAPCLAIHDDPATAAEYTARGNLVAVVSNGTAVLGLGNIGALASKPVMEGKAVLFKKFADIDVFDIEIDAHEINRIVDVVSALEPTFGGINLEDIKAPECFEVEEQLRERMNIPVFHDDQHGTAIIVASAVLNGLELAGKKIEEAKIVTSGAGAAALACLNLLVNLGAKRENIWVCDIEGVVYDGRNTLMDRWKEVYAQKTDARTLADVIGGADVFLGLSAAGVLKPELLKQMAEKPLIMALANPKPEIMPEEARAARADAMICTGRSDFPNQVNNVLCFPYIFRGALDVGATVINEEMKLAAVRAIASLAREEPSDVAARAYSGDTPTFGPDYIIPSPFDQRLILRIAPAVAKAAMETGVATRPIEDMEAYLDRLNRFVFRSGLIMKPVFAAARTQGAPMRVIYADGEDERVLRAAQVVIEERIAAPILVGRPQVVETRLRRYGLKIRPGTDFELINPEDDPRYRDYVDLYLSYTGRQGVTPEAARTIVRTNSTAIAALAVMRDEADAMICGLEGRFERHLRVVRQIIGKVPGIRDYSALSLLISQRGALFLTDTYVNAEPDANEIAEMAVLAAREISRFGIEPKAALVSHSNFGSKESASAEKMRQAAAILAEKAPDLESDGEMHGDAALSQTLRDRVFPNSRLKGEANLLVFPNLDAANITLNVVKAVTDALHVGPILLGATRPAHILTPSVTSRGVVNMTALAVVEALQKNASNRRQN

SEQ ID NO: 5607 - DNA, 1305 bp, Pyrobaculum aerophilum str. IM2
  CDS (1)..(1305): transl_table=11
gtgacggaaaaatggtaccagctctccgtagaaatacatagaaaatacggaggtaagatatccatcacgcctaaagtccccattagatctatggacgacttcgccatatactacacccctggcattgcagaggtctcccgacagatacataaaaacccagagttggcctttgagctgacctctaggtggaatatcataggcgtcattacggacggcaccagagtgctgggccttggcaacatcggaccagaggcggcatacccagtcatggagggaaaagcgcttatttttaaatacctggggggagttgacgcagttccaataccaattagggtaaagacacaggaggagttcgtctttgtcgcaaaggcgctggagcctgctttaggcgggataaatcttgaggacatcgaatcgccgaaatgcttctacctcctggaacggctgagggaggagttgcgcatccccgtgtggcacgacgaccagcaaggcacggcgacggcgactctcgcaggcttaattaacgcgctgaagctcgtggggaagaaaattagcgacgtcacaatagcccttataggcgcaggcgcctcaaatatatacacagcgagaattctcataaaatacggcgcaaagccgggcaatctcatattagtggacagcaggggcatattacacccagagcgggatgacatagataaattgatgatagaaaacccctggaagtataaatacgccattgagactaatgcagaaaggcgcaagggagggataccggaggccatgaggggcgccgacgtggtcatcgccgcgtctagcccagggccaggcgttattaaaaaggagtgggtcgcctctatgaataaagacgccattgtattcgccttagctaatccagtgccggagatatggccgtgggaggctaaagaggcgggcgcgaaaatagtggcaacgggcagaagcgacttccccaatcaagtgaacaactccctgattttccccgcggttttcagaggagctcttgacgtaagagcgacggctataaccgacgagatgttaatcgcagccgccgaagaggttgctaaattcgccgaagagaaaggcatacacgaagagtacataatccccaaaatgacggagtgggaagtatacgtgagagaggcggcggcggtggcggccacagcatccgcccagaaggtggccagaataccaagatcatataaagaggagcttgaaattgccggcagtattattggaaaaagcattaagatgttagaagttctaatgatggagaaaattattgaataa

SEQ ID NO: 5608 - protein, 434 aa, Pyrobaculum aerophilum str. IM2
MTEKWYQLSVEIHRKYGGKISITPKVPIRSMDDFAIYYTPGIAEVSRQIHKNPELAFELTSRWNIIGVITDGTRVLGLGNIGPEAAYPVMEGKALIFKYLGGVDAVPIPIRVKTQEEFVFVAKALEPALGGINLEDIESPKCFYLLERLREELRIPVWHDDQQGTATATLAGLINALKLVGKKISDVTIALIGAGASNIYTARILIKYGAKPGNLILVDSRGILHPERDDIDKLMIENPWKYKYAIETNAERRKGGIPEAMRGADVVIAASSPGPGVIKKEWVASMNKDAIVFALANPVPEIWPWEAKEAGAKIVATGRSDFPNQVNNSLIFPAVFRGALDVRATAITDEMLIAAAEEVAKFAEEKGIHEEYIIPKMTEWEVYVREAAAVAATASAQKVARIPRSYKEELEIAGSIIGKSIKMLEVLMMEKIIE

SEQ ID NO: 5609 - DNA, 1308 bp, Pyrococcus furiosus DSM 3638
  CDS (1)..(1308): transl_table=11
atggctaggatcactgaggaacaaagaaggaagcttgctcaagatgcgttggagtatcacagaaataatttcccagggaatggaaaaattgaagtgataccaaaggttcctcttagagatttctatgatttgagcttagcatataccccaggagtagcggagccatgtaaagtaattgcaaagaagggaaactatgaagattacactataattccaaatacagttgccgtcgttacagacggatcggcaatcttgggattaggaaacataggtgttctggcaggaatgccagttatggaaggtaaatgtgttctctttaaagctctagctggaatagatgcgtttcctatcttaattgacacacaggatgtcgagaaaatcgtggaaacaataaagcttatatcaaagggatttggcgggataaacctagaagatatctccgctccaagatgcttcgaaattgaaatgaggttgaagagagagcttgatattcccgtatttcacgatgatcaacatggaactgctgtagtaactttagcgggtctaattaacgcattaaagttagtgggcaaaaaattcaacgagataaaagttgctataagtggagctggagctgctggaatcgcaatagcaaagttgctccatcatgttggggttaaagaaatattgcttgttgatagagctggaataatctatgaagggagaaaagaaaacatgaatccttacaaagaggaagtcgcaaggttcaacattcatggggttcaaggagatttggcaaaagctatggagggtgctgatgtttttattggagtaagcgtaggaggaatagtaaaaccctggatgataaagaaaatggccgatgatcccatagtgtttgcaatggcgaatccaattccagaaattatgccagaagatgcgaaaaaggctggggcaaaaatagtggccacggggaggagtgactatccaaaccaaataaacaatgtcttgggctttcctgggatatttaggggggcactagatgttagggctaccgatataactttaaatatgaacattgcagcggctgaggcaatagcatctgttgtgagcgatgaagaacttagtgaggactacataataccctctccactacatcccgacgtttatccaaaagaagccagagcagttgcagaacaagcaattagggatggtgtagctagaagaaagctatctggggagtgggtagaagagcatactaggaagctccgtgaattttatgccgcactcattgagcccttaaatgaaagaaggaaacagtacattacttaa

SEQ ID NO: 5610 - protein, 435 aa, Pyrococcus furiosus DSM 3638
MARITEEQRRKLAQDALEYHRNNFPGNGKIEVIPKVPLRDFYDLSLAYTPGVAEPCKVIAKKGNYEDYTIIPNTVAVVTDGSAILGLGNIGVLAGMPVMEGKCVLFKALAGIDAFPILIDTQDVEKIVETIKLISKGFGGINLEDISAPRCFEIEMRLKRELDIPVFHDDQHGTAVVTLAGLINALKLVGKKFNEIKVAISGAGAAGIAIAKLLHHVGVKEILLVDRAGIIYEGRKENMNPYKEEVARFNIHGVQGDLAKAMEGADVFIGVSVGGIVKPWMIKKMADDPIVFAMANPIPEIMPEDAKKAGAKIVATGRSDYPNQINNVLGFPGIFRGALDVRATDITLNMNIAAAEAIASVVSDEELSEDYIIPSPLHPDVYPKEARAVAEQAIRDGVARRKLSGEWVEEHTRKLREFYAALIEPLNERRKQYIT

SEQ ID NO: 5611 - DNA, 1179 bp, Corynebacterium glutamicum ATCC 13032
  CDS (1)..(1179): transl_table=11
atgaccatcgacctgcagcgttccacccaaaacctcacccatgaggaaatcttcgaggcacacgagggcggaaagctctccattagttccactcgtccgctccgcgacatgcgcgatctttcccttgcttacacccctggtgttgctcaggtttgtgaagcaatcaaggaagatccagaggttgcgcgcacccacacgggcattggaaacaccgtcgcggttatttccgacggcaccgctgttcttggccttggcgatatcggacctcaggcctcccttcccgtcatggagggcaaggctcagctgtttagctctttcgctggcctgaaggctatccctatcgttttggacgttcacgatgttgacgctttggttgagaccatcgcagccatcgcgccttctttcggtgctatcaacttggaggacatctccgctcctcgttgcttcgaggtggagcgccgcctcatcgagcgtctcgatattccagttatgcacgatgaccagcacggcaccgctgtggttatcctcgctgcgctgcgcaactccctgaagctgctggatcgcaagatcgaagacctcaagattgttatttccggcgcaggcgcagcgggcgttgcagctgtagatatgctgaccaacgctggagcaaccgacatcgtggttcttgattcccgaggcatcatccacgacagccgtgaggatctttccccagttaaggctgctcttgcagagaagaccaaccctcgtggcatcagcggtggcatcaatgaggctttcaccggcgcggacctgttcattggcgtgtccggcggcaacatcggcgaggacgctctcaaactcatggccccggagccaatcctgttcaccctggcgaacccaaccccagagatcgatcctgagctgtctcagaagtacggcgccatcgtcgcgaccggccgctctgacctgcctaaccagatcaacaacgtgctcgcgttcccaggaattttcgccggcgctctcgcagccaaggctaagaagatcacccccgagatgaagctcgccgctgcagaggcaatcgccgacatcgcagctgaggacctcgaggtcggccgcatcgtgcctaccgccctggatccccgcgtcgccccagcagtcaaggcagctgtccaggccgtcgccgaagcgcaaaacgcttaa

SEQ ID NO: 5612 - protein, 392 aa, Corynebacterium glutamicum ATCC 13032
MTIDLQRSTQNLTHEEIFEAHEGGKLSISSTRPLRDMRDLSLAYTPGVAQVCEAIKEDPEVARTHTGIGNTVAVISDGTAVLGLGDIGPQASLPVMEGKAQLFSSFAGLKAIPIVLDVHDVDALVETIAAIAPSFGAINLEDISAPRCFEVERRLIERLDIPVMHDDQHGTAVVILAALRNSLKLLDRKIEDLKIVISGAGAAGVAAVDMLTNAGATDIVVLDSRGIIHDSREDLSPVKAALAEKTNPRGISGGINEAFTGADLFIGVSGGNIGEDALKLMAPEPILFTLANPTPEIDPELSQKYGAIVATGRSDLPNQINNVLAFPGIFAGALAAKAKKITPEMKLAAAEAIADIAAEDLEVGRIVPTALDPRVAPAVKAAVQAVAEAQNA

SEQ ID NO: 5613 - DNA, 1173 bp, Methanosarcina acetivorans C2A
  CDS (1)..(1173): transl_table=11
atgcacaggagacttgggggcgtacttgaagttgaaagcaaggtccgcctccgtacaatccacgacctcagtgttgcctatacgcccggggtcgctgagccatgccggaaaataaaggagaatcccagtcttgtttacctttacactatcaagaaaaatacggtagctgttgtaacggacgggtcagcagtgctcgggcttggaaacataggtccgtgtgcagctctgccggtaatggaaggaaaggcgatcattttcaaggaatttgccggcatagacgcttttccgatctgtctcaacactcaggacaccgaagaagtgataaaagcggtaaaatacctggctccggctttcgggggtatcaacctcgaagatatcagtgccccccgctgtttcgaaatcgagagtcgcctgcgtgaagagcttgacattcctgtaatccatgacgaccagcacggggcagccattgtcgtatttgccgggctcctgaacgctcttaaaatagtcaaaaaggagcttggagagctgaaaatacttattacaggccttggagctgcaggggttgctattttcaggttcctggtccgagcaggcgcagatcctgcaaaaatccttacctgcgacagccagggaattgtatatgaaggacgggaaaaggacatgaaccccataaaagcggaaattgccacgcttacgaaccccggaaaactgaaaggcggactcaaagaagccttccccggcactgacctctttatcggagtttcagtcggagggatcgtaaccgaggagatgatcagctcgatggccaacgacgccattgtaatggcaatggcaaaccccactcctgaaatcatgcccgatgctgcaaaaagggcgggggcaagaattgttgctaccggcaggtcggactttccaaaccagctcaataactgcctgagtttccccggagtcttcaaaggggctctcgggacctgtgccaggaagataacccctgaaatggaaatggcagcagcccatgcccttgcaaatgttgtgtctgtcggtgagctctcggaagactacataatcccggaaccccttgataagcatgtggtgcctgcagttgcaaaagccgttgccaatgcttcacttgaaagctgtgctgcaaggagaagccttgaagacgaactttga

SEQ ID NO: 5614 - protein, 390 aa, Methanosarcina acetivorans C2A
MHRRLGGVLEVESKVRLRTIHDLSVAYTPGVAEPCRKIKENPSLVYLYTIKKNTVAVVTDGSAVLGLGNIGPCAALPVMEGKAIIFKEFAGIDAFPICLNTQDTEEVIKAVKYLAPAFGGINLEDISAPRCFEIESRLREELDIPVIHDDQHGAAIVVFAGLLNALKIVKKELGELKILITGLGAAGVAIFRFLVRAGADPAKILTCDSQGIVYEGREKDMNPIKAEIATLTNPGKLKGGLKEAFPGTDLFIGVSVGGIVTEEMISSMANDAIVMAMANPTPEIMPDAAKRAGARIVATGRSDFPNQLNNCLSFPGVFKGALGTCARKITPEMEMAAAHALANVVSVGELSEDYIIPEPLDKHVVPAVAKAVANASLESCAARRSLEDEL

SEQ ID NO: 5615 - DNA, 1185 bp, Thermoanaerobacter tengcongensis MB4
  CDS (1)..(1185): transl_table=11
atggatcttaaaaaagaagcattaaaacttcatagagaaaataaagggaaaatagaagttgtaagtaaagtacctgtaaaaaatgaggaagacctttctttagcttatactccttatgtagcagagccgtgtaaagaaattgaaaaggataaagacctggtctatgaatatactgtgaaaggacacatggtagcagtagttacagatggttctgcggtgctagggcttggcaatattggaccttacgcggcgctccctgtcatggaagggaaagcagttttgtttaaggaatttggcggtattgatgctattccaatatgccttgcgacgcaagatgtagatgaaatcataagaacagtgctaaatatcgctcctacttttggaggaattaaccttgaggatatttctgctcctcgttgttttgaaatagagaaaagactcgatgaaatgctggatatacctgtatttcacgacgatcaacatgggacagctatagtgactttcgcagctttagtaaatgccttaaaaattgtaaaaaagtctctttatgaaattgttgcggtagtgaatggagctggagcggcaggtgttgctatttctaaatttttagttaatgctggggtaaaagatgtaatagtttgcgacagaagtggcatcatatatgaaggaagaaaagacctggattcttcaaaacaaaagattgctaaaattaccaataaaaagaaaattaaagggacattgaaggaggctttagaaggtgctgatgttttcataggagtatcaggacctaatctcttgacaaaggaaatggtaaaaaagatggctaaaaaacctattgtctttgcactggctaatccagttcccgaaatacaccctgaagaggcaaaagaagcgggagcttatgtggtggggacgggcaggtctgactttcctaaccaggtcaataatgtgctggcttttccaggagtttttaaaggtgctttgagggtaagggcgactactataaacgaaaggatgaaacttgcagcagcgtatgctatagctaatactatctcagaagaggaactttcgagtgaatacatactaccgaagccttttgataaaagggtagctgagaatgtggcttatgctgttgcaaaagaagcaattaatacaggtgtttctagaattactaaatttgattag

SEQ ID NO: 5616 - protein, 394 aa, Thermoanaerobacter tengcongensis MB4
MDLKKEALKLHRENKGKIEVVSKVPVKNEEDLSLAYTPYVAEPCKEIEKDKDLVYEYTVKGHMVAVVTDGSAVLGLGNIGPYAALPVMEGKAVLFKEFGGIDAIPICLATQDVDEIIRTVLNIAPTFGGINLEDISAPRCFEIEKRLDEMLDIPVFHDDQHGTAIVTFAALVNALKIVKKSLYEIVAVVNGAGAAGVAISKFLVNAGVKDVIVCDRSGIIYEGRKDLDSSKQKIAKITNKKKIKGTLKEALEGADVFIGVSGPNLLTKEMVKKMAKKPIVFALANPVPEIHPEEAKEAGAYVVGTGRSDFPNQVNNVLAFPGVFKGALRVRATTINERMKLAAAYAIANTISEEELSSEYILPKPFDKRVAENVAYAVAKEAINTGVSRITKFD

SEQ ID NO: 5617 - DNA, 1416 bp, Streptomyces coelicolor A3(2)
  CDS (1)..(1416): transl_table=11
atggcaacggcgcccagcgtctcctactcgatgacggtccgactggaggtgcccgccggcggaaccgccgtctcgcagctcaccacggcggtggagtccgccggcggctcggtcaccggcctcgacgtcacggcctcgggccacgacaagctccgcatcgacgtcaccatcgcggccggctcgaccgcccacgccgacgagatcgtggagcagctgcggggcatcgagggcgtcagcctcggcaaggtctcggaccgtaccttcctcatgcacctcggcggcaagatcgagatgcagtccaagcaccccatccgcaaccgcgacgacctgtccatggtctacacgcccggcgtggcgcgggtctgcatggcgatcgccgagaaccccgaggacgcccgccgcctcaccatcaagcgcaactccgtcgcggtcgtgaccgacggctccgccgtgctgggcctgggcaacatcggcccgaaggccgcgctgccggtgatggagggcaaagcggccctgttcaagcggttcgccgggatcgacgcctggccgatctgcctggacacccaggacaccgacgcgatcgtcgagatcgtcaaggccatcgccccgggcttcgccggcatcaacctggaggacatctcggcgccccgctgcttcgagatcgaggcccggctgcgcgaggccctggacatccccgtattccacgacgaccagcacggcaccgccatcgtcgtcctcgccgcgctgaccaacgccctgcgcgtggtgggcaagggcatcgagaacgtacgggtcgtcatgtccggcgccggcgcggccggtacggccatcctcaagctgctgctcgccgccggggtcaagaacgccgtcgtcgccgacatccacggcgtcgtgcacacgggccgggcggacctggtggacgccgcgcccgagtcggccctgcgctggatcgccgacaacaccaaccccgagggcctcaccggcaccctcaaggaagccgtgcacggcgccgacgtcttcatcggcgtctccgcacccaacgtcctggacggcgaggacgtggccgccatggccgacggcgcgatcgtgttcgcgctcgcgaaccccgaccccgaggtggacccggcgatcgcccgggagacggccgcggtcgtcgccaccggccgctcggacttcccgaaccagatcaacaacgtgctggtcttcccgggcgtcttccgcggcctgctggacgcccagtcccgcaccgtcaacaccgagatgatgcttgcggccgcacacgccctcgcgaacgtggtgaccgaggacgagatcaacccgaactacatcatccccagcgtcttcaacgacaaggtcgccggtgccgtcgcgggcgccgtacgggacgcggcgaaggccgccggagtggtggcgtag

SEQ ID NO: 5618 - protein, 471 aa, Streptomyces coelicolor A3(2)
MATAPSVSYSMTVRLEVPAGGTAVSQLTTAVESAGGSVTGLDVTASGHDKLRIDVTIAAGSTAHADEIVEQLRGIEGVSLGKVSDRTFLMHLGGKIEMQSKHPIRNRDDLSMVYTPGVARVCMAIAENPEDARRLTIKRNSVAVVTDGSAVLGLGNIGPKAALPVMEGKAALFKRFAGIDAWPICLDTQDTDAIVEIVKAIAPGFAGINLEDISAPRCFEIEARLREALDIPVFHDDQHGTAIVVLAALTNALRVVGKGIENVRVVMSGAGAAGTAILKLLLAAGVKNAVVADIHGVVHTGRADLVDAAPESALRWIADNTNPEGLTGTLKEAVHGADVFIGVSAPNVLDGEDVAAMADGAIVFALANPDPEVDPAIARETAAVVATGRSDFPNQINNVLVFPGVFRGLLDAQSRTVNTEMMLAAAHALANVVTEDEINPNYIIPSVFNDKVAGAVAGAVRDAAKAAGVVA

SEQ ID NO: 5619 - DNA, 1230 bp, Streptomyces coelicolor A3(2)
  CDS (1)..(1230): transl_table=11
gtggcagcggagatcgtcaatcctcgcagcgacagcgaagccggtgcggagcaggaggcgggcgccgagccgctcgactccttcgaccccgcgttcgcgctgcaccgcggcggcaagatggccgtgcaggccaccgtgccgatccgcgacaaggaagacctgtccctggcgtacacgcccggcgtcgcgaaagtgtgcagcgcgatcgccgagcagcccgacctcgtccacgactacacctggaagtcgtcggtcgtcgcggtcgtgacggacggcacggcggtgctggggctcggtgacatcgggcccgaggcgtccctcccggtgatggagggcaaggccatcctcttcaagcagttcggcggcgtggacgcggtcccgatcgccctgaactgcacggacgccgacgagatcgtcgagaccgtggtccggctcgcgccctccttcggcggcgtcaacctggaggacatctcggcgccgcggtgcttcgagatcgagcgcaagctccaggagcgcctggacatcccggtcttccacgacgaccagcacggcacggccgtcgtgacgctggccgccctgcggaacgcggcgcggctgagcgggcggacgctgggtgagctgcgggcggtgatctcgggcgcgggtgcggccggggtcgccatcgccaagatgctggtggaggccggcatcggggacgtcgcggtcgccgaccgcaagggtgtcgtttcggccgaccgggaggacctgaccccggtcaagcaggagttggcctccttcaccaacaaggccgggctctccggccccctggaggcggcgctcgcgggtgccgacgtcttcatcggcgtctccggcggtacggtgcccgagccggcggtggcctcgatggccgagggtgccttcgtcttcgcgatggccaacccgaacccggaggtgcatccggaggtcgcccacaagtacgcggcggtcgtcgcgacggggcgctcggacttcccgaaccagatcaacaacgtgctggcgttcccgggcatcttcgcgggcgctctccaggtgcgggcgtcgcggatcaccgagggcatgaagctggcggcggccgaggcgctggcctccgtggtgggggacgaccttgccgcggactatgtcattccgtccccgttcgacgagcgggtcgcgccggccgtgacggcggcggtggccgcggcggcccgggcggagggggttgcgcgccggtga

SEQ ID NO: 5620 - protein, 409 aa, Streptomyces coelicolor A3(2)
MAAEIVNPRSDSEAGAEQEAGAEPLDSFDPAFALHRGGKMAVQATVPIRDKEDLSLAYTPGVAKVCSAIAEQPDLVHDYTWKSSVVAVVTDGTAVLGLGDIGPEASLPVMEGKAILFKQFGGVDAVPIALNCTDADEIVETVVRLAPSFGGVNLEDISAPRCFEIERKLQERLDIPVFHDDQHGTAVVTLAALRNAARLSGRTLGELRAVISGAGAAGVAIAKMLVEAGIGDVAVADRKGVVSADREDLTPVKQELASFTNKAGLSGPLEAALAGADVFIGVSGGTVPEPAVASMAEGAFVFAMANPNPEVHPEVAHKYAAVVATGRSDFPNQINNVLAFPGIFAGALQVRASRITEGMKLAAAEALASVVGDDLAADYVIPSPFDERVAPAVTAAVAAAARAEGVARR

SEQ ID NO: 5621 - DNA, 1854 bp, Drosophila melanogaster
  CDS (1)..(1854)
atgttctcacgacccagcttatgtggaactgtgggcaaattgtgtcgatgcggcacttcagcaacaggaaagactgctgtggcagcagcaacagttcccaccgctcgacactatcatgaggtggtgggcgatatcatctgcccgtctcaggtgcgcggcatagatcacatccgtgatccgcgactcaacaagggccttgcctttacactggaggagcgccagactctgggcatccatgggctgcagccagcgcgcttcaagacgcaagaggagcagctgcagctatgcaagatcgccgtaaaccgctacacggagccgctgaacaagtatctctatctgagcgatctgtacgatcgcaatgagcgtctgttcttccgcttcctatcggagaacatcgaggatctgatgcccattgtgtacacgccgacggtgggcttggcctgccagcgctttggcctgatctaccgacgtcctcatggtctgttcatcacctacaacgatcgaggacacatctttgatgtgatgaagaactggccggagccgaatgtgcgtgccatctgtgtgacggatggtgagcgcatcctgggactgggagatttgggcgcctgcggcatgggcattcccgtgggcaagctggccttgtacacggctctggccggaatcaagccccatcagtgcctgcccattgtggtggatgtgggcaccaacaacatcgatctgctggaggatcccctgtacgtgggtctgcgtcagaagcgagtggttggtcgggagtacgacgagttcattgacgagtttatggaggccgtggtgcagcgctatggccagaacactctgatccagtttgaggactttggcaaccacaatgcatttaggttcctggacaaataccgcaacacctattgcactttcaacgacgacatccagggaaccgcctccgtggccgttgctgggctctatgcctccaagcgtattacgggtaagtccttcaaggactacaccttcctgtttgcaggagccggtgaggccgccatcggcatcgccgatctcacggtcaaggccatggtgcaggatggtgtgcccatcgaggaggcctacaacagaatttacatggtcgatatcgatggtctgctgaccaagagccgcaaggtgggcaacttggatggccacaaaatccactacgccaaggacatcaatccgatgtcagatctcgccgagattgtctccaccatcaaacccagtgtgcttattggtgcctcggctgctgccggcattttcacaccggaaatcctgcgcaccatggcggataacaatgagaggcccgtggtgttcgccttgtccaatcccaccagcaaggcagaatgcactgccgaagatgcttacaagcacacggatgctcgcgtgatcttctcgtcgggctctcccttcccaccggtccagatcggtgacaagaccttctacccgggccagggcaacaatgcctacatcttcccaggcgttggcttgggcgtgatctgcacgggtactcaccacatacccgacgaaatgttcctcatcgccgcccaggagttggccaacttcgtggagcccagcgatattgagcgcggatcgctgtatcctccgctgtcgagcatccgcaacgtgtccatgaacattgccgttggcgtgaccaaatgtgcctacgatagaggcttggcatctacctaccctgagccacaggacaagcgcaagtggctggagaatcagctgtacaacttcaactacgagagctcgatgcccgcttcctgggtttggccgcggatgccctacattaagactcgcgaagaaagcccgctcattgccgccatcaaataa

SEQ ID NO: 5622 - protein, 617 aa, Drosophila melanogaster
MFSRPSLCGTVGKLCRCGTSATGKTAVAAATVPTARHYHEVVGDIICPSQVRGIDHIRDPRLNKGLAFTLEERQTLGIHGLQPARFKTQEEQLQLCKIAVNRYTEPLNKYLYLSDLYDRNERLFFRFLSENIEDLMPIVYTPTVGLACQRFGLIYRRPHGLFITYNDRGHIFDVMKNWPEPNVRAICVTDGERILGLGDLGACGMGIPVGKLALYTALAGIKPHQCLPIVVDVGTNNIDLLEDPLYVGLRQKRVVGREYDEFIDEFMEAVVQRYGQNTLIQFEDFGNHNAFRFLDKYRNTYCTFNDDIQGTASVAVAGLYASKRITGKSFKDYTFLFAGAGEAAIGIADLTVKAMVQDGVPIEEAYNRIYMVDIDGLLTKSRKVGNLDGHKIHYAKDINPMSDLAEIVSTIKPSVLIGASAAAGIFTPEILRTMADNNERPVVFALSNPTSKAECTAEDAYKHTDARVIFSSGSPFPPVQIGDKTFYPGQGNNAYIFPGVGLGVICTGTHHIPDEMFLIAAQELANFVEPSDIERGSLYPPLSSIRNVSMNIAVGVTKCAYDRGLASTYPEPQDKRKWLENQLYNFNYESSMPASWVWPRMPYIKTREESPLIAAIK

SEQ ID NO: 5623 - DNA, 1389 bp, Thermosynechococcus elongatus BP-1
  CDS (1)..(1389): transl_table=11
atggtgaaactgacgccaacccctgcctacagtctgaccctgcgattagagacctccttggatccaacggaattgggaacggttcttcagatcattggcgggcaacaggggcaagtgggttccatcaggctccttgagaaaacggccaatagaatcctgcgggaactggtggtggtggctgccagccaggagcatgggcaggctattgtcaatgctgtgaaatctgacggccaagccacagtgctagaggtgagcgatcgcaccttccgcctccatgagggcggcaaaatcaccattaagagcaagcatccgctgcaagaatacgacgatctggcgatggcctatacgccgggtgtgggtcgggtatcccaggcgatcgctgacgatccagacttggttcacaaactcaccattaaaagccataccgttgccattgtcagtgacggtagcgctgtgttgggcttgggcaatatcggcccagaggctgccctaccggtgatggagggcaaagccatgctctttcaagaatttgctggcttggacgcctttcccatctgtttggccacccaagaggtggatgaaatcgttgccaccgtgaagcggattgcccctgtctttggtggcatcaacctagaggatattagtgccccccgctgctttgacatcgaagctcgcctgcaggcggaactggatatccctgtgtttcacgacgatcagcacggcacggccattgtcacccttgcggcccttaaaaatgccctgcaattcgtgggtaaatccttagaaacggtgcgcattgtgattaatggcgcaggggcggctgggattgccgtggcacgactcctgcgcaaagcgggggccaaagacttaattttatgtaatcgccgcggcattctctcactgcagacagacctaactcccgctcaaaaggaatttgccgttacccaaacgggaacccttgccgatgcccttggggatgccgatgtctttattggcctgagcgcccctggtgtcctcacagtggaaatggtacagcgcatggccaaagaagcgattgtttttgccatggccaatccggttccggaaatccaaccagaactcatctataaccatgtggcggtggtcgccactggccgcagtgactaccccaaccaaatcaacaatgtgctggcctttccgggggtgtttaagggtacccttgcctgtcgagcaccacgaatgaccgaggaaatgttcctcgcggcagcagaagcgatcgcgggcttggtgagtccctcggaacgccactcagcctatattgttccctcggtgtttgacccccgggtggcaccagcggtggccaaggcagtggaggactgcgcgcgatcgctggggttagcccgtgcctag

SEQ ID NO: 5624 - protein, 462 aa, Thermosynechococcus elongatus BP-1
MVKLTPTPAYSLTLRLETSLDPTELGTVLQIIGGQQGQVGSIRLLEKTANRILRELVVVAASQEHGQAIVNAVKSDGQATVLEVSDRTFRLHEGGKITIKSKHPLQEYDDLAMAYTPGVGRVSQAIADDPDLVHKLTIKSHTVAIVSDGSAVLGLGNIGPEAALPVMEGKAMLFQEFAGLDAFPICLATQEVDEIVATVKRIAPVFGGINLEDISAPRCFDIEARLQAELDIPVFHDDQHGTAIVTLAALKNALQFVGKSLETVRIVINGAGAAGIAVARLLRKAGAKDLILCNRRGILSLQTDLTPAQKEFAVTQTGTLADALGDADVFIGLSAPGVLTVEMVQRMAKEAIVFAMANPVPEIQPELIYNHVAVVATGRSDYPNQINNVLAFPGVFKGTLACRAPRMTEEMFLAAAEAIAGLVSPSERHSAYIVPSVFDPRVAPAVAKAVEDCARSLGLARA

SEQ ID NO: 5625 - DNA, 1236 bp, Oceanobacillus iheyensis HTE831
  CDS (1)..(1236): transl_table=11
atggcaaacttaagagatgaagctttgcatttacataaagtaaagcaaggtaaattagaaataaatacaaaggttcccgtaaaagatgcaaaggatttaagtttagcttattctcctggtgtagcagaaccatgtaaagaaatttatgaccgtaaagaaacagtatatgactatacgatgaaaggtaacatggttgcggtagtgagtgacggatcagcggtattgggattagggaatatcggacctgaagctgcactaccggttatggaagggaaagcagtattatttaaaggttttgctggagtagatgcttttccaatttgtgtagatacacacgatgtagagcaaatagttcaaactgttaaattactagaaccgaatttcgggggagtaaatttagaagatattgcagcaccaaactgttttattattgaagatagattaaagagtgagacaaatattcctatttttcacgatgatcaacatggaacagctattgttacagtagctggattaattaatgcattaaaactagtaggaaagaaattctctgatattaaagttgtagcgaatggagcaggtgcagctggtattgcaattattcgtctattacaaagcttcggtgtacgagatatgatcatgtgcgactctaaaggtgcaatatatgaaggacggccatacggtatgaatactgtaaaagacagtgttgctaagtataccaacgccaataaggttgaaggtagtctttcagatgtgctagaaggtgcagatgtatttattggtgtttctgttggcggtgctttaacaaaagatatggtaagaagcatgaatgatgacgcgataatttttgcaatggcaaatccagatccagaaatccttccagaggatgcgaaagaagcaggagctagagtgattggaacaggacgatctgattttgccaatcaagttaataatgttctagcttttcctggtattttccgcggagcattggatgttagagcgactagaataaatgaagaaatgaaagtagcagccgctgaagggatagctacgcttatttccgatgatgaattacacgatgattatgttattccgtcaccgtttgatgaaagagtagcaccattagtagcttctcatgttgcaaaagcagcaatgagtactggagtcgctagaatgaatgtagatcctgaagaagtagcagaaaagacaaggaaattaacacagcaggaaaaataa

SEQ ID NO: 5626 - protein, 411 aa, Oceanobacillus iheyensis HTE831
MANLRDEALHLHKVKQGKLEINTKVPVKDAKDLSLAYSPGVAEPCKEIYDRKETVYDYTMKGNMVAVVSDGSAVLGLGNIGPEAALPVMEGKAVLFKGFAGVDAFPICVDTHDVEQIVQTVKLLEPNFGGVNLEDIAAPNCFIIEDRLKSETNIPIFHDDQHGTAIVTVAGLINALKLVGKKFSDIKVVANGAGAAGIAIIRLLQSFGVRDMIMCDSKGAIYEGRPYGMNTVKDSVAKYTNANKVEGSLSDVLEGADVFIGVSVGGALTKDMVRSMNDDAIIFAMANPDPEILPEDAKEAGARVIGTGRSDFANQVNNVLAFPGIFRGALDVRATRINEEMKVAAAEGIATLISDDELHDDYVIPSPFDERVAPLVASHVAKAAMSTGVARMNVDPEEVAEKTRKLTQQEK

SEQ ID NO: 5627 - DNA, 2280 bp, Shigella flexneri 2a str. 301
  CDS (1)..(2280): transl_table=11
atggatgaccagttaaaacaaagtgcacttgatttccatgaatttccagttccagggaaaatccaggtttctccaaccaagcctctggcaacgcagcgcgatctggcgctggcctactcaccaggcgttgccgcaccttgtcttgaaatcgaaaaagacccgctaaaagcctacaaatataccgcgcgcggtaacctggttgcggtgatctctaacggtacggcggtgctggggttaggcaacattggcgcgctggcaggcaaaccggtgatggaaggcaagggcgttctatttaagaaattcgctgggattgatgtatttgacattgaagttgatgaactcgacccggacaaatttattgaagtcgtcgccgcgctcgaaccgaccttcggcggcatcaacctcgaagacattaaagcgccagaatgtttctatattgaacagaaactgcgcgagcggatgaatattccggtattccacgacgatcagcacggcacggcaatcatcagcactgccgccatcctcaacggcttgcgcgtggtggagaaaaacatctccgacgtgcggatggtggtttccggcgcgggtgccgcagcaatcgcctgtatgaacctgctggtagcgctggggctgcaaaaacataacatcgtggtttgcgattcaaaaggcgttatctatcagggccgtgagccaaatatggcggaaaccaaagccgcatatgcggtggtggatgacggcaaacgtaccctcgatgatgtgattgaaggtgcggatattttcctgggctgttccggcccgaaagtgctgacccaggaaatggtgaagaaaatggctcgggcaccaatgatcctggcgctggcgaacccggaaccggaaattctgccgccgctggcgaaagaagtgcgtccggatgccatcatctgtaccggccgttccgactacccgaaccaggtgaacaacgttctttgcttcccgttcatcttccgtggcgcgctggacgttggcgcaaccgccatcaacgaagagatgaaactggcggcggtacgcgcgattgcagaactggcccatgcagaacagagtgaagtggtggcttcagcgtatggcgttcaggatctgagctttggtccggaatacatcattccaaaaccgtttgatccgcgcttgatcgttaagatcgctcctgcggtcgcaaaagcggcgatggagtcgggcgtggcgacgcgtccgattgctgatttcgacgtctacatcgacaagctgactgagttcgtttacaaaaccaacctgtttatgaagccgattttctcccaggctcgcaaagcgccgaagcgcgtagttctgccggaaggggaagaggcgcgcgttctgcatgcgactcaggaactggtaacgctgggactggcgaaaccgatccttatcggtcgtccgaacgtgatcgaaatgcgcattcagaaactgggcttgcagatcaaagcgggcgttgattttgaaatcgtcaataacgaatccgatccgcgctttaaagagtactggaccgaatacttccagatcatgaagcgtcgcggtgtcactcaggaacaggcgcagcgtgcgctgatcagtaacccgacagtgatcggcgcgatcatggttcagcgtggggaagccgatgcaatgatctgcggtacggtgggcgattatcatgaacattttagtgtggtgaaaaatgtctttggttatcgcgatggcgttcacaccgcaggtgcaatgaatgcgctgctgctgccgagtggtaacacctttattgccgatacctacgtcaatgacgaaccagacgcagaagagctggcggagatcaccttgatggcggcagaaactgtccgtcgttttggtattgagccgcgcgttgctctgttgtcgcactccaactttggttcttctgactgcccgtcgtcgagcaaaatgcgtcaggcgctggaactggtcagggatcgtgcgccagatctgatgattgatggtgaaatgcacggcgatgcagcgctggtggaagcgattcgcaacgaccgtatgccggacagccctttgaaaggttctgccaatattctggtgatgccgaacatggaagctgcccgcattagttacaacttactgcgcgtttccagctcggaaggtgtgactgtcggtccggtgctgatgggcgtggcgaaaccggttcacgtgttaacgccgatcgcatcggtgcgtcgtatcgtcaatatggtggcgctggccgtggttgaagcgcaaacccaaccgctgtaa

SEQ ID NO: 5628 - protein, 759 aa, Shigella flexneri 2a str. 301
MDDQLKQSALDFHEFPVPGKIQVSPTKPLATQRDLALAYSPGVAAPCLEIEKDPLKAYKYTARGNLVAVISNGTAVLGLGNIGALAGKPVMEGKGVLFKKFAGIDVFDIEVDELDPDKFIEVVAALEPTFGGINLEDIKAPECFYIEQKLRERMNIPVFHDDQHGTAIISTAAILNGLRVVEKNISDVRMVVSGAGAAAIACMNLLVALGLQKHNIVVCDSKGVIYQGREPNMAETKAAYAVVDDGKRTLDDVIEGADIFLGCSGPKVLTQEMVKKMARAPMILALANPEPEILPPLAKEVRPDAIICTGRSDYPNQVNNVLCFPFIFRGALDVGATAINEEMKLAAVRAIAELAHAEQSEVVASAYGVQDLSFGPEYIIPKPFDPRLIVKIAPAVAKAAMESGVATRPIADFDVYIDKLTEFVYKTNLFMKPIFSQARKAPKRVVLPEGEEARVLHATQELVTLGLAKPILIGRPNVIEMRIQKLGLQIKAGVDFEIVNNESDPRFKEYWTEYFQIMKRRGVTQEQAQRALISNPTVIGAIMVQRGEADAMICGTVGDYHEHFSVVKNVFGYRDGVHTAGAMNALLLPSGNTFIADTYVNDEPDAEELAEITLMAAETVRRFGIEPRVALLSHSNFGSSDCPSSSKMRQALELVRDRAPDLMIDGEMHGDAALVEAIRNDRMPDSPLKGSANILVMPNMEAARISYNLLRVSSSEGVTVGPVLMGVAKPVHVLTPIASVRRIVNMVALAVVEAQTQPL

SEQ ID NO: 5629 - DNA, 1245 bp, Shewanella oneidensis MR-1
  CDS (1)..(1245): transl_table=11
atgtcagatattcgtcaacaagcactcgattatcatgaattccccgttcccggtaaaactgcagtatgcctcactaaacccgctgaaacgagccacgatctcgcactagcctacagtcctggtgtggccgagcctgtccgtgaaattgccgctaatcctgaaaatgcatatcgctatacaaataaaggtaacactgtagccgttatctctaacggtactgcgattctgggcttaggcaacctaggcccattggcttcaaaacctgtgatggagggtaaggcgctgttgtttaaacactttgctaatatcgactcgaccgatattgaagtgactcacaacactgcgcaagagtttattaacacagttgcggccattgctggcacatttggtgggattaaccttgaagatattaaagcgccagaatgctttgttatcgaacgtgagttaattgcgcgttgtaatgtgcctgtgtttcacgatgaccagcatggtacggcgatcgtaaccgctgctggcatgattaacgccttagaaattcaaggtaaactgattagcgatgcgatctttgtgtgtatgggcgctggcgcagcggctatcgcctgtatgaccatgttagtgaagtgtggcgccaaccgtgccaacatctacatgctagacaccaaaggtgttatccattcggggcgtactgatctgaatgaatataaagccttatttgcgaatgagactgacaagcgtaccttgcaagatgtgattaaaggcgccgacgttttcttaggtttatctggtcctaatgtgattggtgccgaagaagtagccatgatggcggataaaccggtgatttttgcttgctcaaacccagatcctgagatcaagccagagcttgcccatgctactcgtagcgatctgattatgggaactggccgcagcgactatccaaaccaagtaaataacgtgctgtgtttcccgtttattttccgcggcgcattagatgtgcgcgcatcttgtattaacgatgagatgaagattgccgcagtgcatgccattgccgaattagcgaaagaagcggtacctgcaagtgtccttaaagcgtatccaaaggtgagttcattaagttttggctctgaatatgtgttgccaaaacccatggacccacgtttattacctcgtgtggcccgtgctgtggcaaaggcggccattgattcgggtgttgcgacaattaccactttgcccaaatatgcggattaa

SEQ ID NO: 5630 - protein, 414 aa, Shewanella oneidensis MR-1
MSDIRQQALDYHEFPVPGKTAVCLTKPAETSHDLALAYSPGVAEPVREIAANPENAYRYTNKGNTVAVISNGTAILGLGNLGPLASKPVMEGKALLFKHFANIDSTDIEVTHNTAQEFINTVAAIAGTFGGINLEDIKAPECFVIERELIARCNVPVFHDDQHGTAIVTAAGMINALEIQGKLISDAIFVCMGAGAAAIACMTMLVKCGANRANIYMLDTKGVIHSGRTDLNEYKALFANETDKRTLQDVIKGADVFLGLSGPNVIGAEEVAMMADKPVIFACSNPDPEIKPELAHATRSDLIMGTGRSDYPNQVNNVLCFPFIFRGALDVRASCINDEMKIAAVHAIAELAKEAVPASVLKAYPKVSSLSFGSEYVLPKPMDPRLLPRVARAVAKAAIDSGVATITTLPKYAD

SEQ ID NO: 5631 - DNA, 2280 bp, Drosophila melanogaster
  CDS (1)..(2280)
atgtactcgatcctacgacgctgttctggtatcagaaaaacttttggacccacgccggtttatcccaccgccaacaattcgcagagtccttcctcatatagtcgcggcaaagagcgcgagctcggctgttacacgaagagaaacagcaacagcaacaacaacaatagccatgagagagagagtcagagctgttgtagtagtcgtgtgtgtaaaaatcatacgaccacaacgacaaccacactcgaatacgaactttccaatttcgcaaaactaacgacacgaatcacaacgcaaagtgccgccgaagtggacacatcgccgcatacggatacggaaacgcatagggacagagattcgaatccgggtaatatagccttagccaccgatttggaactgcccaagggtctgccgttatcgttatcctcgcgacaccactggaatcagctgcagagcagtttgcacgcccttcaccaccagcaacagcaacaacaacagcaactacgttcatacagctccactagcgaaacaaatttggaagacaagatgagcaaacccgattcgaaactagataaatacgcgcagcgcgatcgcctgggcctttggggcactggtgacaatgaggtggtcggcagcctctccggattcacccgactcttggacaagcgctactcaaagggcctggccttcacacacgaggagcgccagcagttgggcatccatggcatgctgccctatgtggtccgtgagcccagtgagcaggtggagcactgccgcgctctgctggcgcgactggatcaggatctggacaagtacatgtacctgatcagcctatcggagcggaacgagcgtctgttctacaacgtgctcagctcagacatcgcctacatgatgccactggtgtacacgcccaccgtgggattggcctgccagcgctacagtttgatccaccagaacgccaagggcatgttcatatccatcaaggacaagggacacatctacgacgtgctaaagaactggccggaaacggatgtgcgtgccatcgttgtcacggacggcgagcgcatcctgggactgggagatctgggcgccaacggaatgggtatacccgtgggcaaactgtccctgtatacggccttggcgggcattaagccatcgcagtgcctgcccatcaccttggatgtgggcaccaataccgaatccatcctggaggatcccctgtacatcggtctgcgcgaacgcagggccactggagatctgtacgatgagttcatcgatgagttcatgcatgcctgcgttcgtcgctttggtcaaaactgcctaatccagttcgaggactttgccaacgccaatgccttcaggctgttgtccaaataccgcgactccttctgcaccttcaacgacgatattcaaggaaccgcgtcggtggccgtggctggtctgctggcctcgctaaagatcaagaagacccagctgaaggataacacgctgttgttcctgggcgccggagaagcggctcttggtattgccaacctgtgcctgatggccatgaaggtggagggtctcaccgaggaggaggccaaggcccgcatctggatggtggatagccgtggtgtcatcacccgcgatcgtccaaagggcggactcaccgaacacaagctgcactttgcccagctgcacgaacccatcgatactttggcagaggcggtgcgaaaggtgcgtcccaatgtcctgattggagcggctgcgcagggcggcgccttcaaccaggagatccttgagctgatggccgatattaatgagacgccgatcatctttgcactgtccaatccgaccagcaaggcggagtgcaccgccgaggaggcgtatacgtacaccaaggggcgctgcatcttcgccagcggttcgccttttgctcctgtgacgtacaacaacaagaagttctatccgggtcagggcaacaactcgtacattttccctggcgtggcactgggtgttctgtgtgccggcatgctgaacattcccgagcaggtattcttggtcgccgccgagcgcttggcggagctggtctccaaggacgacctggccaagggcagcttgtatccaccactcagctccattgtcagctgttcgatggccattgccgaaaggattgtggagtacgcctacaaaaacggattggccactgttcgtccagagccggtcaataagctggcgttcatcaaggcccagatgtacgatctggactatccccgatccgtgcccgccacctataagatgtag

SEQ ID NO: 5632 - protein, 759 aa, Drosophila melanogaster
MYSILRRCSGIRKTFGPTPVYPTANNSQSPSSYSRGKERELGCYTKRNSNSNNNNSHERESQSCCSSRVCKNHTTTTTTTLEYELSNFAKLTTRITTQSAAEVDTSPHTDTETHRDRDSNPGNIALATDLELPKGLPLSLSSRHHWNQLQSSLHALHHQQQQQQQQLRSYSSTSETNLEDKMSKPDSKLDKYAQRDRLGLWGTGDNEVVGSLSGFTRLLDKRYSKGLAFTHEERQQLGIHGMLPYVVREPSEQVEHCRALLARLDQDLDKYMYLISLSERNERLFYNVLSSDIAYMMPLVYTPTVGLACQRYSLIHQNAKGMFISIKDKGHIYDVLKNWPETDVRAIVVTDGERILGLGDLGANGMGIPVGKLSLYTALAGIKPSQCLPITLDVGTNTESILEDPLYIGLRERRATGDLYDEFIDEFMHACVRRFGQNCLIQFEDFANANAFRLLSKYRDSFCTFNDDIQGTASVAVAGLLASLKIKKTQLKDNTLLFLGAGEAALGIANLCLMAMKVEGLTEEEAKARIWMVDSRGVITRDRPKGGLTEHKLHFAQLHEPIDTLAEAVRKVRPNVLIGAAAQGGAFNQEILELMADINETPIIFALSNPTSKAECTAEEAYTYTKGRCIFASGSPFAPVTYNNKKFYPGQGNNSYIFPGVALGVLCAGMLNIPEQVFLVAAERLAELVSKDDLAKGSLYPPLSSIVSCSMAIAERIVEYAYKNGLATVRPEPVNKLAFIKAQMYDLDYPRSVPATYKM

SEQ ID NO: 5633 - DNA, 1188 bp, Corynebacterium efficiens YS-314
  CDS (1)..(1188): transl_table=11
gtgaaccccatgacccccagcaccccaggcaaccccctccagctcaaccgtgaggagatcttcgcggcccatgagggcggcaaactgtccatcacctccgcacgtccactggcggacatgcatgatctgtccctggcctacacccccggtgtggcaaccgtgtgcgaggcgatcgccgccgatccggcggtggcgcgcacccacaccgggcggggccggaccgtggcgatcatctccgacggcaccgcggtgttgggcctgggtgatatcggccccgaggcggccctgcccgtcatggagggcaaggcccagctgttcagttcattcgccgggctcaatgccatcccgatcgtcctggatgtccacggtgtggatgaactggtggacaccatcgccgccatggcgccgtccttcggtgccatcaacctggaggacatctccgcaccgcgctgtttcgaggtggaacgccagctcatcgaacgcctggacatccccgtgatgcacgatgatcagcacggcaccgcggtggtgatcctggcagccctgcgcaacgccctgcggctgctggatcgtcagatcggggaggccaggatcgtggtctccggggcgggggccgcgggtgtggccgcggtggagatgctccgtggtgcgggtgcccgggacgtcgtcgtgctggattcccggggtatcatccacgccgggcgggaggacctcaacccggtcaagcaggccctggcggccaccaccaatccccgtggtgtcaccggcgggatggccgaagccctgaccggggcggatgtgtatatcggtgtctccggcggtcacgtcgccgaggaggcgctgcagctcatggcggaccagcccatcctgttcagcctggccaacccctcaccggagatcgacccggagctggccggccggtacggggcgatcgtggccaccgggcgcagtgacctgccgaaccagatcaacaatgtgctggccttcccgggtatcttccacggggcgctcgccgcccgggcgcggtcgatcaccccggggatgaaactggcggcctcgcaggccattgcagatatcgccgccgagaccctcgacgtgggccatgtggtgccctcgccgctggatccccgggtggcccccgcggtcagcgcggcggtgcaggccgccgcggaggcagagggggcctga

SEQ ID NO: 5634 - protein, 395 aa, Corynebacterium efficiens YS-314
MNPMTPSTPGNPLQLNREEIFAAHEGGKLSITSARPLADMHDLSLAYTPGVATVCEAIAADPAVARTHTGRGRTVAIISDGTAVLGLGDIGPEAALPVMEGKAQLFSSFAGLNAIPIVLDVHGVDELVDTIAAMAPSFGAINLEDISAPRCFEVERQLIERLDIPVMHDDQHGTAVVILAALRNALRLLDRQIGEARIVVSGAGAAGVAAVEMLRGAGARDVVVLDSRGIIHAGREDLNPVKQALAATTNPRGVTGGMAEALTGADVYIGVSGGHVAEEALQLMADQPILFSLANPSPEIDPELAGRYGAIVATGRSDLPNQINNVLAFPGIFHGALAARARSITPGMKLAASQAIADIAAETLDVGHVVPSPLDPRVAPAVSAAVQAAAEAEGA

SEQ ID NO: 5635 - DNA, 1269 bp, Pseudomonas putida KT2440
  CDS (1)..(1269): transl_table=11
atgtcagacctgaaaaccgccgctctcgaatatcacgctcaacctcgtccggggaaactgagcgttgaactctccaagcccactgccaccgcccgtgacctcgccctggcctacagcccaggtgttgcagagccggtgcgcgaaattggccgtgatccagagctggcttacaaatacaccggcaaaggcaacctggttgcggtgatttccgatggcactgccatcctcggtctgggtgacctcggcccactggcttccaagccggtcatggaaggcaagggtgttctgttcaagcgtttcgccggtatcgatgtgttcgacatcgaagtcgagtcggaaagcccgcaagcgttcatcgacaccgttcgccgcatttcgatcaccttcggtggcatcaaccttgaagacatcaaggcacctgagtgctttgaaatcgaacgtaccctgatcgaacagtgcgacatcccggtgttccacgatgaccagcacggtactgccatcgtgactgccgctggcatgatcaacgccctggaaatcgccggcaagaaactggaagaagccaagatcgtctgcctgggcgccggcgctgctgccatttcctgcatgaagctgctggtaagcatgggtgcgaaggtcgagaacatcttcatgatcgaccgtagtggcgtgatccacgctggccgtgacgacctgaaccagtacaaggcgcagttcgcccacgcgaccgacaagcgcaccctggccgacgcccttgacggtgccgacgtgttcgtaggtctgtctggcccgaacctgctgagcccggaaggcctgaagtcgatggctgccaacccgatcgtgttcgcctgctcgaacccggacccggaaatctcgccagagctggcgcatgccactcgcaacgacgtgatcatggctaccggtcgttccgactacccgaaccaggtcaacaacgtactgggcttcccgttcatcttccgtggtgctctggacgttcgcgccaagcgtatcaacgaagaaatgaagatcgctgccgctatcgccctgaaagacctggccaagctgccagtgccgaaggaagtttgcgaagcctatggcgttgaaggcctggagttcggtcgtgagtacatcattccgaagccgctggatgcacgcttgatcaccgtcgtttccgatgctgtggccaaggctgccatcgaatccggcgtggctaccctgccttatccgaagcattacccgctgaccagcgtggatgaagtgttcaacggctga

SEQ ID NO: 5636 - protein, 422 aa, Pseudomonas putida KT2440
MSDLKTAALEYHAQPRPGKLSVELSKPTATARDLALAYSPGVAEPVREIGRDPELAYKYTGKGNLVAVISDGTAILGLGDLGPLASKPVMEGKGVLFKRFAGIDVFDIEVESESPQAFIDTVRRISITFGGINLEDIKAPECFEIERTLIEQCDIPVFHDDQHGTAIVTAAGMINALEIAGKKLEEAKIVCLGAGAAAISCMKLLVSMGAKVENIFMIDRSGVIHAGRDDLNQYKAQFAHATDKRTLADALDGADVFVGLSGPNLLSPEGLKSMAANPIVFACSNPDPEISPELAHATRNDVIMATGRSDYPNQVNNVLGFPFIFRGALDVRAKRINEEMKIAAAIALKDLAKLPVPKEVCEAYGVEGLEFGREYIIPKPLDARLITVVSDAVAKAAIESGVATLPYPKHYPLTSVDEVFNG

SEQ ID NO: 5637 - DNA, 1278 bp, Vibrio vulnificus CMCP6
  CDS (1)..(1278): transl_table=11
atgtccgatgacaatagccagcaaatgacccctgaagaagtacttcgccaacaagctcttgattatcatgctttgccaacggcgggtaaaattgccgtcgctctaaccaaacctgcggaaaccgctaaagatcttgctttagcttacagcccaggtgttgcagagccggttcgcgaaatcgcacagaacccagacaacgtttacaagtacacctcaaagggaaatatggtggccgttatctctaacggtacggcaattttgggtctaggtaacttaggtcctttggcatcaaagccagtaatggaaggtaaggcactgctgtttaagcgttttgctggtcttgattctatcgatattgaagtgaagcatcgcaccatcgacgaattcgtggatacggtcgcgaacattgcagatacctttggtggtatcaatttagaagacatcaaagcaccagactgttttgaaattgaaaaacgtctgattgagcgttgtgatgtgccagtgttccatgatgaccaacacggaacggccattgtcaccgcggctggtatgctgaatgcgatcgaactgcagggtaagaagctaaacgaatgtattattgtttgtcttggtgcgggtgcggctgccgtggcgtgtatggagctgctgatcaaatgtggcgcgatgcgtgaaaagatctacatgctggatcgtaaaggtgtgattcatacacgtcgtgatgatctcaacgagtacaagcaactgttcgccaacaatacagacaagcgcacactggaagatgtgatcagcggtgcggatctcttccttggcgtgtctggtccaaacctaatgcctgcagaagcgctgaagctgatggcggataaaccggttgtgtttgcgtgttcaaaccctgatccagaaatcaagccagagttggcgcatgaagtgcgcagcgatcttatcatgggtacaggtcgcagcgactatccgaaccaagtgaacaacgtgttgtgcttcccattcattttccgtggcgctctggatgttcgtgctagtgaaattaatgatgaaatgaagttagcagcggttgaagcgattcgtcaattggcgaaagagccagtgccagaagcagtattgaaagcggcaggtgttgaatcgctgagctttggcccgcaatacattattcccaaaccaatggattcacgtttgctgcctcgcgtggcgaaagccgttgctcaggcggccgttgataccggtgtggctcgtattccaatgccagaaaactacatggccgagtaa

SEQ ID NO: 5638 - protein, 425 aa, Vibrio vulnificus CMCP6
MSDDNSQQMTPEEVLRQQALDYHALPTAGKIAVALTKPAETAKDLALAYSPGVAEPVREIAQNPDNVYKYTSKGNMVAVISNGTAILGLGNLGPLASKPVMEGKALLFKRFAGLDSIDIEVKHRTIDEFVDTVANIADTFGGINLEDIKAPDCFEIEKRLIERCDVPVFHDDQHGTAIVTAAGMLNAIELQGKKLNECIIVCLGAGAAAVACMELLIKCGAMREKIYMLDRKGVIHTRRDDLNEYKQLFANNTDKRTLEDVISGADLFLGVSGPNLMPAEALKLMADKPVVFACSNPDPEIKPELAHEVRSDLIMGTGRSDYPNQVNNVLCFPFIFRGALDVRASEINDEMKLAAVEAIRQLAKEPVPEAVLKAAGVESLSFGPQYIIPKPMDSRLLPRVAKAVAQAAVDTGVARIPMPENYMAE

SEQ ID NO: 5639 - DNA, 2310 bp, Bradyrhizobium japonicum USDA 110
  CDS (1)..(2310): transl_table=11
atgtcgtcctattctgatgacctccaccaggcggcgctcgcctatcatcgtctgccgcgccccggcaagctcgagatccaggcgaccaagccgcttgccaaccagcgcgacctcgcgcttgcctattctccgggcgttgcggctgcctgcaccgagatcgccaagaacccggccgaggcggcgacgctgaccacccgcgccaacctggtcgccgtggtctcgaacggcaccgcggtgctcggcctcggcaatatcggcccgctggcctccaagcccgtgatggagggcaaggcggtcctgttcaagaagtttgccggcatcgacgtgttcgatatcgagatcgccgccgacaccatcgaccgggtggtcgagaccgtggcggcgctcgagccgactttcggcggcatcaatctcgaggacatccgcgggccggagtgcttcgagatcgaggcgcggctgaaggagcgcatgaagatcccggtcttccatgacgaccagcacggcaccgccatcatcgtcgccgccgccatcaccaacggcctcaggctgaacggcaagaagctgtcggacgtcaagatcgtggcgtcaggggcaggtgctgccgcgattgcgacgctcaatcttctggtgtcgatgggcgcgcagcgcaagaacatctgggtctgcgacatcgacggcctcgtgcatgagggccgcaacacctcgatggaccgctggaaggcggtctatgcgcagaagaccgacaagcgcacgctcgccgacgtcatcggcggcgcggacatcttcatcgggctgtcggcaccgggcgtcctcaagcctgagatggccaaggcgatgagcgacaagccgctcatcatggcgctcgccaatccgacgcccgaaatcatgccggaggaagcgcggaaggtgcgccccgacgccatgatctgcaccggccgctcggactatccgaaccaggtcaacaacgtcctgtgctttcccttcatcttccgcggcgcgctcgacgtcggtgccagcgccatcaacgaggagatgaagcacgccgcggtcgaagccatcgcgcagctcgcgcgcgaggcgccgtcggatgcggtggcgcaaggggtcgacaccggcgagatgggaggcttcggtccgggctcgctgattccgagcccgttcgatccacggctgatcctgcgcgtggcgccggcggttgcgaaggccgcgatcgagtcgggcgtcgcgacgcgccccatcaccaatttcgacgaatatgccgcgcagctcatgcgcttcgccttccgctccggcctcgtcatgaagccgatgttcgccaaggccaagacccagccggtgcgcgtgatctatgccgaaggcgaggacgagcgcgtgttgcgcgccacgcaggtggtgctggaggagaagctggcgacgccgatcctggtcggtcgtccgtccgtggtggaggcgcgcatcaagcgcttcggcctgtcgatcaaggccggcaaggatttcgacctcgtcaaccccgaggacgatccgcgctaccgatcctacgtgcagtcctatgtcgaggtcgccggccgccgcggcgtgacgccggatgcggcgcgcacggtggtacgcaccaacaacacggtcatcgccgcgctcgcggtgacgcgcggggaggcggatgccatgctctgcggcgtcgagggccgctacatgagccatctgcgccatgtccgcgagatcgtcggcttctcggcagggatcagcgactatgcggcgctggcgctgctgatcaccagcaagggcgcgttcttcatcgccgatacgcaggttcgccccaatccgagcgcggaagaactcgccgagatcgcctcgctcgcggcggtccacgtccagcgcttcaacatcaagccgaagatcgccttcgtttcgcattccgatttcggcagctacgacaccgagtcctcgcgcaagatgcgccgggcgacccagcttctgaaggagaagcatccggagatcgaggccgacggcgagatgcagggcgacacggcactttcggccgctgcgcgcaagatggtgctgccgcactccaacctcgagggcgaggccaacatcatgatcatgccgacgctcgacaccgccaacgtcgcctatcagatgatcaagtcgctcgcggatgcactgcccgtcggcccgatcctgatcggcccggcgcgcccggcgcatatcctcaccccctcggtgaccgcgcgcggcatcctcaacatgactgcggtcgccgtcgtggaagcgcaggagcgcgcggcgcggcagcagccgacgttgtttacctga

SEQ ID NO: 5640 - protein, 769 aa, Bradyrhizobium japonicum USDA 110
MSSYSDDLHQAALAYHRLPRPGKLEIQATKPLANQRDLALAYSPGVAAACTEIAKNPAEAATLTTRANLVAVVSNGTAVLGLGNIGPLASKPVMEGKAVLFKKFAGIDVFDIEIAADTIDRVVETVAALEPTFGGINLEDIRGPECFEIEARLKERMKIPVFHDDQHGTAIIVAAAITNGLRLNGKKLSDVKIVASGAGAAAIATLNLLVSMGAQRKNIWVCDIDGLVHEGRNTSMDRWKAVYAQKTDKRTLADVIGGADIFIGLSAPGVLKPEMAKAMSDKPLIMALANPTPEIMPEEARKVRPDAMICTGRSDYPNQVNNVLCFPFIFRGALDVGASAINEEMKHAAVEAIAQLAREAPSDAVAQGVDTGEMGGFGPGSLIPSPFDPRLILRVAPAVAKAAIESGVATRPITNFDEYAAQLMRFAFRSGLVMKPMFAKAKTQPVRVIYAEGEDERVLRATQVVLEEKLATPILVGRPSVVEARIKRFGLSIKAGKDFDLVNPEDDPRYRSYVQSYVEVAGRRGVTPDAARTVVRTNNTVIAALAVTRGEADAMLCGVEGRYMSHLRHVREIVGFSAGISDYAALALLITSKGAFFIADTQVRPNPSAEELAEIASLAAVHVQRFNIKPKIAFVSHSDFGSYDTESSRKMRRATQLLKEKHPEIEADGEMQGDTALSAAARKMVLPHSNLEGEANIMIMPTLDTANVAYQMIKSLADALPVGPILIGPARPAHILTPSVTARGILNMTAVAVVEAQERAARQQPTLFT

SEQ ID NO: 5641 - DNA, 1170 bp, Clostridium tetani E88
  CDS (1)..(1170): transl_table=11
atggatgtaaaagaaatggctttaaaattacactcggaaaagaagggaaaattagaagttgtaggtaagatatctgttaagaatagggaagatttagcattggcatatacgccaggagttgctgaaccttgtgtgcatatatcaaaggataaaaataaggtatatgaatatactacaaaaggtaatatggttgcagtggttactaatggaacagcagttttaggattaggaaacattggtccagaagctgcattacctgtaatggagggtaaagcacttctttttaaagagtttgcaaatgtagatgcttttcctatatgtttggatactgaagatccagaagaaattataagaactgtaaaattaatggcaccaggcttcggtggtattaatttagaagatataaaagcacctgaatgtttttatatagaagaaagacttaaaaaagaattggatataccagtattccatgatgatcaacatggaacagctatagttgtattagcaggtatatataatgctttaaaaatagtagataaaaaattagaagaagcaaaaattcttataaatggagcgggctcagcaggaatcgcaatatgtaagcttttattaaatgctggagcttgtaatattgttatgtgcgatataaatggatccctagtagagggagatgagaatttaaatcctgcccaaaaagaaatagcaaaagtaactaataaagaaaaagaaaaaggaaagcttgttgatgtaataaaagataaggatatatttataggagtttcagggcctaaaatattaacaaaggaaatggtttctactatggcaaaggatagtatagtttttgctatggctaatccagaaccagagatacttccagatgaagctaaagctggaggagctagagttgttgcaacaggaagatctgattttccaaatcaaataaacaatgttttagtgttcccaggtatatttaggggagcattggatgtaaaggctagagaaataaacgaagagatgaaaattgcagcagcaagaggagtggcaaatcttataaaagaagaagacttaaatgaagaatatataatcccagatccatttaataaagaagtggcagaatctgtatcaaaagaagttagaaggatagcaaaagaaatgaatatctgtaaataa

SEQ ID NO: 5642 - protein, 389 aa, Clostridium tetani E88
MDVKEMALKLHSEKKGKLEVVGKISVKNREDLALAYTPGVAEPCVHISKDKNKVYEYTTKGNMVAVVTNGTAVLGLGNIGPEAALPVMEGKALLFKEFANVDAFPICLDTEDPEEIIRTVKLMAPGFGGINLEDIKAPECFYIEERLKKELDIPVFHDDQHGTAIVVLAGIYNALKIVDKKLEEAKILINGAGSAGIAICKLLLNAGACNIVMCDINGSLVEGDENLNPAQKEIAKVTNKEKEKGKLVDVIKDKDIFIGVSGPKILTKEMVSTMAKDSIVFAMANPEPEILPDEAKAGGARVVATGRSDFPNQINNVLVFPGIFRGALDVKAREINEEMKIAAARGVANLIKEEDLNEEYIIPDPFNKEVAESVSKEVRRIAKEMNICK

SEQ ID NO: 5643 - DNA, 1269 bp, Pseudomonas syringae pv. tomato str. DC3000
  CDS (1)..(1269): transl_table=11
atgtcagatttgaaaactgccgcgctcgaataccatgccaatcctcgtccggggaagctgagcgtcgaactcaccaagccgaccgcaaccgctcgtgacctggctctggcctacagccctggcgttgctgaacccgtgcgtgaaattgcccgtgaccccgagctggcttacaagtacaccggcaaaggcaacctggtagcagttatttccgatggcaccgcgattctcggcctcggcgatctgggcccattggcctccaagccggttatggaaggtaaaggggttctgttcaagcgtttcgccggtatcgacgttttcgatatcgaagtcgattccgaaagcccgcaagcgttcatcgacaccgtcaagcgtatctccatcaccttcggtggcatcaacctggaagacatcaaggcacctgagtgctttgagatcgagaaagcactgatcgaacagtgcgacatcccggttttccacgatgaccagcacggcaccgctatcgtgaccgcagccggcatgatcaacgcactggaaatcgtcggcaaaagccttgagtccgcgaagatcgtctgcctgggcgctggcgcagctgccatctcttgcatgaagctactggtgagcatgggcgcgaagatcgaaaacatcttcatggttgaccgtaccggcgtgatccactccggccgtaccgacctgaaccagtacaaggcggtgttcgctcacgccaccgagaagcgctcgctgaccgatgcactggatggcgctgatgtatttgtgggcttgtccggtcctaacctgctgagcgctgaaaatctcaaattgatggccaaggacccgatcgtgttcgcctgctcgaacccggacccggaaatctccccggagctggctcacgccacccgcagcgacgtgatcatggcgaccggccgttcggactacccgaaccaggtcaacaacgtgctgggcttcccgttcatcttccgtggtgcactggacgttcgcgccaagcgcatcaacgaagagatgaaaatcgccgcagccaacgccctgcgtgaactggccaagctgccggttcctcaggaagtctgcgacgcttatggcggtatcaagctggaattcggtcgtgaatacatcatcccgaaaccaatggacacccgtctgctgggcctgatcgccgacgcggttgccaaggctgccatcgaaagcggcgttgcgaccctgccgtatccgaagcactacccgctgaccagcgtggacgacgtgttcaacggctga

SEQ ID NO: 5644 - protein, 422 aa, Pseudomonas syringae pv. tomato str. DC3000
MSDLKTAALEYHANPRPGKLSVELTKPTATARDLALAYSPGVAEPVREIARDPELAYKYTGKGNLVAVISDGTAILGLGDLGPLASKPVMEGKGVLFKRFAGIDVFDIEVDSESPQAFIDTVKRISITFGGINLEDIKAPECFEIEKALIEQCDIPVFHDDQHGTAIVTAAGMINALEIVGKSLESAKIVCLGAGAAAISCMKLLVSMGAKIENIFMVDRTGVIHSGRTDLNQYKAVFAHATEKRSLTDALDGADVFVGLSGPNLLSAENLKLMAKDPIVFACSNPDPEISPELAHATRSDVIMATGRSDYPNQVNNVLGFPFIFRGALDVRAKRINEEMKIAAANALRELAKLPVPQEVCDAYGGIKLEFGREYIIPKPMDTRLLGLIADAVAKAAIESGVATLPYPKHYPLTSVDDVFNG

SEQ ID NO: 5645 - DNA, 1278 bp, Vibrio parahaemolyticus RIMD 2210633
  CDS (1)..(1278): transl_table=11
atgtctgaagacaatcgccaagcagccaccccagaagaagaacatcgccaaaaagctctggattaccatgcttacccaaccccgggtaaaatcgctgtcgaattaactaaaccagccgaaactgctggtgaccttgctcttgcatacagtcctggcgtggctgagcctgtacgtgaaatcgcacaaaaccctgacaacgtgtacaagtacacagcgaaaggcaacatggttgcggttatttcaaacggtaccgctattcttggtctaggtaaccttggcccacttgcctctaagcctgtaatggaaggtaaagcgttactgtttaagcgttttgctggccttgattcaattgatattgaagtgaagcatcgcacgatcgacgagttcgttgatacggttgcgaacattgctgacactttcggtggtatcaaccttgaagacatcaaagcaccagactgttttgaaattgaaaagcgtttgattgagcgttgtgacgtaccagtattccacgatgatcaacatggtacggctatcgtgacagctgcaggtatgctcaatgctatcgagctgcagggtaagaagcttgaagattcaacgattgtttgtcttggtgctggtgctgcagccgttgcgtgtatggagctgcttatcaagtgtggcgcaatgcgcgagaagatctacatgctggatcgcaaaggggtgatccatactcgtcgtgatgatctgaatgagtacaagcaactgttcgcaaacaatacagataagcgcacactagaagatgtgatcgaaggtgcagacctattcctaggtgtatctggtccaaatctattgccaccagaagcgttgaaactcatggctgacaagccagttgtgtttgcttgttcgaacccagatcctgaaatcaaacctgagctagcacacgcagtgcgtgatgacttaattatgggtactggtcgcagtgattatccgaaccaagtgaacaacgtgttgtgtttccctttcattttccgtggagcgttagatgtacgtgcgagtgaaatcaatgacgacatgaagctggcagcggttgacgcaattcgtgcattggcaaaagagcctgtacctgaatcggtactaaaagctgcaggtgttgagaagctagaatttggtagcgactacatcattcctaagccaatggatccacgtctactacctcgcgtagcaaaagcggtagctcaagcggcagtagattccggtgttgctcgtatcgagatgccagaaaactacatggcagagtaa

SEQ ID NO: 5646 - protein, 425 aa, Vibrio parahaemolyticus RIMD 2210633
MSEDNRQAATPEEEHRQKALDYHAYPTPGKIAVELTKPAETAGDLALAYSPGVAEPVREIAQNPDNVYKYTAKGNMVAVISNGTAILGLGNLGPLASKPVMEGKALLFKRFAGLDSIDIEVKHRTIDEFVDTVANIADTFGGINLEDIKAPDCFEIEKRLIERCDVPVFHDDQHGTAIVTAAGMLNAIELQGKKLEDSTIVCLGAGAAAVACMELLIKCGAMREKIYMLDRKGVIHTRRDDLNEYKQLFANNTDKRTLEDVIEGADLFLGVSGPNLLPPEALKLMADKPVVFACSNPDPEIKPELAHAVRDDLIMGTGRSDYPNQVNNVLCFPFIFRGALDVRASEINDDMKLAAVDAIRALAKEPVPESVLKAAGVEKLEFGSDYIIPKPMDPRLLPRVAKAVAQAAVDSGVARIEMPENYMAE

SEQ ID NO: 5647 - DNA, 1167 bp, Streptococcus pyogenes SSI-1
  CDS (1)..(1167): transl_table=11
atgaaaaatcaattaggtcaacttgcccttgaacaagctaaaacgttcggaggtaaattggaagttcaaccaaaagttgacattacaaataaacatgatttgagcattgcctatacaccaggtgtagctggtgtgtcatctgccatcgcaaaagataaaacattagcatatgacttaaccaccaagaaaaatacagtagcagttatcagtgatggtactgcggttcttggtctgggggatattggccctgaagcagccatgccagttatggaaggaaaagcagccctttttaaagcatttgcaggtgttgatgctattccgattgtattagataccaaagatactgaagaaattattagtattgtcaaggcacttgcaccaacctttggtggtattaatttagaggatattagtgcgccccgctgttttgaaattgagcaacgcttaattaaggaatgtcatattcctgttttccatgacgatcagcatggaacagctattgtggtgttagcagccatctttaatagtttgaaacttcttcaaaaatcccttgatgaggtatccatcgtggtgaacggtggtggatctgcgggattatccattacccgtaaattattagcagcaggtgctacgaaagtgacagtagtggataaatttggcattatcaatgaacaagaggcagatcagttagcaccacaccatttggatatagcgaaagtcactaatcgtgagtttaaatcaggtaccttagaagatgctcttgaaggagcagatatcttcattggcgtatcagcaccaggagtcttaaaagcagagtggattagtaaaatggcagcgcgcccagtaatttttgccatggccaaccctattccagagatttaccctgatgaagcccttgaagcgggggcttacattgtaggtactggccgtagtgattttcctaaccagattaataatgtccttgcctttccaggtatttttaggggagcattagatgcacgggcaaaaaccattactgttgagatgcaaattgctgccgcaaaaggtattgccagtcttgttccaggtgacgctttgagcactactaatattattccagatgcctttaaagaaggagttgctgagattgtcgctaaaagcgtcaggtcggtagtccttaaatcatag

SEQ ID NO: 5648 - protein, 388 aa, Streptococcus pyogenes SSI-1
MKNQLGQLALEQAKTFGGKLEVQPKVDITNKHDLSIAYTPGVAGVSSAIAKDKTLAYDLTTKKNTVAVISDGTAVLGLGDIGPEAAMPVMEGKAALFKAFAGVDAIPIVLDTKDTEEIISIVKALAPTFGGINLEDISAPRCFEIEQRLIKECHIPVFHDDQHGTAIVVLAAIFNSLKLLQKSLDEVSIVVNGGGSAGLSITRKLLAAGATKVTVVDKFGIINEQEADQLAPHHLDIAKVTNREFKSGTLEDALEGADIFIGVSAPGVLKAEWISKMAARPVIFAMANPIPEIYPDEALEAGAYIVGTGRSDFPNQINNVLAFPGIFRGALDARAKTITVEMQIAAAKGIASLVPGDALSTTNIIPDAFKEGVAEIVAKSVRSVVLKS

SEQ ID NO: 5649 - DNA, 2292 bp, Bacteroides thetaiotaomicron VPI-5482
  CDS (1)..(2292): transl_table=11
atggctaaaataaccaaagaagccgctttgctctaccattcgcagggcaaacccggtaagatcgaggtagttcctaccaaaccttacagtactcaaactgatttatcacttgcatactctcccggtgtggcagagccttgcctcgaaatagagaagaatccgcaggacgcttacaaatacacagccaaaggcaacctggtagctgttatttctaacggtacagccgtactcggactgggtgacataggcgcactgagcggcaaaccggtgatggaaggcaaaggtctgcttttcaaaatctacgcaggtatcgacgtattcgacatcgaagtggacgagaaagacccggagaaattcatcgctgccgtaaaagcaatcgctcctactttcggcggtatcaatctggaagacatcaaagctcccgaatgtttcgaaatcgaacgccgtctgaaagaagagcttgacatccctgtgatgcacgatgaccagcacggaaccgctatcatctccagcgccggactggtaaatgccctgcaagtggccggaaagaaaatcgaggatgtgaaaatcgtcgtaaacggtgccggagcatctgccgtatcttgtaccaaattatatgtatcactgggggcacgcctcgaaaatatcgtcatgctggacagcaaaggcgttatcagcaagacacgtaccgacctcaacgaacagaaaagatattttgccaccgaccgcacggatatccacacactggaagaagcgatcaaaggcgccgacgtattcctcggcttgtccaaaggtaacgtactgagtcaggacatggtgcgcagcatggctcccatgccgatcgtattcgcactggcaaacccgacaccggaaatctcttacgaagatgcaatgagcgcccgccccgacgtactgatggcaaccggacgttccgactatccgaaccagatcaacaacgtaatcggcttcccgtacatcttccgcggcgcactcgatacacaggccaaagcgatcaacgaagaaatgaaaatcgcagcagtacacgctatcgccaatctggcaaaacagcctgtacctgatgtagtgaacacagcataccacgtcaacaacctctctttcggtccggaatacttcatcccgaaaccggtagacccgcgcctcatcactgaagtttcctgtgccgtagccaaagcagccatggaaagcggagtggcacgcacggaaatcaaagactgggacgcttactgcgttcatctgcgcgaactgatgggatacgaatccaaactgacccgccagctttatgacaccgcccgccgcaacccgcaacgtgtcgtattcgccgaaggcatccatcccaacatgctgaaagccgccgtcgaagcaaaagccgaaggcatctgccatcctatcttattaggaaacgacgaagcaatcggcaaactggccgaagaactcgacctgagcctggaaggcatcgaaatcgtcaatctccgccatccggacgagtcggaacgccgcgaacgctactcacgcatccttgccgaaaaacgtgcccgcgaaggctttacctacgaagaagccaacgacaagatgttcgaacgcaactacttcggtatgatgatggtagaaaccggagatgcagacgcatttatcaccggactctacacaagatacagcaacaccatcaaagttgccaaagaagtaatcggcatccagcccggattcaaccatttcggaacgatgcacattcttaattcaaagaagggtacctacttcctggcagatacgctgatcaaccgtcatccggatacggaaactctgattgacatcgccaaactggctgacaagacagtccgtttcttcaaccatacaccggtcatctcgatgttgtcgtactccaacttcggcgccgatacctccggcagccctgtcaaagtgcacggagcagtgaactatatgcagaaggaatatccggaactcgccatcgacggtgaaatgcaggtgaactttgccatgaaccgcgaactgcgtgacgccaagtatccgttcacccgcctgaaaggtaaagacgtgaatacgctgatcttcccgaacctgagctccgccaacgcaggatacaaactgctgcaggcaatggaccccgatacggaatttatcggccctatccagatgggattgaacaagcctatccatttcactgactttgaaagttctgtccgcgacatcgtgaacatcacagccgtagccgtgatcgacgccatcgtagtgaagaagaaaaacgaaagccgatga

SEQ ID NO: 5650 - protein, 763 aa, Bacteroides thetaiotaomicron VPI-5482
MAKITKEAALLYHSQGKPGKIEVVPTKPYSTQTDLSLAYSPGVAEPCLEIEKNPQDAYKYTAKGNLVAVISNGTAVLGLGDIGALSGKPVMEGKGLLFKIYAGIDVFDIEVDEKDPEKFIAAVKAIAPTFGGINLEDIKAPECFEIERRLKEELDIPVMHDDQHGTAIISSAGLVNALQVAGKKIEDVKIVVNGAGASAVSCTKLYVSLGARLENIVMLDSKGVISKTRTDLNEQKRYFATDRTDIHTLEEAIKGADVFLGLSKGNVLSQDMVRSMAPMPIVFALANPTPEISYEDAMSARPDVLMATGRSDYPNQINNVIGFPYIFRGALDTQAKAINEEMKIAAVHAIANLAKQPVPDVVNTAYHVNNLSFGPEYFIPKPVDPRLITEVSCAVAKAAMESGVARTEIKDWDAYCVHLRELMGYESKLTRQLYDTARRNPQRVVFAEGIHPNMLKAAVEAKAEGICHPILLGNDEAIGKLAEELDLSLEGIEIVNLRHPDESERRERYSRILAEKRAREGFTYEEANDKMFERNYFGMMMVETGDADAFITGLYTRYSNTIKVAKEVIGIQPGFNHFGTMHILNSKKGTYFLADTLINRHPDTETLIDIAKLADKTVRFFNHTPVISMLSYSNFGADTSGSPVKVHGAVNYMQKEYPELAIDGEMQVNFAMNRELRDAKYPFTRLKGKDVNTLIFPNLSSANAGYKLLQAMDPDTEFIGPIQMGLNKPIHFTDFESSVRDIVNITAVAVIDAIVVKKKNESR

SEQ ID NO: 5651 - DNA, 1170 bp, Enterococcus faecalis V583
  CDS (1)..(1170): transl_table=11
atgtcaacaaaagatgtaaaagaattagcgattgagcaagcaaaaaaatttggggggaaattagaagtctgccctaaagttccgattgaaacaaaagcagatttaggaattgcctacacaccaggtgttgcggctgtttcttctgccatacatgaaaaaaaagaacgcgcttacgaattaacgacaaagaaaaacaccgtcgccgttattagtgatggttcagcagttttaggtttaggtaacattggtcctgaagcagcgatgcctgtcatggaaggaaaagctgcattgtttaaacgctttgctggtgtggattcgattccccttgttttagatacacaagataccgaagaaattattcaaacggtgaaatttttggctccaacctttggggggattaacttggaagatatcagcgctcctcgttgttttgaaattgaacagcgtttaatcgatgaactagatattcccgttttccatgatgatcaacacgggacagcgattgttgttctagcggctttgtacaacagcttaaaattaatcaacaagaaaatagaggacattcatgtggtaatcaacggcggtggctccgctggtctttcgatcacaagaaaatttttagctgctggcgtaaaacatattatcattgttgaccgtgcagggattctgagcgaaacagatacagctctgccaccacaccacgcagaaattgcgaagctaaccaatcgggaacaccgtaccggtgatttagctactgctcttgaaggcgctgatgtctttgttggtgtttcggcaccaggtgttttaaaacctgagtggattcaacagatgaatgagcagccagttatttttgcaatggctaacccagttcctgaaatttttcctgatgaagctttagcggcaggcgcttatattgtcggaactggtcgtagtgactttccgaatcaaattaataatgtgttagccttccctggtatcttccgtggtgccttagatgctcgggcgaaaaagattacgattgaaatgcaaattgccgctgccaaaggtattgcaaaattgattcccgataatgaactcacgccgactaatattattcccgatccattccaagaaggagtcgcaaaagtcgtcgccgaaagcgtccgtaacgctgtcaaagaaacaaattaa

SEQ ID NO: 5652 - protein, 389 aa, Enterococcus faecalis V583
MSTKDVKELAIEQAKKFGGKLEVCPKVPIETKADLGIAYTPGVAAVSSAIHEKKERAYELTTKKNTVAVISDGSAVLGLGNIGPEAAMPVMEGKAALFKRFAGVDSIPLVLDTQDTEEIIQTVKFLAPTFGGINLEDISAPRCFEIEQRLIDELDIPVFHDDQHGTAIVVLAALYNSLKLINKKIEDIHVVINGGGSAGLSITRKFLAAGVKHIIIVDRAGILSETDTALPPHHAEIAKLTNREHRTGDLATALEGADVFVGVSAPGVLKPEWIQQMNEQPVIFAMANPVPEIFPDEALAAGAYIVGTGRSDFPNQINNVLAFPGIFRGALDARAKKITIEMQIAAAKGIAKLIPDNELTPTNIIPDPFQEGVAKVVAESVRNAVKETN

SEQ ID NO: 5653 - DNA, 1224 bp, Streptomyces avermitilis MA-4680
  CDS (1)..(1224): transl_table=11
gtggcagcggagatcgtcaatcctcgcagcgacagcagtacggatcaggaaggcggggcggagcccctcgattccttcgatcccgcgttcgcgctgcatcgtggtggcaagatggccgtgcaggccaccgtgcccatccgcgacagggacgacctgtccctggcgtacacgcccggcgtcgcgaaggtgtgcaccgccatcgccgagcagcccgagctggtccacgattacacgtggaagtcgtccgtggtcgcggtggtgaccgacgggacggccgtgctcgggctcggggacatcggtcccgaagcctcccttccggtgatggaggggaaggcgattctgttcaagcagttcggcggggtggatgccgtgccgatcgcgctgggcacgacggacgccgacgagatcgtcgagaccgtcgtccggctcgcgccgtccttcggcggggtcaatctggaggacatctcggcgccgcggtgcttcgagatcgagcgcaagctccaggagcggctggacatcccggtcttccacgacgaccagcacggtacggccgtggtgacactggcggccctgcggaacgccgcgaagctgaccgggcggacgctgggcgagctgcgtgcggtgatctccggcgcgggtgcggccggcgtcgccatcgccaagttcctgctggcggcggggctcggggatgtcgcggtcgcggaccgcaagggcgtcgtgtcgaaggaccgggacgacctcacgccggtcaagcgcgagctcgcggagatcacgaacaaggcgggcctgtcgggctcgctggagtcggctctcgcgggcgcggacgtcttcatcggggtctccggcggtacggtgccggagccggcggtggcttcgatggcggagggcgcgttcgtcttcgccatggccaacccgaaccccgaggtgcatcccgagatcgcgcacaagtacgcgtccgtggtggctacgggccggtccgacttcccgaaccagatcaacaacgtgctggcgtttccggggatcttcgcgggggcgcttcaggtgcgcgcgtcgcggatcacggaggggatgaagatcgcggcggcggacgcgctggccgatgtggtcggtgacgatctcgccgcggactatgtgattccgtcgccgttcgacgagcgggtggcgcctgcggtgaccgcggcggtggccgcggctgcccgggcggaaggtgtggctcgccgctga

SEQ ID NO: 5654 - protein, 407 aa, Streptomyces avermitilis MA-4680
MAAEIVNPRSDSSTDQEGGAEPLDSFDPAFALHRGGKMAVQATVPIRDRDDLSLAYTPGVAKVCTAIAEQPELVHDYTWKSSVVAVVTDGTAVLGLGDIGPEASLPVMEGKAILFKQFGGVDAVPIALGTTDADEIVETVVRLAPSFGGVNLEDISAPRCFEIERKLQERLDIPVFHDDQHGTAVVTLAALRNAAKLTGRTLGELRAVISGAGAAGVAIAKFLLAAGLGDVAVADRKGVVSKDRDDLTPVKRELAEITNKAGLSGSLESALAGADVFIGVSGGTVPEPAVASMAEGAFVFAMANPNPEVHPEIAHKYASVVATGRSDFPNQINNVLAFPGIFAGALQVRASRITEGMKIAAADALADVVGDDLAADYVIPSPFDERVAPAVTAAVAAAARAEGVARR

SEQ ID NO: 5655 - DNA, 1239 bp, Bacillus cereus ATCC 14579
  CDS (1)..(1239): transl_table=11
ttgtcaacacttcgtgaagaagcacttcacatgcataaagtgcatcaaggaaaattagaaactgtatcaaaagtaaaagtagaaaatgcaaaagatttaagtcttgcatattctccaggggttgcagaaccttgtaaagaaatttatgacgataaaagtaaggtatatgaatatacgatgaagggaaatatggtagcagttgtgacagatggaacagctgtacttggtcttggtaacattggacctgaagcatctcttccagtaatggaaggtaaagctgtattattcaagagctttgctggtgtagatgcattcccaattgccttaaatacaaacgatgtagataaaattgttgaaactgtaaaattaatggagccaacttttggcggcgttaacttagaagatatcgcagcaccaaactgcttcattattgaagagcgtttgaaaaaagaaacaaatattcctatcttccatgatgatcaacacggaacagctattgtaacagtagcaggtcttgtaaatgcactgaaattagttggaaagaaaatgtctgacattaaagttgtcgcaaatggcgcaggtgcagcaggtattgcaattattaaacttttatatcgctatggtgtacgcgacattattatgtgtgaccgtaaaggcgcaatctatgatggtcgtcctacaggtatgaatccggtgaaggatgaagttgcaaaatatacaaataagaatcgtatagaaggttctttagctgatgttgtacaaggtgcggacgtattcattggtgtatctgcagaaggtgcattaacagaagagatggttcgtacaatgaatgacgatgcgattatttttgcaatggcgaatccagttccagaaattatgccagaattggcaaaagcagcgggcgcagctgttgttggaacaggtcgttctgacttcccgaaccaagtaaataatgtactggcgttccctggtattttccgcggtgcacttgacgtacatgcgacacaaattaacgaagaaatgaagatggcagctgtacaggctattgctgagcttgtagcagaagatgagttaaatgcagactatatcattccggcaccatttgacgcgcgtgtagcgcctcaagtagcggcttacgttgcaaaagcagcaatggagacaggagtagctcgccgtcaagtagatccaaatgagatcgctgaaaaaacaaaacaattagcgctgattggtaaagaataa

SEQ ID NO: 5656 - protein, 412 aa, Bacillus cereus ATCC 14579
MSTLREEALHMHKVHQGKLETVSKVKVENAKDLSLAYSPGVAEPCKEIYDDKSKVYEYTMKGNMVAVVTDGTAVLGLGNIGPEASLPVMEGKAVLFKSFAGVDAFPIALNTNDVDKIVETVKLMEPTFGGVNLEDIAAPNCFIIEERLKKETNIPIFHDDQHGTAIVTVAGLVNALKLVGKKMSDIKVVANGAGAAGIAIIKLLYRYGVRDIIMCDRKGAIYDGRPTGMNPVKDEVAKYTNKNRIEGSLADVVQGADVFIGVSAEGALTEEMVRTMNDDAIIFAMANPVPEIMPELAKAAGAAVVGTGRSDFPNQVNNVLAFPGIFRGALDVHATQINEEMKMAAVQAIAELVAEDELNADYIIPAPFDARVAPQVAAYVAKAAMETGVARRQVDPNEIAEKTKQLALIGKE

SEQ ID NO: 5657 - DNA, 1215 bp, Helicobacter hepaticus ATCC 51449
  CDS (1)..(1215): transl_table=11
atggatttacaaactcttaaaaaagcctatcccaaagctctaccttaccacattggcggcaaagttggtattcagcctcgcaaaagattacgctctattgatgaactaggattagcctatacacccggcgtcgctgtgccttgtaagcagattgaggctaatcctttaagcgcatatgattacacttcaaaaagcaatcttgttgcagttattagcaacggcacagcagtgcttggactcggcgatattggagctatggcaagtaagcccgttatggagggaaaagccattttgtttaaaactttcgcaggagttgatgcctttgatattgagattaacgaaaaagatgtggataaatttgtcgctgtagttaaggcgatttcgcccacatttggtggcattaacctagaagatattaaagctccggaatgctttgagattgagcgaagactcattgaagagcttgatattcctgtaatgcacgatgaccaacacggcacagcaattatctctactgcaggaattatcaacgccttgcaccttgtaaataaaaaagcaaaggatattaaggttgtcgtatttggtgcgggagctgcagctgtggcgtgtgcaaaaatgtataaagcatttggcgtgaaaaatcttgtaatgtttgattctaaaggtgcaattagtgcaaatagaaccgatttaaatgatttgaaaaaagagtttatctgccaagagaactatgcctcatataaagacgcgcttaatggcgcagatgtaatgcttgggctatcaaagggcaatttattaagcggagatgatattaagggaatgaatgaatctcccctcattttcgcactaagtaatcctacgccagaaattatgcccgatgaggtgaaaaaagcacgtcctgatgcaatagttgccacaggacgcagtgatttccccaatcaaattaataatgtgcttggatttccctacatctttaaaggtgcgcttaaagtgcgtgcgagcaaaattaacgaagaaatgaaatttgccgcagcttatgcaatcgctaatcttgcacgtgaaccaatcaccgaaaaacttgaaaaacttttaaagaaaaaaatgagttttggcaaagaatatattatcccctctgcctttgatgaaagacttgatgatgtcgtctcaaatgccgtagcagatgcagcgataaaaagcggcgtggcaagggtgtaa

SEQ ID NO: 5658 - protein, 404 aa, Helicobacter hepaticus ATCC 51449
MDLQTLKKAYPKALPYHIGGKVGIQPRKRLRSIDELGLAYTPGVAVPCKQIEANPLSAYDYTSKSNLVAVISNGTAVLGLGDIGAMASKPVMEGKAILFKTFAGVDAFDIEINEKDVDKFVAVVKAISPTFGGINLEDIKAPECFEIERRLIEELDIPVMHDDQHGTAIISTAGIINALHLVNKKAKDIKVVVFGAGAAAVACAKMYKAFGVKNLVMFDSKGAISANRTDLNDLKKEFICQENYASYKDALNGADVMLGLSKGNLLSGDDIKGMNESPLIFALSNPTPEIMPDEVKKARPDAIVATGRSDFPNQINNVLGFPYIFKGALKVRASKINEEMKFAAAYAIANLAREPITEKLEKLLKKKMSFGKEYIIPSAFDERLDDVVSNAVADAAIKSGVARV

SEQ ID NO: 5659 - DNA, 1431 bp, Rhodopirellula baltica SH 1
  CDS (1)..(1431): transl_table=11
atgaaccagcacagtccgtcgtacgccatcacgatccgtttgcgttattccgattcgcccggcgcgatgggcaagatcaccaccgcgattggcgaagcggatggggcgatcggcgcagtcgacatcgtcaacattcgcggcggcaaaatttcgcgtgacttcacggtcaacgctcgcgatgtcgaccacggcaaacggattgtggaacatcttcgcacggtggaagaggtcgaggtggtgcacacctccgaccgtgtcttcctgatgcacctgggcggcaaaattgaagtcttgccaaagatgccgatcaaaactcgtgacgatttgtcgatggcctacacgcccggcgttgctcgtgtatgcaatgcgatcgcggaagatcccgattcgtcgttcgctttgaccattcggcaaaacaccgttgcagtggtcagtgacggttccgccgttttggggttgggaaacatcgggcctcgcgccgccatgccggtgatggaaggcaaagcgatgctgttcaaagaattcgcgggcgtcgacgcgttccctatttgcttggacactcaagacaccgaagcgatcatcgaaaccgtccgtcagctggcaccgacgtttggcggagtcaacttggaagacatctcggcaccacgttgcatcgagatcgaagaacggctggacaaagaactcgaaatcccggtctttcacgacgatcaacacggcaccgcgatcgtggtgttggcgggattgaagaacagtttgcttcgcgttggcaaagcacttccaaacattcgcatcgtcgtcaacggcgccggtgcggctggaaccgcgatcgtcaagttgctgttgatctccggtgcgaaagacatcgtggtttgcgatcgtgatggagccattcacgcgggcgaacccagccagccggatgcatccaagcagtggattgcagacaacaccaacccgcgtggtgcgtcgggcaagctctctgaagtgattcaaggagccgatgtgttcatcggtgtgtcggcacccaacgttctgcagacggaagacgtcgctgcgatggcggctgatccgatcgtgtttgctttggccaatcctgatccagaaattttgcccgccaacgcggcccctcacgtccgcatcatggcgaccggacggagcgacttccccaaccagatcaacaatgtgctgtgcttccctggtttgttccgtggggtcttagacgttcgagcaacaacgatcaacaacgagatgaaattggctgccgcggaagcgatcgcggcaacgatccctgagtcggatctgctggatgactatgtgatccccagcgtgtttgaccggcgtgtcgcgaaagtggtcgctcaggcggttgcgaaagctgcggtggacaccggcgtcgcacgtcggcgaaacaaacccgccgaagacatcatgtag

SEQ ID NO: 5660 - protein, 476 aa, Rhodopirellula baltica SH 1
MNQHSPSYAITIRLRYSDSPGAMGKITTAIGEADGAIGAVDIVNIRGGKISRDFTVNARDVDHGKRIVEHLRTVEEVEVVHTSDRVFLMHLGGKIEVLPKMPIKTRDDLSMAYTPGVARVCNAIAEDPDSSFALTIRQNTVAVVSDGSAVLGLGNIGPRAAMPVMEGKAMLFKEFAGVDAFPICLDTQDTEAIIETVRQLAPTFGGVNLEDISAPRCIEIEERLDKELEIPVFHDDQHGTAIVVLAGLKNSLLRVGKALPNIRIVVNGAGAAGTAIVKLLLISGAKDIVVCDRDGAIHAGEPSQPDASKQWIADNTNPRGASGKLSEVIQGADVFIGVSAPNVLQTEDVAAMAADPIVFALANPDPEILPANAAPHVRIMATGRSDFPNQINNVLCFPGLFRGVLDVRATTINNEMKLAAAEAIAATIPESDLLDDYVIPSVFDRRVAKVVAQAVAKAAVDTGVARRRNKPAEDIM

SEQ ID NO: 5661 - DNA, 1269 bp, Haemophilus ducreyi 35000HP
  CDS (1)..(1269): transl_table=11
atgggtgatttaaaacaagcagcattagattttcatgaattcccaataccaggtaaaatttcagttacaccaaccaaatctctcaaaactcagcatgatttagctttagcttattcacctggtgtagcagagccttgtttagcgattgaaaaagatccatctactgctcgtcgttacacggcaaaaggcaatttagttgcggttatttcaaatggtacagccgtgttaggtttaggtaatattggtgcattagcatctaaacccgtgatggaaggcaaaggcgtattatttaaaaaattcgcgggcattgatgtgtttgatattgaaattaatgaacaagatccagataaactcattgatattatagcctcgctagaaccaacatttggtggtattaatcttgaagatattaaagcaccagaatgtttttatattgagcagaaattacgtgagcgaatggggatcccggtattccatgatgatcaacatggaacagccattattgttggcgcagcggtgttaaatggtttacaaattgtaggtaaatcgcttgatcaagtgcgtttggttgtgaatggcgcgggtgcatcagccattgcctgtactaatttattatgttctctgggaattaaaaaagaaaatattacgatgtgtgattcaaaaggtattattttcaaaggccgtggcgatcagatcgatcaaaccaaacaagcttatgcgatagtagataatggttggagaacgttgtcagatgcaattaatggtgcggatgttttcttaggctgttcaaaagcaggcgcattaacacaggcaatggttaaaaaaatggcgaaagatccgcttattcttgcattagctaatcccgtgccagaaataacacctgatgaagtaaaacaagcacgtttagatgctattgtttgtacaggtcgttcagattatcgtaatcaagtaaataatgtactgtgttttccattcttatttagaggagccttagatgttggggcaaccgagattaatgaagaaatgaaaatagctgcagccaaagcaattgctgatttagcaaaacaaccggtatctctagaagtattatctacgtatggtgagctatcatttggccctgaatatattattccaatgccatttgatccacgcttgattgttgaggtatctacggcagtggctaaagcggcaatggcatcaggtgttgctactcgtccaatttcagattgtgctgtttatgcagaaaagctaaaaacattgttagcttaa

SEQ ID NO: 5662 - protein, 422 aa, Haemophilus ducreyi 35000HP
MGDLKQAALDFHEFPIPGKISVTPTKSLKTQHDLALAYSPGVAEPCLAIEKDPSTARRYTAKGNLVAVISNGTAVLGLGNIGALASKPVMEGKGVLFKKFAGIDVFDIEINEQDPDKLIDIIASLEPTFGGINLEDIKAPECFYIEQKLRERMGIPVFHDDQHGTAIIVGAAVLNGLQIVGKSLDQVRLVVNGAGASAIACTNLLCSLGIKKENITMCDSKGIIFKGRGDQIDQTKQAYAIVDNGWRTLSDAINGADVFLGCSKAGALTQAMVKKMAKDPLILALANPVPEITPDEVKQARLDAIVCTGRSDYRNQVNNVLCFPFLFRGALDVGATEINEEMKIAAAKAIADLAKQPVSLEVLSTYGELSFGPEYIIPMPFDPRLIVEVSTAVAKAAMASGVATRPISDCAVYAEKLKTLLA

SEQ ID NO: 5663 - DNA, 2289 bp, Bordetella pertussis Tohama I
  CDS (1)..(2289): transl_table=11
atgaaagacaccgaccgccaagccgcactggactaccacgcctatccgcatcccggaaaaatctcggtcacggccaccaagccgctggtcacgcagcgcgacctcagcctggcctactcgccgggcgtggccgccgcctgcgaggagatcgtcgacgatccggtgaatgtgttccgctacaccgggcggggcaacctggtgggcgtgatcaccaacggcacggcggtgctggggctgggcaacatcggcgcgctggcctccaagccggtgatggaaggcaaggcggtgctgttcaagaagttcgccgggctggacgtgttcgacatcgagatcaacgagaccgacccggacaagctggtggagatcatcgccgggctggaagccaccttcggcggcatcaacctggaagacatcaaggcgccggagtgcttcacggtcgagcgcaagctgcgcgagcgcatgaagatcccggtgttccacgacgaccagcacggcaccgccatcaccgtatgcgcggccgtggtcaacggcctggccgtggccggcaagcgcatcgaggacgtcaagctggtgacctcgggcgccggcgccgccgccctggcctgcctggatttgctggtggacctgggactgccgctggagcatatctgggtcaccgacatcgaaggcgtggtctacgagggccgcaagaagctgatggacgccgacaaggaacgcttcgcccgcaagaccaaggcccgcaccctggccgaggtgatcgagggcgcggacgtgttcctgggcctgtcggccggcaacgtgctcaagcccgagatggtggccaccatggcggccaacccgctgatcctggcgctggccaaccccaaccccgagatcctgcccgaggcggcgcacgcggtgcgcgacgacatcgtcatggccaccggccgttcggattacccgaaccaggtcaacaacgtgctgtgctttccgtacatcttccgcggcgcgctggacgtgggcgcgaccacgatcacgcgcgagatggaaaaggcggcggtcctggccatcgccagcctggcgcgcgaagaacagaacgaggtcgtggccgcggcctacggcacctatgacatttcgtttggccgcgactacctgattcccaagccgttcgatccgcgcctgatcgtgcgcatcgcgccggcggtggccaaggcggccatggagggcggcgtggccacgcgtcccatcgccgacctggacgcctacgccgagcagctgcagcagttcgtctaccactccggcgccttcatgaagccgctgttctcgcaggccaagcagatcgtgcgcgacggcggacgggcccgcatcgtgttcaccgagggcgaggacgagcgcgtgctgcgcgccgtgcaggtcatcgtcgacgagaaagtcgccaagcccatcctggtgggccgcccccaggtgctgctgtcgcgcatcgagaaattcggcctgcgcctgcgcctgggccaggacgtcgaggtctgcaacccggaatacgacgagcgcttccaccagtactggaccacctactgggacatgatgtgccgcaacggcatcaccaaggagatggcgcgcgtggaaatgcgccgccgcctgaccctgatcggcgccatgatggtgcacctgggcgacgccgacggcatgatctgcggcgcggtcagcggcttccacgaccacctgcgcttcatcgaccaggtcatcggcagaaagcccggcgcgcagacctacgcggcgatgaacatcctgctgctcaacgagcgcaccgtggccctggtggacacgcacgtcaatgaagaccccagcgccgagcagatcgccgagtacaccgtggcggccgccgaggaaatgcagcgcctgggcctggcgcccaaggtggcgctgctgtcgcgctcgaacttcggctcgggcagctcggcctcgggcgccaagatgcgccacgcgctggagctggtcaaccgccaggcccccggcctggagatcgacggcgagatgcacggcgactgcgccctggacgaatcgctgcgcctgcgcctgctgcccgactctcccctgaagggttcggccaacctgctggtgtgccccaacgtggactccggcaacatcgcctacaacctgctcaagacggtggccggcaagaacgtggcggtcggtcccatcctgctgggcgccaacgcgccggtgcacatcgtcacctccagcgccaccgtgcgccgcatcatcaacatggcggcgctctgcgtgctggacgccaaccgcccgcagtaa

SEQ ID NO: 5664 - protein, 762 aa, Bordetella pertussis Tohama I
MKDTDRQAALDYHAYPHPGKISVTATKPLVTQRDLSLAYSPGVAAACEEIVDDPVNVFRYTGRGNLVGVITNGTAVLGLGNIGALASKPVMEGKAVLFKKFAGLDVFDIEINETDPDKLVEIIAGLEATFGGINLEDIKAPECFTVERKLRERMKIPVFHDDQHGTAITVCAAVVNGLAVAGKRIEDVKLVTSGAGAAALACLDLLVDLGLPLEHIWVTDIEGVVYEGRKKLMDADKERFARKTKARTLAEVIEGADVFLGLSAGNVLKPEMVATMAANPLILALANPNPEILPEAAHAVRDDIVMATGRSDYPNQVNNVLCFPYIFRGALDVGATTITREMEKAAVLAIASLAREEQNEVVAAAYGTYDISFGRDYLIPKPFDPRLIVRIAPAVAKAAMEGGVATRPIADLDAYAEQLQQFVYHSGAFMKPLFSQAKQIVRDGGRARIVFTEGEDERVLRAVQVIVDEKVAKPILVGRPQVLLSRIEKFGLRLRLGQDVEVCNPEYDERFHQYWTTYWDMMCRNGITKEMARVEMRRRLTLIGAMMVHLGDADGMICGAVSGFHDHLRFIDQVIGRKPGAQTYAAMNILLLNERTVALVDTHVNEDPSAEQIAEYTVAAAEEMQRLGLAPKVALLSRSNFGSGSSASGAKMRHALELVNRQAPGLEIDGEMHGDCALDESLRLRLLPDSPLKGSANLLVCPNVDSGNIAYNLLKTVAGKNVAVGPILLGANAPVHIVTSSATVRRIINMAALCVLDANRPQ

SEQ ID NO: 5665 - DNA, 2280 bp, Porphyromonas gingivalis W83
  CDS (1)..(2280): transl_table=11
atgaacagcaaactcgaagaacaggcacgagcctaccatgccgaaggtaagcccggcaaactcgaaatcaggcctacgaagcctcattctactcagcacgatctgacgctggcatatagtccgggagtagcggtgccctgcaaggacatcgaacaggatccggcatttgcatacaaatacacggccaagggcaatctcgtagccgtgatctcgaatggtaccgccgttctgggactgggggatataggtgctttggccggcaagccggttatggaggggaaaggattgcttttcaagatatatgccggtatacatgtgttcgacattgagatagacgagacggatccgaagcggttcatcgaagtggtcaaggctattgctccgaccttcggagggatcaacctcgaagatatcaaagcacccgaatgcttcgaaatagaggagacgctgaagcgagaattggatatacccgtcatgcacgacgatcagcacggcactgcgatcatctcttctgccggcctgatcaatgcactgatgatagcaggcaaaaagatcgaggatgtgcgtatcgtagtgaacggtgcaggagcatcggctttctcctgcaccaaactgtacgaatccttcggtgccagaagagaaaacatcctgatgctcgacagcaaaggggtgatcacggcagatcggacggatctgaccgaacagaaacgctactttgccaccgaacgtaccgatgtgcacacgctggccgaggccattgccggtgcagacgtcttcgtcggtctgtcccgacccaatgtgctcacgcaggatatggtgcggacgatggctcccaatcccattgtatttgctctggccaatcccaatccggagattacttatgagcaagctactgccgctcgtgaggatattatcatggctacggggcgttcggattatcccaaccagatcaacaatgtgatcggtttcccttatatattccgtggagctttggacgttagtgccaaggctatcaatgaggaaatgaaacgggctgctacgatggctatcgcggatttggcgcgagagactgtccccgacgaagtactgcgagcctatggcaatactcagttgcacttcgggaaggactactttattcccaagccggtggatcctcgtctgatcgttcgcgtatctactgccgtagcacgtgcggcagtcgagagcggagtggctgagcatcctattgcggattgggctgcttatgaggccgaattgttgggacgggtgggactgatgagccaccttacgcgtcgtcttcatgaatctgccaagctcaatcctcatcgcgtgatctatgcagcctgcgagaatccttcggtgctgaaagctgccgtatcggcacgtgcacatggaatagcccgaccgatcatgttgggggatgagaagcaaattcgggattttgccgcagagttggatttatctttggagggtatcgaaatcgttaattaccgctccgatgaagaaaaggctcgccgtcatcattatgcccgtgtctttgccgaacagaactggcggcgcggaggcaatcataccgaagcgctggacaagatgttcgaccccaactatttcggtatgatgatggtgcgcttgggggatgccgatgctatgatcacgggcatatacagcaagcatagctatctggcggaagtggccaagcagactgtcggcctgcaagagggcgtcggtcactttgccactatgcatatggtcagcctgaagaacgggccactcttcctggccgatacgctgatcaatcacaacctttcggccgaggctcttgtggacatcgccgtcatggcctatgagaaagcacactgtttcggcgtaaagcctgtattggcgatagtcggcttctccgacttcggagccgacagcgatgcggatagtacggtggaggctgcgaaggctgtggccatattgcatgagaaatacccctatattctcgtggatggagagatgcgggtatccttggctctccatgccgaaaagagagataagcagtatccgcagaataagatcaaggggcgtaatgccaatgttttgatcttcccgcgtctctcggcggcgaatgcatgttaccagttgcttcgcgaagcggacgatgccgaggaggtgctgggtcctattcagatcggtctggctaagcctgtctactttgccgaccatgatgctactgtatcggacatcctcaatatcacggccatggccgtactggacagccacgcctgtctgatttga

SEQ ID NO: 5666 - protein, 759 aa, Porphyromonas gingivalis W83
MNSKLEEQARAYHAEGKPGKLEIRPTKPHSTQHDLTLAYSPGVAVPCKDIEQDPAFAYKYTAKGNLVAVISNGTAVLGLGDIGALAGKPVMEGKGLLFKIYAGIHVFDIEIDETDPKRFIEVVKAIAPTFGGINLEDIKAPECFEIEETLKRELDIPVMHDDQHGTAIISSAGLINALMIAGKKIEDVRIVVNGAGASAFSCTKLYESFGARRENILMLDSKGVITADRTDLTEQKRYFATERTDVHTLAEAIAGADVFVGLSRPNVLTQDMVRTMAPNPIVFALANPNPEITYEQATAAREDIIMATGRSDYPNQINNVIGFPYIFRGALDVSAKAINEEMKRAATMAIADLARETVPDEVLRAYGNTQLHFGKDYFIPKPVDPRLIVRVSTAVARAAVESGVAEHPIADWAAYEAELLGRVGLMSHLTRRLHESAKLNPHRVIYAACENPSVLKAAVSARAHGIARPIMLGDEKQIRDFAAELDLSLEGIEIVNYRSDEEKARRHHYARVFAEQNWRRGGNHTEALDKMFDPNYFGMMMVRLGDADAMITGIYSKHSYLAEVAKQTVGLQEGVGHFATMHMVSLKNGPLFLADTLINHNLSAEALVDIAVMAYEKAHCFGVKPVLAIVGFSDFGADSDADSTVEAAKAVAILHEKYPYILVDGEMRVSLALHAEKRDKQYPQNKIKGRNANVLIFPRLSAANACYQLLREADDAEEVLGPIQIGLAKPVYFADHDATVSDILNITAMAVLDSHACLI

SEQ ID NO: 5667 - DNA, 1221 bp, Wolinella succinogenes DSM 1740
  CDS (1)..(1221): transl_table=11
atgacggaagagctattgaaaaaataccccgaggtattggaatatcatacgggcggaaagcttcaggttgtgcccaagtccaagctaaagaaccaaaaagacctctctttggcttacactcctggtgtcgccgtgccctgcaaagtgatcgaagcggatccctttaaggcgtttgactacaccaccaaaggcaaccttgttgcggtcatctccaatggaaccgctgtccttggtctaggcgatattggtgcacttgcgggcaaacccgtcatggaaggaaaagcagtgctctttaagagctttgccaatatcgattcttttgacattgaagtggatgagaaagatcctgataaattcatcgacatcgttcgggccatcgctcctacctttgggggaatcaatcttgaagatatcaaagctcccgaatgcttctatatcgaagaccgcctcaaagagcttctagacattcccgtgatgcatgacgaccaacatggcaccgcgatcatctccgccgctgccctcatgaacgccatcgaacttgtcggcaaaaagtttgaagatcttaaagtggtcgtcgtgggtgcaggtgccgccgcaatctcttgctcaagaatctacaaaagtcttggcgtcaaaaatattgtgatgtttgatagcaaaggtgcaatcaccgcttctagaaccgacctcaactccactaaacaagagtttatctgtcaagaagagtacaagagctacaaagaggctcttcaaggtgcggatgtgctcctaggtctctccaaggctgacatcattaagggtgaagatatcgaaggaatgaatcccaatcccatggtctttgcgatgagcaatcccactcctgagatcatgcccgatgtggccaaagccgctcgacccgatgtgatcatggctacagggcgtagcgacttccccaatcaaatcaacaacgtccttggtttcccctatatcttcaaaggggcgctcaaagtccgcgccaccaagatcaacgaagagatgaaaatcgccgcggctaaaggcctcgccgctttggccaaacttcctgttcccaaagagcttgaagagattcatggccgacctcttgcctatggcaaagagtatctcatcccctccccttttgacccccgactcaacgaatttgtctctgaggctgtagccaaagcggctatcaagagcggtgtcgcaagaatcaccactctataa

SEQ ID NO: 5668 - protein, 406 aa, Wolinella succinogenes DSM 1740
MTEELLKKYPEVLEYHTGGKLQVVPKSKLKNQKDLSLAYTPGVAVPCKVIEADPFKAFDYTTKGNLVAVISNGTAVLGLGDIGALAGKPVMEGKAVLFKSFANIDSFDIEVDEKDPDKFIDIVRAIAPTFGGINLEDIKAPECFYIEDRLKELLDIPVMHDDQHGTAIISAAALMNAIELVGKKFEDLKVVVVGAGAAAISCSRIYKSLGVKNIVMFDSKGAITASRTDLNSTKQEFICQEEYKSYKEALQGADVLLGLSKADIIKGEDIEGMNPNPMVFAMSNPTPEIMPDVAKAARPDVIMATGRSDFPNQINNVLGFPYIFKGALKVRATKINEEMKIAAAKGLAALAKLPVPKELEEIHGRPLAYGKEYLIPSPFDPRLNEFVSEAVAKAAIKSGVARITTL

SEQ ID NO: 5669 - DNA, 1389 bp, Gloeobacter violaceus PCC 7421
  CDS (1)..(1389): transl_table=11
atgactcggatcacgcccaattccagcttcagcctgaccctgcgcctgcacctgcccaaccagccggggatgctcgccaaggcaaccgccgccatcggcgaggcgggcggcaacatcggcgacatcgagctgattgagcaggagcgcgcctacaccgtgcgcgatctcatcgtcgatgccaccagcgaggagcatgcccacgcaatcgccgagcgggtaagcgccattcccgaattgaagctgctgcaggtggacgaccggacgtttcagatccaccagggcggcaagatccagatcgtcagcaaaattccgctcaggacgcgctcggatctggcgatggcctacacccccggcgtcgggcgcatttgcatggcgattgcccgcaatccggagcgggtctatgaactgaccatcaagcgcaacaccgtggcggtcctcaccgacggctcagcggtactggggctgggcgacatcggcccggccggggcgttgccggtcatggagggcaaggcgctgttgttcaaagaattcgccaatatcgacgcctttccggtctgcctgagcacccagaatgtcgatgagattgtcgagaccgccgtgcgcataagcactgtcttcggcggcatcaacctcgaagacatcagcgccccgcgctgcttcgaagtcgagcgcctgctgcaggagcgcctcgacattccggtctttcacgacgatcagcacggtaccgccatcgtcgtgctcgccgccctcgaaaacgccctcaagctggtggacaagtccctcgcatcggtgcggatcgtcatcaatggggcgggggcggcggggatcgccattcaccagttgctcaccgccgccggggcgcgggcgatcgtgatgtgcgattcccacggcatcgtgagcgccgggcgcgccgacttgaacgccgagaagcgtgcggtcgccgtcgagcagaccggcgccctggccgatgccatggcgggggcggatgtgtttttgggggtgagcaaagggggggtgctcagccgcgcgatggtgcagagcatggcgaccgacccggtggtcttcgccatggccaacccggtgcccgaaatcttgcctgaagaagccgaaggggtggtggcggtgatggccaccggccgcagcgactatcccaaccagatcaacaacgtgctcgcttttccggggatcttccggggtgccctcgactgccgcgcgcgccgggtgaatctggagatgaagatggccgccgcgcgggcgatcgccgccctggtgagccccgacgaaattgcgcccgaatcgattatcccgagcgtgttcgaccggcgcgtggttgtggcggtttcggccgccgtgcagcaggctgcccgcgccacgggcgtcgcccgctaa

SEQ ID NO: 5670 - protein, 462 aa, Gloeobacter violaceus PCC 7421
MTRITPNSSFSLTLRLHLPNQPGMLAKATAAIGEAGGNIGDIELIEQERAYTVRDLIVDATSEEHAHAIAERVSAIPELKLLQVDDRTFQIHQGGKIQIVSKIPLRTRSDLAMAYTPGVGRICMAIARNPERVYELTIKRNTVAVLTDGSAVLGLGDIGPAGALPVMEGKALLFKEFANIDAFPVCLSTQNVDEIVETAVRISTVFGGINLEDISAPRCFEVERLLQERLDIPVFHDDQHGTAIVVLAALENALKLVDKSLASVRIVINGAGAAGIAIHQLLTAAGARAIVMCDSHGIVSAGRADLNAEKRAVAVEQTGALADAMAGADVFLGVSKGGVLSRAMVQSMATDPVVFAMANPVPEILPEEAEGVVAVMATGRSDYPNQINNVLAFPGIFRGALDCRARRVNLEMKMAAARAIAALVSPDEIAPESIIPSVFDRRVVVAVSAAVQQAARATGVAR

SEQ ID NO: 5671 - DNA, 2280 bp, Photorhabdus luminescens subsp. laumondii TTO1
  CDS (1)..(2280): transl_table=11
atggatgaaaaattaaaacagagtgcattggattttcaccagtttccacaaccagggaaaatcacgattactcccactaagcctctgataactcagcgagatttggccttagcttattcaccaggtgttgctgcgccttgcttggaaattgcagaagatccattagcagcttacaaatatactgcgcgtggcaatcttgtggcagtgatatctaatggtagtgcggttttaggattggggaatattggtgcactggcaggtaagcccgtgatggaaggaaaaggtgtcctgtttaaaaagttctcaggtattgatgtatttgatattgaagttgatgagtctgatcctgacaaattgattgatatcattgcggcactggagccgacgtttggggggattaacctcgaagatatcaaagcaccggaatgtttctatattgagaaaaaactgcgggaaaaaatgaacattccggtattccatgatgaccagcatggcacagcgataatttgtaccgctgctgttttgaatggtttgcggattatgaaaaaagagatttcagcggttcgcttagttgtttctggtgccggagctgcctcaattgcctgtatgaacttgctggttgcgcttgggttgcaacgcaagaatattgtggtatgtgactctaaaggggtgatttatcgtggtcgcgataaaaatatggaagaaactaaagcggcctatgcgattgaagacaatggcagccgcacattaggtgatgttatccctggtgccgatattttcctcggatgttccggccctggcgtgttgactcaagacatggtgaaaatgatggctaaagatccactcatcatggcattggcaaaccctgaaccagaaattttgccacccttggcaaaacaagttcgccctgatgcaatcatttgtactggtcgttctgattatccgaatcaggttaataatgtgctctgtttcccgtttattttccgtggtgcgctggatgttggtgcaacaaccattaacgaggagatgaagctcgcctgtgttcatgcgattgcggatttagcgctagcggaacagagtgaagaagtggcttccgcttatgatgatcaggatctgttttttggcccggagtatattattcctaaaccatttgatccgcgcctgattgtgaaaattgccccggcagttgccaaagcagcaatggattccggcgtggcaacccgcccgattaaagactttggcgcatatattgagaagctgaatgagtttgtctataaaacaaacttgtttatgaaacctattttttctcaggctaagaaagcgaaaaagcgtatcgttttggccgaaggggaagaagtacgtgtattgcatgcgactcaggagctgatctctcttgggttggcttacccgattctaattggtcgccctagtgttatcgaaatgcgtatccagaaactgggattgcatattgaagcgggtaaagattttgaagtcgtcaataatgagaatgatccgcgcttcaaaaaatactggcaggaatatcatcacattatgaaacgtcggggtgtttctgctgaacaagctcgccgggcagttatcggtaatcccaccctgattggggcgattatggtactgcgtggtgaggctgatggcctgatttgtggtactgttggcagttacagtgaacattacgatgtcgtgagaaatgtatttggtttccgtgatggggttcatactgctggtgccatgaatgcattgatgttgccaagtggtaatacttttattgcggatacttatgtcaataatgatccaacgcctgaacaattggcagagattacccttatggcttcagagactatccgccgtttcggtattgaaccaaaagttgcgctgctttctcattcaagttttggttccacagattgcctctcagcgcagaagatgcgccagacgctggaattggtgaataaaatgtcaccttcacttgaaattgatggtgaaatgcatggtgatgccgcattggttgaaagtattcgccgtgacatcatgccagatagcccattgaaaggggctgccaatctgttaattatgccgaatatggaatctgcccgtatcagttataacttgctacgtgtcaccagttctgaaggcgttaccgttggcccagttctgatgggggttgccaaaccgatacacattctgacaccaatttcttctgtacgtcgtatcgttaatatggtcgctctggcggcagttgaagcacaaactcatccgctgtaa

SEQ ID NO: 5672 - protein, 759 aa, Photorhabdus luminescens subsp. laumondii TTO1
MDEKLKQSALDFHQFPQPGKITITPTKPLITQRDLALAYSPGVAAPCLEIAEDPLAAYKYTARGNLVAVISNGSAVLGLGNIGALAGKPVMEGKGVLFKKFSGIDVFDIEVDESDPDKLIDIIAALEPTFGGINLEDIKAPECFYIEKKLREKMNIPVFHDDQHGTAIICTAAVLNGLRIMKKEISAVRLVVSGAGAASIACMNLLVALGLQRKNIVVCDSKGVIYRGRDKNMEETKAAYAIEDNGSRTLGDVIPGADIFLGCSGPGVLTQDMVKMMAKDPLIMALANPEPEILPPLAKQVRPDAIICTGRSDYPNQVNNVLCFPFIFRGALDVGATTINEEMKLACVHAIADLALAEQSEEVASAYDDQDLFFGPEYIIPKPFDPRLIVKIAPAVAKAAMDSGVATRPIKDFGAYIEKLNEFVYKTNLFMKPIFSQAKKAKKRIVLAEGEEVRVLHATQELISLGLAYPILIGRPSVIEMRIQKLGLHIEAGKDFEVVNNENDPRFKKYWQEYHHIMKRRGVSAEQARRAVIGNPTLIGAIMVLRGEADGLICGTVGSYSEHYDVVRNVFGFRDGVHTAGAMNALMLPSGNTFIADTYVNNDPTPEQLAEITLMASETIRRFGIEPKVALLSHSSFGSTDCLSAQKMRQTLELVNKMSPSLEIDGEMHGDAALVESIRRDIMPDSPLKGAANLLIMPNMESARISYNLLRVTSSEGVTVGPVLMGVAKPIHILTPISSVRRIVNMVALAAVEAQTHPL

SEQ ID NO: 5673 - DNA, 1278 bp, Vibrio vulnificus YJ016
  CDS (1)..(1278): transl_table=11
atgtccgatgacaatagccagcaaatgacccctgaagaagtacttcgccaacaagctcttgattatcatgctttgccaacggcgggtaaaattgccgtcgctctaaccaaacctgcggaaaccgctaaagatcttgctttagcttacagcccaggtgttgcagagccggttcgcgaaatcgcacagaacccagacaacgtttacaagtacacctcaaagggaaatatggtggccgttatctctaacggtacggcaattttgggcctaggtaacttaggtcctttggcatcaaagccagtaatggaaggtaaggcgctgctgtttaagcgttttgctggtcttgattctatcgatatcgaagtgaagcatcgcaccatcgacgaattcgtggatacggtcgcgaacattgcagatacctttggtggtatcaatttagaagacatcaaagcaccagactgttttgaaattgaaaaacgtctgattgagcgttgtgatgtgccagtgttccatgatgaccaacatggtacggccattgtcaccgcggctggtatgctgaatgcgatcgaactgcagggtaagaagctaaacgaatgtattattgtttgtcttggtgcgggtgcggctgccgtggcgtgtatggagctgctgatcaaatgtggcgcgatgcgtgaaaagatctacatgctggatcgtaaaggtgtgattcatacacgtcgtgatgatctcaacgagtacaagcaactgttcgccaacaatacagacaagcgcacactggaagatgtgatcagcggtgcggatctcttccttggcgtgtctggtccaaacctaatgccagcagaagcgctgaagctgatggcggataaaccggttgtgtttgcgtgttcaaaccctgatccagagatcaagccagagttggcgcatgaagtgcgcagcgatcttatcatgggtacaggccgcagcgactatccgaaccaagtgaacaacgtgttgtgcttcccattcattttccgtggtgcactggatgttcgtgcaagtgaaatcaatgatgaaatgaagttggcagcggttgaagcgattcgtcaattggcgaaagagccagtgccagaagctgtattgaaggcggcaggtgttgaatcactgagctttggtccgcaatacattattcccaaaccaatggattcacgtttgttgcctcgcgtggcgaaagccgttgctcaggcggcagttgataccggtgttgctcgtattccaatgccagaaaactacatggccgggtaa

SEQ ID NO: 5674 - protein, 425 aa, Vibrio vulnificus YJ016
MSDDNSQQMTPEEVLRQQALDYHALPTAGKIAVALTKPAETAKDLALAYSPGVAEPVREIAQNPDNVYKYTSKGNMVAVISNGTAILGLGNLGPLASKPVMEGKALLFKRFAGLDSIDIEVKHRTIDEFVDTVANIADTFGGINLEDIKAPDCFEIEKRLIERCDVPVFHDDQHGTAIVTAAGMLNAIELQGKKLNECIIVCLGAGAAAVACMELLIKCGAMREKIYMLDRKGVIHTRRDDLNEYKQLFANNTDKRTLEDVISGADLFLGVSGPNLMPAEALKLMADKPVVFACSNPDPEIKPELAHEVRSDLIMGTGRSDYPNQVNNVLCFPFIFRGALDVRASEINDEMKLAAVEAIRQLAKEPVPEAVLKAAGVESLSFGPQYIIPKPMDSRLLPRVAKAVAQAAVDTGVARIPMPENYMAG

SEQ ID NO: 5675 - DNA, 2325 bp, Rhodopseudomonas palustris CGA009
  CDS (1)..(2325): transl_table=11
atggcgggggaacgtatggcgtcgtattccgaagatcttcaggcggcagcgctcggctatcatcgccggccgaagcccggaaagctggagattcaggcatcgaagccactcgccaaccagcgcgatctcgcgctggcttattcccccggcgttgccgccgcctgtaacgcgatcgcagccgatccggcgcaggccgccgaactcaccgtgcgagccaatctggtcgccgtcgtcaccaacggcacggcggtgctcggcctcggcaatatcgggccgctcgccgccaagccggtgatggaaggcaaggcggttctgttcaagaagttcgccggcatcgacgtgttcgacatcgagatcgcggccgaaaccgtcgaacgtgtggtcgagaccgtggcggcgctggagccgaccttcggcggcatcaacctcgaagacatcaaggggccggagtgcttcgagatcgaggcgatgctgaaggaccggatgaagatcccggtgtttcacgacgatcagcacggcaccgcgatcatcgtcggcgccgcggtcaagaacgcgctggcgctgaccggcaaggatatttcgaaggtcaagatcgtcgccgccggagcaggcgcggccgcgctcgcctgcctcaatctgctggtgtcgctcggcgcgcagcgcaagaacatcttcgtctgcgacctcgaaggcctggtgtacgaaggccgcaatgtgctgatggaccgctggaaagaggtctacgcgcagaaaaccgacaagcggacgctggccgaagtcatcccgggcgccgatatcttcctcggcctgtccggcccgaacgtgctgtcgcaggacatggtcaagcagatggcagagcggccgctggtgatggcgctggccaatccgacccccgagatcatgccggaagacgtgcgcaaggtacgtcccgacgcgatgatctgcaccgggcgctcggacttcccgaaccaggtcaacaacgtcctgtgcttcccctatatcttccgcggcgcgctcgatgtcggcgccaccgcgatcaacgaggcgatgaagcacgccgccgtcgacgccatcgcccagctcgcgcgcgaagcgccggcggatccggtgtcggtcggcctcgataacgacgaagcgttcggcttcggtccgggctcgctgatcccgagcccgttcgatccgcgcctgatcctgcggatcgcgccggcggtggcgatggccgcgatggattccggcgtcgcgactcgtccgatcacctcgttcgacgattactacgcgcagctcgagcggttcgccttccgctccggcctggtgatgaagctggtgttcgccaaggcgaagggccagcccgtccgcgtcatctacgccgaaggcgaagacgagaaggtgctgcacgcggtgcagaccatcctcgaggagaagctggcgcggccgatcctggtcggccgtccgtcggtggtcgaggcgcggatcaagcgctccggcctgtcgatccgtcccggcgaggacttcgacctcgtcaacccgcaggacgacccgcgctatcgctcctacgtgcagtcctatatcgacatcgccggccgtgccggtgtgacgccggcggcggcgcgtacggtggtgcggaccaactcgacggtgatcgcggcgctcgcggtggcacgcggcgaggcggacgcgatgatctgcggcctcgacggccgctacatgaatcatctgcgccacgttcgcgacgtgatcggccggcgccccggcgtgtcggactacgccgcgctggcgctgctgatcaccaagaaggggccgatcttcatcgccgacacccaggtgcggcccaatccgaccgcggaagaactcgccgaacttgcggcgctcgctgcggtccacgtgcagcgcttcaatatcaagccgaagatcgcgttcctgtcgcattcggacttcggcagcttcccgaccgactcgtcgctgaagatgcgccgcgccaccgcgatcctcgccgagaagcatccggagatcgaagccgacggcgagatgcagggcgacagcgcgctgtcggaaacgtcgcggcagatgatcctgccgcattcgcggctgaccggcgtcgccaacgtgctgatcatgcccaatctcgataccgccaacgtcgcctatcagatgatcaaggtggtgggcgaggcgctgcctgtcggcccgatcctgatcggcccggcgctgccggcgcacatcctgacgccgtcggcgacggcgcgcggcatcctcaacatgaccgcggtggcggtggtcgaggcgcaggagcgggcgggccggcatcagggaacgctgttcgcctga

SEQ ID NO: 5676 - protein, 774 aa, Rhodopseudomonas palustris CGA009
MAGERMASYSEDLQAAALGYHRRPKPGKLEIQASKPLANQRDLALAYSPGVAAACNAIAADPAQAAELTVRANLVAVVTNGTAVLGLGNIGPLAAKPVMEGKAVLFKKFAGIDVFDIEIAAETVERVVETVAALEPTFGGINLEDIKGPECFEIEAMLKDRMKIPVFHDDQHGTAIIVGAAVKNALALTGKDISKVKIVAAGAGAAALACLNLLVSLGAQRKNIFVCDLEGLVYEGRNVLMDRWKEVYAQKTDKRTLAEVIPGADIFLGLSGPNVLSQDMVKQMAERPLVMALANPTPEIMPEDVRKVRPDAMICTGRSDFPNQVNNVLCFPYIFRGALDVGATAINEAMKHAAVDAIAQLAREAPADPVSVGLDNDEAFGFGPGSLIPSPFDPRLILRIAPAVAMAAMDSGVATRPITSFDDYYAQLERFAFRSGLVMKLVFAKAKGQPVRVIYAEGEDEKVLHAVQTILEEKLARPILVGRPSVVEARIKRSGLSIRPGEDFDLVNPQDDPRYRSYVQSYIDIAGRAGVTPAAARTVVRTNSTVIAALAVARGEADAMICGLDGRYMNHLRHVRDVIGRRPGVSDYAALALLITKKGPIFIADTQVRPNPTAEELAELAALAAVHVQRFNIKPKIAFLSHSDFGSFPTDSSLKMRRATAILAEKHPEIEADGEMQGDSALSETSRQMILPHSRLTGVANVLIMPNLDTANVAYQMIKVVGEALPVGPILIGPALPAHILTPSATARGILNMTAVAVVEAQERAGRHQGTLFA

SEQ ID NO: 5677 - DNA, 1173 bp, Onion yellows phytoplasma OY-M
  CDS (1)..(1173): transl_table=11
atgaacatcaaagaaaaagcattagaaatacatgaaaaaaataaaggtaaagtaggtattgtaagtaaagtaaaagtacaaaacttagatgatttagcattagcttatactccaggagtagcagagccttgtttaaaaattaaggaaaatcctagtgatgtttatcgttatactatgaaaggtaatatggtaggtgttgttacaaatgggactgcagttttaggattgggtaatattggtccgaaagcttctttgccagtgatggaaggaaaagctattttgtttaaggaattagcaggtattgattcttttcctatttgtattgattctactgattctcaagaaatagtaaatattgtttctaaaatttcaactgtttttggagcaattaatttagaagatattaagtcgcctcaatgtattgaagttgaagatgctcttgaagctaaacttgatattcctgtttttcatgatgatcaacatggtactgctattgtagttgctgcaggaattctaaattctttaaaagtagttaaaaaatctattgaagatgttcaagtagttattaatggagcaggttctgcagggatggcaattgctaaaatgttgttgttattaaaagttaacaatattgttttagttgataaaacaggagctttatataaaggagtagccaatcttaatgagccgcaaaaaaaattagttgaagtaactaataaatatcaagaaaaaggaactttgaaagaagtacttaaaggaaaagatatttttgttggtgtatctgctcctggtattgttacagctgaaatggtatctactatggcaaaagatgcaattgtttttgctctagctaatccagtaccagaaattatgccagatgaagctaaaaaaggtggggctagaattgttgctactgggagatctgattttcctaatcaagtaaataattgtcttgcttttccaggtgttttccgtggggcattagatgctaaagcaactaaaattaccgaagagatgaaaaaagctgctatttatgctctaaaaaacatcattaaagaacaagatttaaatgaaaataatattttgccaacttcctttaataaagaagtagttaaacaaattgctttggcagtttgtaaagtagctaaagaaactggagtagtaagaaaatga

SEQ ID NO: 5678 - protein, 390 aa, Onion yellows phytoplasma OY-M
MNIKEKALEIHEKNKGKVGIVSKVKVQNLDDLALAYTPGVAEPCLKIKENPSDVYRYTMKGNMVGVVTNGTAVLGLGNIGPKASLPVMEGKAILFKELAGIDSFPICIDSTDSQEIVNIVSKISTVFGAINLEDIKSPQCIEVEDALEAKLDIPVFHDDQHGTAIVVAAGILNSLKVVKKSIEDVQVVINGAGSAGMAIAKMLLLLKVNNIVLVDKTGALYKGVANLNEPQKKLVEVTNKYQEKGTLKEVLKGKDIFVGVSAPGIVTAEMVSTMAKDAIVFALANPVPEIMPDEAKKGGARIVATGRSDFPNQVNNCLAFPGVFRGALDAKATKITEEMKKAAIYALKNIIKEQDLNENNILPTSFNKEVVKQIALAVCKVAKETGVVRK

SEQ ID NO: 5679 - DNA, 2259 bp, Geobacter sulfurreducens PCA
  CDS (1)..(2259): transl_table=11
atgagcaaaaagcaggacgcccttgattatcactccacaggacgaaaagggaagatagaggtaattccgtcaaaaccatgtcttacccagcgcgacctctcccttgcctactcacccggtgtagccgaaccttgtcttgaaatcgaaaaaaaccctgaagacgcatataaatatactgccaaggggaatctggtggcggtattgtccaacggtacggccgttctcggtctcggtgacatcggcgccttggccggcaaaccggtcatggagggcaaaggggttctcttcaagcgttttgccgatatcgatgtcttcgacatcgaggttgacaccaaaaacgctgacgaaataatcaaggtctgccagttgctggaaccgaccttcggcggcataaaccttgaggacatcaaggcacctgaatgcttttatatcgaggaaaagctcaaggagaccatgaacattccggtcttccacgacgatcagcatggcaccgccatcatttccggcgcagccctcatcaatgcccttgaactggtcggcaagaagatcgaagacatcaagatcgtggtcaacggcgccggagcctccggcatcgcctgcgcccagatggcggttgaacttggtgcgaaaaaggagaacatcattctctgcgataccaagggcgtcatcttcaagggacgtagcgccggcatgaacgagtacaaggagcgcttcgccgtcgaaaccgaagaccgcaccctggaagatgccttcaaaaatgccgatgtggcctacggcctctccagcaagggggcattcacccccgaaatgatccgtgacatggcgcccaacccgatcatcttcgccatggcaaaccccgatcccgaaatcacccccgaggaggtggcggcggtccgggccgacgccatcatggccaccggccgctccgactatcctaaccaggtgaataacgttctgggcttccccttcatcttccgcggcgcactcgatgtgcgggccacgaccatcaatgagaccatgaaaaaggcgtgcgtcttcgctctggccgaactggccaaagaggactgcccggactcggtgtgtcgtgcgtacggcaataagaaattcgccttcggtcgcgagtacatcattcctaagccctttgatccccgcgcgctcctgagggtggctcctgccgttgccaaggcggccatggagtcgggggtcgcccgccagcccattgccgacatggaaaagtacatggagcatctggagacgctccagggcaaggccaaggagactctgcgcctcatcatcaacaaggcgaagaccgatcccaagcgggtcgtcttgcccgagggcgagaatgaaaagatccttcgggccgcacaagtgatgatcgaagaggggatcgcctatccgatcctcctgggcaatcggcaggaaatccgcaaaaagatcgaagagctcaaccttgatcttaatggcggcgtcactatcattgacccagacgacagccccgacactgagcgttactcccaagccctgttcgagcagcggcagcggaaagggatcaccctgaccgaggcccgccgcatgatccggcgccggggccgcacttatttcggctgcgagatggtccgttgcggcgatgccgatgctctgctttctggcattgatgcccattatcccgacatcatccgccctgcccttgaagtgatcggcaagcaggaaggcctctccagcgtccacggcctttacctcatggttttcaagcggggcattttcctgctggccgacaccacggtctgcatcgagcctaccgccgaggaactggccgaaaccgccatactggcagccgagaaggcacggcttctggatctcgacccccgtatcgccatgctttcattttccaactttggttccgtcaaccacccccaggccctcaaggtcaagcgggctgcggagatcgtcaaacagcgggcgccggaactgataatcgacggcgagatgcaggccgacaccgccgttgtgcctgacattctggagtcccattatccctttgccacactcaaaggcggagcaaacatcctcattttccccgacctgaactcgggcaacatcagctacaagctccttacccgccttggcggagccgacgccatcggcccgattctcatgggaatgaagaagccggtgcacgtactgcagcgcggcgatgacgtaatggatatcgtcaacatggcagccattgccgttgtcgacgcgcaaagcaactga

SEQ ID NO: 5680 - protein, 752 aa, Geobacter sulfurreducens PCA
MSKKQDALDYHSTGRKGKIEVIPSKPCLTQRDLSLAYSPGVAEPCLEIEKNPEDAYKYTAKGNLVAVLSNGTAVLGLGDIGALAGKPVMEGKGVLFKRFADIDVFDIEVDTKNADEIIKVCQLLEPTFGGINLEDIKAPECFYIEEKLKETMNIPVFHDDQHGTAIISGAALINALELVGKKIEDIKIVVNGAGASGIACAQMAVELGAKKENIILCDTKGVIFKGRSAGMNEYKERFAVETEDRTLEDAFKNADVAYGLSSKGAFTPEMIRDMAPNPIIFAMANPDPEITPEEVAAVRADAIMATGRSDYPNQVNNVLGFPFIFRGALDVRATTINETMKKACVFALAELAKEDCPDSVCRAYGNKKFAFGREYIIPKPFDPRALLRVAPAVAKAAMESGVARQPIADMEKYMEHLETLQGKAKETLRLIINKAKTDPKRVVLPEGENEKILRAAQVMIEEGIAYPILLGNRQEIRKKIEELNLDLNGGVTIIDPDDSPDTERYSQALFEQRQRKGITLTEARRMIRRRGRTYFGCEMVRCGDADALLSGIDAHYPDIIRPALEVIGKQEGLSSVHGLYLMVFKRGIFLLADTTVCIEPTAEELAETAILAAEKARLLDLDPRIAMLSFSNFGSVNHPQALKVKRAAEIVKQRAPELIIDGEMQADTAVVPDILESHYPFATLKGGANILIFPDLNSGNISYKLLTRLGGADAIGPILMGMKKPVHVLQRGDDVMDIVNMAAIAVVDAQSN

SEQ ID NO: 5681 - DNA, 1323 bp, Wolbachia endosymbiont of Drosophila melanogaster
  CDS (1)..(1323): transl_table=11
atgaacgatgatttagatagtaccacaaaacaagaagcgcttaagtatcacagcagaggtggtaaccctggtaaaatttcaatcatgccaacaaaacctttatctacccagtatgatttgtcacttgcttattcccctggtgttgcagctccgtgccttgaaatagctaaaaatcctgaggttgtttatgattatacagcaaaaagcaactgtgttgctgtcatttcaaatggcactgcagtgcttggacttggtaatatcggtcctcttgctgcaaaacctgtcatggaaggcaaagctgttttatttaagcgttttgctgatattgatgcagttgatatagaagttggtacagaaaatatagaagatttcatcaatgcagtaaggtatcttgggccaagttggggggggataaatttagaagatataagatctcccgattgttttataatagagaaacgcctgaatgaactgatggatattccagtgttccatgatgaccagcatggaactgcggtggttgttgcagctggcatagaaaatgctcttgatattgttgaaaagaaattagaggacgttaagatcattatgaatggtgctggagcagccggtattgcatgtttagaaatactaaagtccatgggcgctaaaaatatagtgctgtgtgataagcaaggagtaatatacaaaggtagaaacgaggatatgaatgagtggaaggaaaagtatgcaattgatacttccgaacgttctctacttgatacaataaaaggcgctgatgtattcatcggactatctgcaaaagatgtgttaaatgaagagatgttaaagagtatgggcaaagacccgattatttttgctcttgccaatcccgatccagaagtaaggcctgagtttgcaaaatctgtgaggccagatgcaataattgcaactggtaggtcagattacaacaaccaagtcaacaacgtaatgggttttccttatatatttagaggggcacttgatgtacatgcaacaacaataaatgatgaaatgaaaattgcagctgcagatgcaatagcaaagcttgcccgtgagccagtaccaggtgagatatctgcagtctatggcagtcgtaaaatgggctatggacgtgaatatataatacctactccatttgacccaagattaatttctatagtagctcctgctgttgcaaaagccgcagttgattcaggtgttgcaagaaaggcaatacaagattggagtaaatatgaaaatcaattaaaatctcgtctttctaatgttctcagcacgctgaatttactatcttcacatatgtaa

SEQ ID NO: 5682 - protein, 440 aa, Wolbachia endosymbiont of Drosophila melanogaster
MNDDLDSTTKQEALKYHSRGGNPGKISIMPTKPLSTQYDLSLAYSPGVAAPCLEIAKNPEVVYDYTAKSNCVAVISNGTAVLGLGNIGPLAAKPVMEGKAVLFKRFADIDAVDIEVGTENIEDFINAVRYLGPSWGGINLEDIRSPDCFIIEKRLNELMDIPVFHDDQHGTAVVVAAGIENALDIVEKKLEDVKIIMNGAGAAGIACLEILKSMGAKNIVLCDKQGVIYKGRNEDMNEWKEKYAIDTSERSLLDTIKGADVFIGLSAKDVLNEEMLKSMGKDPIIFALANPDPEVRPEFAKSVRPDAIIATGRSDYNNQVNNVMGFPYIFRGALDVHATTINDEMKIAAADAIAKLAREPVPGEISAVYGSRKMGYGREYIIPTPFDPRLISIVAPAVAKAAVDSGVARKAIQDWSKYENQLKSRLSNVLSTLNLLSSHM

SEQ ID NO: 5683 - DNA, 1200 bp, Bacillus cereus ATCC 10987
  CDS (1)..(1200): transl_table=11
atgttagaaaatcaaattaatgaaagatcattgttattgcataaagaattagtagggaaaattgaaattacaagtaaggtagaagtaaattcagcagatgatttaagtctgacatatacaccaggtgtagcggagtcttgcaaagcaattgcagcagatgaagaaacagtgtatgactatacagcacgtggtaatatggtggcagttatctcagatggaacagcggtactcggtttagggaatattggcccgaaagcagctatgcctgttatggaagggaagagtattttatttaaaaaatttgcgaatgtagatgctttcccgttatgtttaggtacgactgatgtggatgaaatcgttacccttgtaaaaaatttagagcctacatttgcagggatcaatttagaagatattgcagcaccacgttgttttgaaattgaaaaacgattaaaagaagaaacgaatattcctgtatttcatgatgatcaacatggaacagctattgtcgttttagcagctgttattaatgcattaaaggttgttagaaaacaaatggatcatgtgaagattgttattaacggtgcgggttcggcaggaattgcaattggaaaattattattaaaggctggtgcacagcacattacgttagttagcttagaaggtattgtttgtgaaggtgaaacatggatgaacgaagcgcaaattgaggtttcaaaaaagacaaatcgagaacatgtgcgtggaacgttgaaagaagcaattcaccaagctgatatttttattggcgtatctgctcctaacgtattaacgaaagaatttgtacagacgatgaatgagaaagcaattgtgtttgcaatggcgaatccaattccagaaatcttccctgaggatgcattagaggctggagcagctgtagtaggaactgggcgctcggattatgcgaatcaagtaaataatgtattggcgttccctggaatattccgcggtgcgttagatgtgcgtgcgactgatattacagaagaaatgaaattagcggcagcatatgggatcgctaacatcattacggacgaagaacgtaatgcgaattatgtaatccccaatccattagataaaagagttgttccaagtgttgctgaagcagtagcgaaagcagcgattgattcaggtgtggcacgaattacgagaataccaagttattaa

SEQ ID NO: 5684 - protein, 399 aa, Bacillus cereus ATCC 10987
MLENQINERSLLLHKELVGKIEITSKVEVNSADDLSLTYTPGVAESCKAIAADEETVYDYTARGNMVAVISDGTAVLGLGNIGPKAAMPVMEGKSILFKKFANVDAFPLCLGTTDVDEIVTLVKNLEPTFAGINLEDIAAPRCFEIEKRLKEETNIPVFHDDQHGTAIVVLAAVINALKVVRKQMDHVKIVINGAGSAGIAIGKLLLKAGAQHITLVSLEGIVCEGETWMNEAQIEVSKKTNREHVRGTLKEAIHQADIFIGVSAPNVLTKEFVQTMNEKAIVFAMANPIPEIFPEDALEAGAAVVGTGRSDYANQVNNVLAFPGIFRGALDVRATDITEEMKLAAAYGIANIITDEERNANYVIPNPLDKRVVPSVAEAVAKAAIDSGVARITRIPSY

SEQ ID NO: 5685 - DNA, 1890 bp, Cryptococcus neoformans var. neoformans B-3501A
  CDS (1)..(1890)
atgtatccaggcagctctacatctgctctcactcgcgcggctattgcccgtattgctcttcgccgatcgactgtcgcttgcaggaggagtgttaccagccgtactatcagtgctgatgataagaacttaatccctatacggacaaatcttcgaggttctgccttgctcaacactcctcgtctcaacaagggtgctggttttacgcgagaagaacgacaaatctttggccttgaaggttttttgccttacgatgtccactctttggagaagcaatgtctgagagcttacaaccagctctgcaaacaaccctccgtcatcctcaagcatgcttttctcgcttcccttcgtgaccaaaatcaggtcctcttctataggcttatgcaagatcgtcttaaggagcttttaggtgtcctttacactcctggtgctgccgaggccgttgctggttactcctcccttttcagaaggcctgttggttgctatatttctttccctaatcaagatggcatgcgagctcagctcgagggccaccttaccgatgttaatcgtactgccgacgtcgcctacgactcaaacaagccggacgacgctatcgacttggtcgtcgtaaccgacgccgaggctattctcggtatcggagatcaaggtgtcggtggtattaccatctcaacctccaaggccgcgctttacactctcggcgccggcatcaaccctaaccgtatcctccccgtcgtcctcgattgtggtaccgacaatcatgctctcttttccgatcccctgtacatgggctggaagcgaacccgaataaggggaaagaactacgaccagttcatcgaccgttttattaccaactgccgagagcttttccctaatgctatcatccactttgaggactttggtatggcgaacgcttacaggttgatggagaagtacaaaaacatccccatgttcaacgatgacattcaaggtaccggtgctgttgcccttgctgctttgctttccgccatcaaagttgccggtagccgactctctgaccaacgtatcgtcatctacggtgccggttccgccggtatgggtattgccgaccagatcaaggatggtctcatgatcctcgagggtctcaataaggacgaggctgctcgtcgattctggtgtgttgaccgaaatggtttgttggttgagagcatgggcaacggtttgagacactctcagatgccttacgccaggcctgatgccgaggtagaacactggaacaaagaggatgaggacaggaacggtatttggttgatggacgttattaagaacgtgaagcccaccgtgttaatcggtacttctacccactctagggcgttctctgaggagcttgtgcgagagatgggcaagcacgtcgaaagacccatcatctttcctatgtctaaccctaccgctttatgcgaggttgaccctgccgatgctctcgcttggactgagaaccgtgctctcgtcgccactggctctcccttcccccctgttcagctcggcaacggccaagaatacattgttgcccaaaccaataacgctcttatctaccccgccctcggtctcggtgccattctcgcgcgatccaagaccatctcaaattctatgctcatggccggtgtgaactctctcgcctccctttctccggccctctccaactctgaggcttcccttcttcccgacttggctgatgtccgaaaggtctccgttgacgtggctgctgccgttgtcaggcaggctgttgaggatggaaatgcgtatgacgaaaatactatcaagtacgtgaagggtaagggtgatgtgtctttggaagagtatattaggagcagaatgtgggatgccgtctaccgacccctcgagttggtcgattaa

SEQ ID NO: 5686 - protein, 629 aa, Cryptococcus neoformans var. neoformans B-3501A
MYPGSSTSALTRAAIARIALRRSTVACRRSVTSRTISADDKNLIPIRTNLRGSALLNTPRLNKGAGFTREERQIFGLEGFLPYDVHSLEKQCLRAYNQLCKQPSVILKHAFLASLRDQNQVLFYRLMQDRLKELLGVLYTPGAAEAVAGYSSLFRRPVGCYISFPNQDGMRAQLEGHLTDVNRTADVAYDSNKPDDAIDLVVVTDAEAILGIGDQGVGGITISTSKAALYTLGAGINPNRILPVVLDCGTDNHALFSDPLYMGWKRTRIRGKNYDQFIDRFITNCRELFPNAIIHFEDFGMANAYRLMEKYKNIPMFNDDIQGTGAVALAALLSAIKVAGSRLSDQRIVIYGAGSAGMGIADQIKDGLMILEGLNKDEAARRFWCVDRNGLLVESMGNGLRHSQMPYARPDAEVEHWNKEDEDRNGIWLMDVIKNVKPTVLIGTSTHSRAFSEELVREMGKHVERPIIFPMSNPTALCEVDPADALAWTENRALVATGSPFPPVQLGNGQEYIVAQTNNALIYPALGLGAILARSKTISNSMLMAGVNSLASLSPALSNSEASLLPDLADVRKVSVDVAAAVVRQAVEDGNAYDENTIKYVKGKGDVSLEEYIRSRMWDAVYRPLELVD

SEQ ID NO: 5687 - DNA, 1746 bp, Strongylocentrotus purpuratus
  CDS (1)..(1746)
atgtttagaacgagtcgagttatcgcaggctcctgccgccgctacgctgcctccacatcgggaggtgaccaagccaggcttcaggggttgaaggctctccggctcccgcaaatgaacaagggtacagcattcaccctgagggagcgccaggcactgggtattcatggcttgcttccacccgtcatcagctccatggagctacaggaagaaaggatcttacacaatctcaaagaccacagtcctctagataaatatgtgcagcttatggacctacaggaccgcaatgagaagcttttctacagggtcatgtgtaaccacatcaccgacatgatgcccattgtgtacacgcccactgtcgggttggcatgccaacggtatggctacatcttccgtcgccctagggggctcttcattacaaagtacgataagggacatgttcgtgacatcatcgcttcctggccagagcaaaacgtcaaggctatcgtcgtaactgatggagagaggattctaggtctgggtgatctcggctgttatggtatgggcattcctgtgggtaagctagccctgtacactgccattgctggagtgcatccatcccagtgtctaccagtcatgatcgatgttggaacggaccgccagtcgctccgtgatgaccccctctacattggtttgaaggacaagcgggatcgatctgaaagctacgacgagctaatcgatgagttcatgcaagcagtggtagaaaggtatggacagaattgcctgatccaatttgaagacttcgccaacagcaatgccttcagactgctcgagaaataccgcaacaaatacaccgtcttcaatgatgatatacagggtacagcatcagtagccgtagctggattcctggccagcttgagaatcacaaagacaaagctgggtgataacaagttcctcttccagggtgctggtgaggcttcattaggaatagccgatctgatcgtgaacgccatgcaggaggaaggactcagcgtggaggaggccaggaaaagaatctggctcgttgactccagagggctcattgttcagggtagaccatctggtggaatcacagagcacaaaggtcgctacgcccacgaacacaaagacctgacagatctaactgaaatagtcaaggcagtcaaaccaaccgtacttataggtgccgccgccatcagtggcgtcttcaccccggagatcctcaaggccatggcctccttcaacaagcgccccgtcatcttcgccctaagcaacccaacaagcaaggccgagtgcaccgcagagcaggcctacacccacaccaatggtcagtgtgtcttcgccagtggaagcccctttgatccgttcacattacccaacggaaagaccttgataccaggacaaggtaacaatgcttacgtcttccctggcgtggctctaggtatcatcgcctttgggatcaagcacgtcagtgattccatcttcctcgaggcagcaaagtgcattgccaaattggtaacccaagcccaccttgacgaaggacgagtctacccccctcttgaggacgtgagggaggtttccgtcaagatcgctgtacgcgtcggcgagtacgcttacgacaccgggatggcatccaagtatccccggccggaggatatggaggcgtacgtacgaaagtgcgtctacgactacgaatatgagtctttcacaccggactactacgactggccgactaccgagtcaaaatactag

SEQ ID NO: 5688 - protein, 581 aa, Strongylocentrotus purpuratus
MFRTSRVIAGSCRRYAASTSGGDQARLQGLKALRLPQMNKGTAFTLRERQALGIHGLLPPVISSMELQEERILHNLKDHSPLDKYVQLMDLQDRNEKLFYRVMCNHITDMMPIVYTPTVGLACQRYGYIFRRPRGLFITKYDKGHVRDIIASWPEQNVKAIVVTDGERILGLGDLGCYGMGIPVGKLALYTAIAGVHPSQCLPVMIDVGTDRQSLRDDPLYIGLKDKRDRSESYDELIDEFMQAVVERYGQNCLIQFEDFANSNAFRLLEKYRNKYTVFNDDIQGTASVAVAGFLASLRITKTKLGDNKFLFQGAGEASLGIADLIVNAMQEEGLSVEEARKRIWLVDSRGLIVQGRPSGGITEHKGRYAHEHKDLTDLTEIVKAVKPTVLIGAAAISGVFTPEILKAMASFNKRPVIFALSNPTSKAECTAEQAYTHTNGQCVFASGSPFDPFTLPNGKTLIPGQGNNAYVFPGVALGIIAFGIKHVSDSIFLEAAKCIAKLVTQAHLDEGRVYPPLEDVREVSVKIAVRVGEYAYDTGMASKYPRPEDMEAYVRKCVYDYEYESFTPDYYDWPTTESKY

SEQ ID NO: 5689 - DNA, 1314 bp, Leptospira interrogans serovar Copenhageni str. Fiocruz L1-130
  CDS (1)..(1314): transl_table=11
atgaaattttatcgtcgcaaggttgaatttgaaaaacatgggaaaaatcgtatgagggaaaaatcgttacaatatcacgcgcttcatcctaagggaaaaattgaagtagttcctacaaaacctactgaagattcttacgatctttctctggcttattctcccggtgtcgcttatccttgtttggaaattaaggattctcccgaactcgtttatgaatatacaaacaaaggaaatcttgttgggatcattacaaacgggaccgccattttaggattaggtgatataggtgctcttgccggtaagccggttatggaaggaaaggcggttctttttaaaaaatttgcggggatagacgtatttgatatagagatcaatacaaaagatccggatgaattcattcgtgcggtgaaacttctggagccaacttttggcggtattaatctagaagatattaaagctcctgaaagtttttatattgaagaacaacttatcgaaaagatgaacattcctgtttttcacgacgatcaacatggaaccgcgatcatcactgtcgctggtttattgaactcgtttaaactcaccggtaaaaatccggacgacgttaaagtagtgatttgtggagcgggtgctgcaggaattgcaattgcagaactcattcaacatataggaatcaaaaaagagcagatttttctggtcgataccaaaggtgtgattcatcataatagaaacgatctaaacgattctaaaaagaagtatattcaaaaaacagattctaccacactcagagatgtaatgaaaggttcagatatttttattggtgtttccgttgagaatatggtagatgaagatatggttcgttctatgtctaaaaatccagtgatctttgctcttgcaaatcctgatcccgaaatcccatatcgtgttgcaaaggcagttcgttccgatttaattatgggaactggaagaagtgataatccaaatcaggtgaataacgtattaggatttccttttatttttagaggcgctctagatgttagagctcgtcatattactttagagatgaaacttgcggccgctcgttctttggcggaattggctcgtttggaagttcctgaagtggttagtaaagcttatggcggagagaaatttacgtttggtccggaatatctgattccaaaaccttttgataaacgagttttatttcatgtggccccggcagttgcagaggctgcagttgcaagtggctctgcccgtattccttatttgggaagagaaaaatatttaggttttctcgaaggaattattaaaagttag

SEQ ID NO: 5690 - protein, 437 aa, Leptospira interrogans serovar Copenhageni str. Fiocruz L1-130
MKFYRRKVEFEKHGKNRMREKSLQYHALHPKGKIEVVPTKPTEDSYDLSLAYSPGVAYPCLEIKDSPELVYEYTNKGNLVGIITNGTAILGLGDIGALAGKPVMEGKAVLFKKFAGIDVFDIEINTKDPDEFIRAVKLLEPTFGGINLEDIKAPESFYIEEQLIEKMNIPVFHDDQHGTAIITVAGLLNSFKLTGKNPDDVKVVICGAGAAGIAIAELIQHIGIKKEQIFLVDTKGVIHHNRNDLNDSKKKYIQKTDSTTLRDVMKGSDIFIGVSVENMVDEDMVRSMSKNPVIFALANPDPEIPYRVAKAVRSDLIMGTGRSDNPNQVNNVLGFPFIFRGALDVRARHITLEMKLAAARSLAELARLEVPEVVSKAYGGEKFTFGPEYLIPKPFDKRVLFHVAPAVAEAAVASGSARIPYLGREKYLGFLEGIIKS

SEQ ID NO: 5691 - DNA, 1173 bp, Clostridium thermocellum ATCC 27405
  CDS (1)..(1173): transl_table=11
atggattacagaaaagaatcactaaggcttcacggtgagtggaagggtaaaattgaggttatacacaaggtacctgtttcaaccaaggaagagttgtcgcttgcttatacaccgggtgttgcagaaccatgtcttgcaattcagaaagatgttaatctttcttatgaatatacaagacgttggaacctggtagcggttattaccgacggtacggcggttttagggctcggagacataggacctgaagccggaatgcctgttatggaaggtaaatgcgtactcttcaagaagtttggtgatgtggacgcatttccgctctgtatcaaatcaaaagacgtagatgaaattgtaaagacaatcaagctcatctccggaagctttggcggtataaacctcgaagatatatccgctccgagatgctttgaaatagaaagaagactcaaagaggaatgtgacattccaatattccatgatgaccagcacggtacagccgttgttactgttgcagcaatgatcaatgcattaaagcttgtcaacaagaaaatcgaggatatagaagttgttgtaaacggttcaggtgctgccggcatagctgtaacaagactgctcatgagtatggggcttaagaaagttatcctttgcgataccaaaggtgcaatttatgatggaagagacaacttaaacagtgaaaaagccctgattgctaaaatctcgaacctcgagaaaaagaaaggtactcttgaagatgtaatcaagggagctgacgtattcatcggtctttccgttccaggaacagttacaaaggatatggtaaaatccatggcaaaggatccgattatctttgctatggcaaatcctactcctgaaataatgcctgatgaagcaaaagaagcaggagcaaaggtagtgggtaccggaagatccgacttcccgaaccagataaacaacgttcttgcgttccccggaatattcagaggtgcgcttgatgtaagagcaagagatatcaatgatgaaatgaagatagccgctgcaaaagcaatagcttctctggtaagcgatgaagagctcaatcctgacttcattcttccgctcccatttgacccaagagtcggaaaaacagttgctgcagcagttgctgaagcagcaagaaaaaccggagttgcaagaatataa

SEQ ID NO: 5692 - protein, 390 aa, Clostridium thermocellum ATCC 27405
MDYRKESLRLHGEWKGKIEVIHKVPVSTKEELSLAYTPGVAEPCLAIQKDVNLSYEYTRRWNLVAVITDGTAVLGLGDIGPEAGMPVMEGKCVLFKKFGDVDAFPLCIKSKDVDEIVKTIKLISGSFGGINLEDISAPRCFEIERRLKEECDIPIFHDDQHGTAVVTVAAMINALKLVNKKIEDIEVVVNGSGAAGIAVTRLLMSMGLKKVILCDTKGAIYDGRDNLNSEKALIAKISNLEKKKGTLEDVIKGADVFIGLSVPGTVTKDMVKSMAKDPIIFAMANPTPEIMPDEAKEAGAKVVGTGRSDFPNQINNVLAFPGIFRGALDVRARDINDEMKIAAAKAIASLVSDEELNPDFILPLPFDPRVGKTVAAAVAEAARKTGVARI

SEQ ID NO: 5693 - DNA, 1185 bp, Clostridium difficile 630
  CDS (1)..(1185): transl_table=11
ttgatgtctaaggattatgcaaaattggcattagaaatgcatgaaatcaacaaagggaaagtaagtgtagaaagcaaggtagaaattaaaactaaggatgatttatcaacagcatatacaccaggggttgctgaaccttgtttaaaaatacatgaaaatcaagatgatgtttatagatacacttctaaagggaatctagtagcagtagttagtgatggaagtgctgtacttggattaggtaacattggtgctgaagcatctatacctgttatggaaggtaaagctatattatttaaacaatttgcagatgtagacgcttttccaatatgtttaaagactaatgatgtagatgagatagttaaatctgtagagttgatggagcctgtatttggaggtataaatttggaagacatatcttctccaagatgttttgagatagaagagagattaaaaaaatctttaagtatacctgtttttcatgatgaccaacatgggacagcaataatagttgcagcagccataataaactcaataaagttaattgaaaataaaaaaatagaagatttagaaatagttataaacggagcaggagctgctggtatagccatagcaaagatactacttaatatgaatgttaaaaatataattttatgtgatagaagtggagcattggaagctagtatagaaaatctaaactatgttcaaaaagaaatgttaaaagtaacaaatataagaaatgaaaaaggacctttaaaagatattataaaaggaaaagatgtatttattggtgtttcaggtccaggagctgttacaaaggaaatggttgaaagtatgtctgagaagccaataatattggcaatggcaaatcctactccagagataatgccagaagaagcaaaattaggtggagcatttataatgggaacaggtcgttcagacttccctaatcaagtcaataatgtactggcttttcctggaatatttagaggtgcacttgatgttaaggctaaagagataaatgaagaaatgaagatagctgctgcatatgcaattgctaatacaataagtgatgaagaaatatgcccagagtatatattaccagatgtatttaataagaatgtagtaaaaaatgttgctaaggcagttaaagaagcagcgataaaaaccaaagtaaatagaatataa

SEQ ID NO: 5694 - protein, 394 aa, Clostridium difficile 630
MMSKDYAKLALEMHEINKGKVSVESKVEIKTKDDLSTAYTPGVAEPCLKIHENQDDVYRYTSKGNLVAVVSDGSAVLGLGNIGAEASIPVMEGKAILFKQFADVDAFPICLKTNDVDEIVKSVELMEPVFGGINLEDISSPRCFEIEERLKKSLSIPVFHDDQHGTAIIVAAAIINSIKLIENKKIEDLEIVINGAGAAGIAIAKILLNMNVKNIILCDRSGALEASIENLNYVQKEMLKVTNIRNEKGPLKDIIKGKDVFIGVSGPGAVTKEMVESMSEKPIILAMANPTPEIMPEEAKLGGAFIMGTGRSDFPNQVNNVLAFPGIFRGALDVKAKEINEEMKIAAAYAIANTISDEEICPEYILPDVFNKNVVKNVAKAVKEAAIKTKVNRI

SEQ ID NO: 5695 - DNA, 2313 bp, Herminiimonas arsenicoxydans
  CDS (1)..(2313): transl_table=11
atggattcgaatattgacaagaaagaagaactccgcctccagttacgacaggccgcacttgagtatcacgagtttcccactcccggaaaaatcagcgtcacccctaccaagcaggttaccaatcagcgcgatctggccctggcgtatacgccgggcgtagcggtcgcctgtgaagaaattgctgccaatccggccgattcctatcgctatacctcgcgcggcaacctggtagcagtcatcactaacggcaccgcagtcctgggtctgggtaacatcggccccctcgcggccaagcctgtgatggaaggcaagggcgtgctgttcaagaaatttgccggtatcgatgtatttgatatcgaaatcaacgaaactgatcccgataaattgtgcgacatcatcgcctcgctggaacctactttcggcggcatcaatctggaagacatcaaggcgccggaatgtttctacatcgagcgtaccttgcgcgagcggatgaaaatcccggtcttccatgacgatcagcacggcaccgcaatcatcgtcgccgccgcgatcctgaatggattgaaagtcgtcgggaaaacaatacagaataccaagctggtcgtgtccggcgcaggggctgcggcgctcgcctgcctggatttgctggttgatctcggcttcccgctggaaaatattttcgtcaccgatctggccggcgtggtgtatcacgggcgggtcgaattgatggatccggccaaggaaagatttgcgcaaaaaaccgatgcgcgcaagctggcggatgtcatcggcggcgccgatgtttttctcggcgtgtccggcggcggggtattgaaacccgatatggtggctgcgatggccgaccggccgctgattctggcgctggccaatccgacccccgaaattctgccggaagaagtacgcgcagtacgcagcgatgcggtgattgcgaccgggcgttccgactatccgaatcaggtcaacaacgtcctgtgctttccttacatcttccgcggtgcgctggattgcggcgcgaccacgattacgcgtgagatggaaatcgcggccgtgcacgcgattgcgcaactggcgcaggccgagcaatccgatattgttgccaccacttacggcatcaataatctgagcttcgggcccgactacattattccgatgccgtttgatccgcgcctgatgatcaagatcgcaatggcagtggcgaaggcggcggaagagtgcggtgtggctgcgcgtccgatcaaggacatggaagcctacgcggataaattgcagcaattcgtttatcgcagcggtaccttcatgaagcccatcttccagattgcgaaatcgacgccgtcggatttgaagcgcatcgtttatgcagaagcggaagaagagcgcgtgctgcgcgcggtacaggtagtggtcgatgaaaaattggcaagacctattctgatcggccgtccggctgtgctgttgcagcgtatcgagcgttttggcttgcgcatcaagccggatatcgatttcaccatcatcaatcccgagcacgacgatcgctatcgcgatttctggcaaacgtatctggccatgaccttgcgcaaaggcgtgaccgaacagtacgcgaaactggaaatgcgtcgccgtcataccctgatcggcgcaatggctattcacaagaaatacgccgacggcatgatatgcggcactttcggtacgacagatctgcatctcaaatatgtcgaacaggtgctgggcaagcgtgccggcgtcaactcgtatgcggcgatgaattgcgtgattatgtcggatcgccagttgttcctggtcgatacgcacgtcaatgaaaatccgagcgcggagcaactggccgagatcacgatactggcagcggaagaaatgcgccgcttcggtatgccgccgcgcgctgccttgctgtcgcattccaatttcggttcaagcaatagtgaatcggcgcaaaaaatgcgcaaggtgctgcaactggtcagggagcgcgctcccgatctggagatagatggcgagatgcatggtgaccttgcaatgaatgcggtggaattgaaaaaggcgatgccggattcggccttgaaaggcgatgccaatctgctggtcttcccgaacatcgattccgccaatattgcctacaacctgctgaaaacgacagtcggtaacggtgtggcgatcgggccgatactgctcggttgcgacaagccggtacatattctgacgccatcggcaaccgtgcggcgcatagtcaacatgacggcactgtgtgtggcggatgcggtagcggaacgctag

SEQ ID NO: 5696 - protein, 770 aa, Herminiimonas arsenicoxydans
MDSNIDKKEELRLQLRQAALEYHEFPTPGKISVTPTKQVTNQRDLALAYTPGVAVACEEIAANPADSYRYTSRGNLVAVITNGTAVLGLGNIGPLAAKPVMEGKGVLFKKFAGIDVFDIEINETDPDKLCDIIASLEPTFGGINLEDIKAPECFYIERTLRERMKIPVFHDDQHGTAIIVAAAILNGLKVVGKTIQNTKLVVSGAGAAALACLDLLVDLGFPLENIFVTDLAGVVYHGRVELMDPAKERFAQKTDARKLADVIGGADVFLGVSGGGVLKPDMVAAMADRPLILALANPTPEILPEEVRAVRSDAVIATGRSDYPNQVNNVLCFPYIFRGALDCGATTITREMEIAAVHAIAQLAQAEQSDIVATTYGINNLSFGPDYIIPMPFDPRLMIKIAMAVAKAAEECGVAARPIKDMEAYADKLQQFVYRSGTFMKPIFQIAKSTPSDLKRIVYAEAEEERVLRAVQVVVDEKLARPILIGRPAVLLQRIERFGLRIKPDIDFTIINPEHDDRYRDFWQTYLAMTLRKGVTEQYAKLEMRRRHTLIGAMAIHKKYADGMICGTFGTTDLHLKYVEQVLGKRAGVNSYAAMNCVIMSDRQLFLVDTHVNENPSAEQLAEITILAAEEMRRFGMPPRAALLSHSNFGSSNSESAQKMRKVLQLVRERAPDLEIDGEMHGDLAMNAVELKKAMPDSALKGDANLLVFPNIDSANIAYNLLKTTVGNGVAIGPILLGCDKPVHILTPSATVRRIVNMTALCVADAVAER

SEQ ID NO: 5697 - DNA, 2313 bp, Bradyrhizobium sp. ORS278
  CDS (1)..(2313): transl_table=11
atgtcgtcgtcctattctgaagatcttcgttccgcagccctggcctatcaccgcctgccgcggcccggcaagctggagatccaggcctccaagccgctcgccaaccagcgcgacctcgcgcttgcctattccccgggcgtggccgctgcgtgcaccgagatcgccaacaacccggccgaggcggcctcgctgacggcgcgcgccaacctcgtcgccgtcgtctccaacggtacggccgtgcttggtctcggcaatatcgggccgctcgcctccaagccggtcatggagggcaaggcggtcctgttcaagaagttcgccggcatcgacgtgttcgacatcgagatatcagccgacaccatcgaccgcgtggtcgaaacggtggcggcgctggagccgaccttcggtggcatcaacctcgaggacatcaaggggccggagtgcttcgagatcgaggcgcggctcaaggagcggatgaagatcccggtcttccacgatgaccagcacggcaccgcgatcattgtcggcgccgcgatcaagaacgcgctgtcgctggccggcaagcagctgtccgaagtcaagatcgtgacctcgggcgcgggagcggccgccatcgcctgtctcaatctcttggtgtcgatgggcgcgcaacgcaagaacatctgggtctgcgacatcgacggcgtggtgcatgagggccgcaacacgctgatggacccgtggaaggcggtctatgcgcagaagaccgacaagcggaccctggccgaggtgatcggtggcgccgacatcttcctcggcctctccgccggcggcgtgctgaagccggagctgttgaagcagatggccgagaagccgctgatcatggcgctcgccaatcccaacccggagatcatgccggaggaggcgcgcgcggcgcggcccgatgcgatgatctgcaccgggcgttcggacttcccgaaccaggtcaacaacgtcctgtgctttccgttcatcttccggggcgcgctcgacgtcggcgccaccgcgatcaacgaggcgatgaagcaggcggcggtcgatgcgatcgcgctgctcgcgcaggacccgccgtcggacgcggtgaaccgcggttttgacaccggcgagacgcagggcttcggcccgggctcgctgatcccgtcgccgttcgatccgcgcctgatcctgcgcattgcgccggcggtggcgaaggcggcgatggagtcgggcgtcgcgacccggccgatcaccaatttcgacgaatacactgcgctgctggagcgcttcgcgttccgctccggcctcatcatgaagcctgtgttcgccaaggcgaaggcgcagccggtgcgcgtgatctacgccgagggcgaagacgaacgtgtgctgcgcgcgacgcaggtcgtcttggaagagaagctggcgcggccgatcctggtcgggcgtccgagcgtggtcgaggcgcgcatcaagcgcttcggcctgtcgatcaaggcgggccgtgatttcgatctcgtcaatcccgaggacgatccgcgctaccgctcctacgtacagagctacatcgagatcgccggccgccgcggcgtgacgccggatgcggcgcgcacggtggtgcgcaccaatgccaccgtcatcgcggcgctcgcggtggtccgcggcgaggcggatgcgatgatctgcggcgtcgaggggcgctacatgagccatcttcgtcacgtccgcgagatcatcggcttcatgccgggggtcagcgactacgccgcgctggcgctcaccatcaccagcaagggtgcctatttcatcggcgacacgcaggtgcgccccgatccgaccgccgaggagctcgccgagatggcctcgctggcggccaatcacgtcacacgcttcaatatcaagccgaagatcgcattcgtgtcgcattccgatttcggcagctacgacacggactcctcgcgcaagatgcgcagggccaccgcgctgttgaagcagcatcgtccggacctcgaggccgacggcgagatgcagggcgacacggcgctgtcggcgaccgcgcgcaaggcgatcctgccgcactcggatctcgacggctcggccaacgtgctgatcatgccgaatctcgacgccgccaacgtcgcctatcagatgatcaaggtgctggcggatgcggttcccgtcggcccgatcctgatcggcccggcacgcccggcgcacatcttgaccccgtcggtgaccgcgcgcggcattctcaacatgacggcggtcgctgccgtcgaggcgcaggaacgggcggggagggcgcagccgacgctgttcgcgtga

SEQ ID NO: 5698 - protein, 770 aa, Bradyrhizobium sp. ORS278
MSSSYSEDLRSAALAYHRLPRPGKLEIQASKPLANQRDLALAYSPGVAAACTEIANNPAEAASLTARANLVAVVSNGTAVLGLGNIGPLASKPVMEGKAVLFKKFAGIDVFDIEISADTIDRVVETVAALEPTFGGINLEDIKGPECFEIEARLKERMKIPVFHDDQHGTAIIVGAAIKNALSLAGKQLSEVKIVTSGAGAAAIACLNLLVSMGAQRKNIWVCDIDGVVHEGRNTLMDPWKAVYAQKTDKRTLAEVIGGADIFLGLSAGGVLKPELLKQMAEKPLIMALANPNPEIMPEEARAARPDAMICTGRSDFPNQVNNVLCFPFIFRGALDVGATAINEAMKQAAVDAIALLAQDPPSDAVNRGFDTGETQGFGPGSLIPSPFDPRLILRIAPAVAKAAMESGVATRPITNFDEYTALLERFAFRSGLIMKPVFAKAKAQPVRVIYAEGEDERVLRATQVVLEEKLARPILVGRPSVVEARIKRFGLSIKAGRDFDLVNPEDDPRYRSYVQSYIEIAGRRGVTPDAARTVVRTNATVIAALAVVRGEADAMICGVEGRYMSHLRHVREIIGFMPGVSDYAALALTITSKGAYFIGDTQVRPDPTAEELAEMASLAANHVTRFNIKPKIAFVSHSDFGSYDTDSSRKMRRATALLKQHRPDLEADGEMQGDTALSATARKAILPHSDLDGSANVLIMPNLDAANVAYQMIKVLADAVPVGPILIGPARPAHILTPSVTARGILNMTAVAAVEAQERAGRAQPTLFA

SEQ ID NO: 5699 - DNA, 2268 bp, Dichelobacter nodosus VCS1703A
  CDS (1)..(2268): transl_table=11
atgaatcattcgctaaaagaagaggcacttcattttcatcgttatccaaccgctggaaaaatttccgtcactcccaccaaatcactcaccaatcagcatgacttgtctttagcttattcgccgggcgttgcctttgcctgcgaagaaattcaaaacgatgcgcttcaagccgattttttaaccgcccgcgccaatttagttgccgtcatttccaatggcaccgccgttttaggactgggcaatatcggcgcgcttgccggtaaacccgttatggaaggcaaaggcgtactctttaaaaaatttgccggaatcaacgtttttgatattgaaatcaatgaaacggatattgataaatttgttgacattgtcgccagcatggaaccgacttttggcggcatcaatttagaggatattaaagcaccggaatgctttgccatcgagaaaaaactgcaagcgcgcatgaatatccccgtttttcatgacgatcaacacggaacggcgattattgccgcggctgccgtgctcaatgctttaaaaattcaaaataaaaattgtgcagacgttaaagttgtggtttccggcgccggcgcggcaggactttcttgcgtggacatgtttattgccgtgggcattaaagcagagcacattatcgtctgcgattccaaaggcgttatttatgccggacgcgatggtctcgatgaacgcaaagcgcaatatgccgcccaaaccagcgcgcgcactttagctgatgctatggttggcgcggacatttttttaggcgtttccaaagcgggattggtttctcctgaaatggtaaaatcgatggcagaaaaaccgttgattttggcgctggcgaatccgacgcctgaaatcatgccggaagaaattaaagccgtgcgcgatgatgccattatcgcaacgggacgctctgattatcccaatcaagtcaataacgttttgtgttttccgtatttattccgcggtgcgttagacgtaggcgcgaccaccatcaacgaagccatgaaaagagccgccgttgaagcattagcaacgctggcgcaattgcccgccgatgaagaagtcatcagcgcttacgacggtcaacgcctgatttttggagaagaatatattattcccaaaccttttgatgcgcgcctgattaccaccgttcccgttgccgttgctcaagcagcgatgaaaagcggcgttgcgcggcgtcccatcgcggatatgaatgcttatattgatcaactcaaagcgctgtttaatccgcattatcgggtaatgaaaccgattttagagcgcgctaaagcacagccgttaaaagtggtttttgctgaaggggaagatcttcgaactttgcgcgcagtattaaattgtgtgcaagaaaaaatttgtacgccgattttaattggatggcgtgcggcgattgttgctcgtttgcaggaatatcatttgccgcttgatagcgatcgcgatattcaaatcattgagcccgatttgcattacaaaaattgttggcaaacttatcaaacgctttgcgcaaacgccggaattgatccagaagcaatacaaaatcaaccggaaatgcaagctaccgttttggcggcgctgctcgttcatttaggacacgccgacacgttaatctgcggcacaaatggtcattatgatcatcatcgccaacaactcgatttaattttggcgctaaaagatggcatgaaaacttccgcggcgttggatatgttgcttttgcctaaagaaagcgtttttatcgccgatacgcacattcatcatcaacccaacgcgcaagaaatcacgcatatcacgctgttagcagaaaaaatgttgcgccaattaggcattaccccgcgcgcggcgttactttcgcgctctcattttggtgaatgtcctgatttggaaagccaccgcgtgatgcaagaagcgctcgctgcaatccaaaaaatgcagccgaatttagaaatagctggagaaatgcaagccgatgtggcgctgtcagcagaaatccgtcatcacgctggcgcggaaaaaggtttaaatacgtccgctaatttattgattatgcctaatgttgatgctgctaatattgcctatcatgtgatgaaagtttggtcaaacggttccgcagtgggttcaatgttattgggattacaacgtcctgcgcaattaatgaatcaagaagtcaccgcgcgacaaatatttacgatggcagcaattgccgtggtagcagcgcaaacggataacgattaa

SEQ ID NO: 5700 - protein, 755 aa, Dichelobacter nodosus VCS1703A
MNHSLKEEALHFHRYPTAGKISVTPTKSLTNQHDLSLAYSPGVAFACEEIQNDALQADFLTARANLVAVISNGTAVLGLGNIGALAGKPVMEGKGVLFKKFAGINVFDIEINETDIDKFVDIVASMEPTFGGINLEDIKAPECFAIEKKLQARMNIPVFHDDQHGTAIIAAAAVLNALKIQNKNCADVKVVVSGAGAAGLSCVDMFIAVGIKAEHIIVCDSKGVIYAGRDGLDERKAQYAAQTSARTLADAMVGADIFLGVSKAGLVSPEMVKSMAEKPLILALANPTPEIMPEEIKAVRDDAIIATGRSDYPNQVNNVLCFPYLFRGALDVGATTINEAMKRAAVEALATLAQLPADEEVISAYDGQRLIFGEEYIIPKPFDARLITTVPVAVAQAAMKSGVARRPIADMNAYIDQLKALFNPHYRVMKPILERAKAQPLKVVFAEGEDLRTLRAVLNCVQEKICTPILIGWRAAIVARLQEYHLPLDSDRDIQIIEPDLHYKNCWQTYQTLCANAGIDPEAIQNQPEMQATVLAALLVHLGHADTLICGTNGHYDHHRQQLDLILALKDGMKTSAALDMLLLPKESVFIADTHIHHQPNAQEITHITLLAEKMLRQLGITPRAALLSRSHFGECPDLESHRVMQEALAAIQKMQPNLEIAGEMQADVALSAEIRHHAGAEKGLNTSANLLIMPNVDAANIAYHVMKVWSNGSAVGSMLLGLQRPAQLMNQEVTARQIFTMAAIAVVAAQTDND

SEQ ID NO: 5701 - DNA, 1320 bp, Desulfovibrio vulgaris subsp. vulgaris str. Hildenborough
  CDS (1)..(1320): transl_table=11
atggccctgttcaccaaggaggaggcgctccgctatcacgcctgcggtcatcccggcaaggtcgagaccgttcccgtcaaaccctgtgccacccagcgccatctctccatggcctatacgccgggcgtcgccgatgcctgtcgcgccatccacgcggatgccgccgagggctacgcctacaccaacaagggcaacctcgtcgccgtggtctccaacggcacggccgtcctcggccttggcgacatcgggccgctggctggcaagcccgtgatggaaggcaagggcgtgctgttcaaggtcttcgccgatgtggatgtgtacgacctgtgcatcgagcagaaagaccccgcgaagatcatcgaattcgtcaggatgctcgagcctaccttcggcggcatcaacctcgaagatatcaaggcgccggaatgcttcgagatagagcagacgctcatccgcgagatggacattcccgtcttccatgacgaccagcacggcacggccatcatctccggggcgggtctcatcgccgcgctcgaactcgcgggcaagaaggccgaagaggtcaaggtcgtcgtctccggtgccggtgccggtgccatcgcctgcaccaacttcttcatggcactgggcgtccgccgtgagaacgtctacatgttcgactcgcgagggcttctgcacaaggggcgcgccgggctcaacgccgcgaagctggcctttgcgcaggagcgcgaccacggcagcctcgccgatgtcatgcgcggcgccgacgtgttcctcggcctttcggttggcggcatggtgacgcccgacatggtggcgtccatggcggcgaaccccatcgtcttcgcctgcgccaaccccgaccccgaaatcgcctacccagacgccaaggccgtgcgcgacgatctcatcatggccaccgggcgttcggactatcccaaccagatcaataacgtgctgggcttccccttcatcttccgcggcgcactcgacgtgcaggcacgcaccatcaacgaggagatgaagatggccgccgcccgcgcgctggccgcgctggccaaggaacccgtgcccgccgaggcgctggccccctatggtcttgcatcggcttcgttcggcgtggactacatcatccccaaggccctcgacccgcgtgtcatcgagtgggtcgcccccgcggtggccgaggccgccatgcgtacgggcgtggcgcgccgcgtcatcgacctcgacgcctaccgggtcgaactgcgcgagcgcatgaaggcagcccgcgcacgcatcggggccttcatcgacagctacgggctggatttctag

SEQ ID NO: 5702 - protein, 439 aa, Desulfovibrio vulgaris subsp. vulgaris str. Hildenborough
MALFTKEEALRYHACGHPGKVETVPVKPCATQRHLSMAYTPGVADACRAIHADAAEGYAYTNKGNLVAVVSNGTAVLGLGDIGPLAGKPVMEGKGVLFKVFADVDVYDLCIEQKDPAKIIEFVRMLEPTFGGINLEDIKAPECFEIEQTLIREMDIPVFHDDQHGTAIISGAGLIAALELAGKKAEEVKVVVSGAGAGAIACTNFFMALGVRRENVYMFDSRGLLHKGRAGLNAAKLAFAQERDHGSLADVMRGADVFLGLSVGGMVTPDMVASMAANPIVFACANPDPEIAYPDAKAVRDDLIMATGRSDYPNQINNVLGFPFIFRGALDVQARTINEEMKMAAARALAALAKEPVPAEALAPYGLASASFGVDYIIPKALDPRVIEWVAPAVAEAAMRTGVARRVIDLDAYRVELRERMKAARARIGAFIDSYGLDF

SEQ ID NO: 5703 - DNA, 1209 bp, Bacillus anthracis str. 'Ames Ancestor'
  CDS (1)..(1209): transl_table=11
atgcataaagtgcatcaaggaaaattagaaactgtatcaaaagtaaaagtagaaaatgcaaaagatttaagtcttgcatattctccaggggttgcagaaccttgtaaggaaatttatgacgataaaagtaaggtatatgaatatacaatgaagggaaatatggtagcagttgtgacagatggaacggctgtacttggtcttggtaacattggacctgaagcatctcttccagtaatggaaggtaaagctgtattattcaagagctttgctggtgtagatgcattcccaattgccttaaatacaaacgatgtagataaaattgttgaaactgtaaaattaatggagccaacttttggcggcgttaacttagaagatatcgcagcaccaaactgcttcattattgaagaacgtttgaaaaaagaaacaaatattcctatcttccatgatgatcaacacggaacagctatcgtaacagtagcaggtcttgtgaacgcgctaaaactagttggaaagaaaatgtctgacattaaagttgtcgcaaatggcgcaggtgcagcaggtattgcaattattaaacttttatatcgctatggcgtacgcgacattattatgtgtgaccgtaaaggcgcgatctatgaaggtcgtcctacaggtatgaatccggtgaaggatgaagttgcaaaatatacaaataagaatcgtatcgaaggttctttagctgatgttgtacaaggtgcggacgtattcattggtgtatctgcagaaggtgcattaacagaagagatggttcgtacaatgaatgacgatgcaattatttttgcaatggcgaatccagttccagaaattatgccagaattggcaaaagcagcgggcgcagctgttgttggaacaggtcgttctgactttgcaaaccaagtaaataatgtactagcgttccctggtattttccgcggtgcacttgacgtacatgcgacacaaattaacgaagaaatgaagatggcagctgtacaagccattgctgagcttgtagcagaagatgagttgaatgcagactatatcattccagcaccgtttgatgcgcgtgtagcgcctcaagtagcagcttacgttgcgaaagctgcaatggagacaggagtagctcgccgtcaagtggatccaaatgaagttgctgagaaaacaaaacaattagcgctgattggtaaagaataa

SEQ ID NO: 5704 - protein, 402 aa, Bacillus anthracis str. 'Ames Ancestor'
MHKVHQGKLETVSKVKVENAKDLSLAYSPGVAEPCKEIYDDKSKVYEYTMKGNMVAVVTDGTAVLGLGNIGPEASLPVMEGKAVLFKSFAGVDAFPIALNTNDVDKIVETVKLMEPTFGGVNLEDIAAPNCFIIEERLKKETNIPIFHDDQHGTAIVTVAGLVNALKLVGKKMSDIKVVANGAGAAGIAIIKLLYRYGVRDIIMCDRKGAIYEGRPTGMNPVKDEVAKYTNKNRIEGSLADVVQGADVFIGVSAEGALTEEMVRTMNDDAIIFAMANPVPEIMPELAKAAGAAVVGTGRSDFANQVNNVLAFPGIFRGALDVHATQINEEMKMAAVQAIAELVAEDELNADYIIPAPFDARVAPQVAAYVAKAAMETGVARRQVDPNEVAEKTKQLALIGKE

SEQ ID NO: 5705 - DNA, 1245 bp, Bacillus anthracis str. Sterne
  CDS (1)..(1245): transl_table=11
atgtcacttttacgagatgaagcattaaaaatgcataaagaaaaacaggggaagattggtgtttattctaaagttaaagtacaaaattcaacagatttaagtctcgcttactcaccaggtgttgctgagccatgcttagagatttataaagatgaaagcaaagtatatgattatacaatgaaagggaatctagttggagttatatctgatggaactgcagtattaggtcttgggaatattgggcctaaagcagctatgccagtgatggagggaaaagctttacttttcaaatcatttgctgagatcgatgcttttcctatttgtttaaacactaataatccggataagattgttgaggttgttaaattattagaaccaaattttggtgggataaacttagaagatattgcagcaccacaatgctttgaaattgaggagcgcctaagaaaatcttgtgatattcctgttttccatgatgatcaacacggtacagctattgtaacgattgctggcctaattaatgcacttaagttaacaaataaaaaaattgaagatgtgcaaatcgttgtgaatggtgctggtgctgctgggatagcgattgttaagctgttacttcatatgcatgtaaaaaatgttattttgtgtgacacaaaagggataatatatgaacagcgacctattggaatgaatgcgcttaaagaagaaatagctcgtattacaaatatagaacagaagcggggaacattagcagaggcccttattgatgctgatgtatttattggagtatcagctgcagatgtagttgatgaggatatgattcgttctatgaatcataatcctattatttttgccttggctaaccctacacctgaaattatgcctaataaagcaaaaatagcaggagcactagtagttggtacaggacgttctgattttcctaatcaagtaaataatgtactagctttccccggagtttttcgtggagctttagatgtacaagcaaaagaaattaatgaagaaatgaagctagcagctgtttatgcaatagctgagttaatttcagaagaagagcttcatgtcaactatgtcattccaaatccgtttgatcctagggtggtgccacatgtagcatatgctgtcgcacgtgctgcagtggaaaccggtgtttcaagaaaaaatatcagcatgtctgaaattaaaaacaatctattcaggttaacaaaagaggtaaatatattaaaataa

SEQ ID NO: 5706 - protein, 414 aa, Bacillus anthracis str. Sterne
MSLLRDEALKMHKEKQGKIGVYSKVKVQNSTDLSLAYSPGVAEPCLEIYKDESKVYDYTMKGNLVGVISDGTAVLGLGNIGPKAAMPVMEGKALLFKSFAEIDAFPICLNTNNPDKIVEVVKLLEPNFGGINLEDIAAPQCFEIEERLRKSCDIPVFHDDQHGTAIVTIAGLINALKLTNKKIEDVQIVVNGAGAAGIAIVKLLLHMHVKNVILCDTKGIIYEQRPIGMNALKEEIARITNIEQKRGTLAEALIDADVFIGVSAADVVDEDMIRSMNHNPIIFALANPTPEIMPNKAKIAGALVVGTGRSDFPNQVNNVLAFPGVFRGALDVQAKEINEEMKLAAVYAIAELISEEELHVNYVIPNPFDPRVVPHVAYAVARAAVETGVSRKNISMSEIKNNLFRLTKEVNILK

SEQ ID NO: 5707 - DNA, 2298 bp, Bartonella quintana str. Toulouse
  CDS (1)..(2298): transl_table=11
atgaaaaaaagtgagcaagatcagaaaatgcctcaaatggtttataatgtcaatgagcgagaagctcttgattttcatagtcgtggccggcctggaaagcttgaaattgttgcaacaaagtctatggcaacgcagtatgatttagcacttgcttattcaccaggtgttgctgttccggttaaagcgattgctcaaaacccagcattggcttacgattatactgcaaagggcaatcttgtcgctgttatatcaaatggaactgctatcttgggtttaggcaatttaggtgcactggcctctaagccggtgatggaaggtaaagcagtcctttttaagcgctttgcggatattgattccattgatttggaaattgatacgaacgatacggaaagttttatcaatctggtacgtcatttggagccctcttttggcggcataaatcttgaagacattaaagcgcctgagtgttttatgatcgaaagtcgtttacgcgaggtcatgaatattcctgtttttcacgacgatcaacatggtacagcaatcattgtggctgctggcgtgctcaatgccttgtatttaactggacgcaatatggaaaatacgcggttagtttgtaatggtgctggttctgccggaattgcttgtattgaactgattaaggcgatggggtttcgacctgaaaacatcatattgtgtgatactaagggtgttgtctatgaaggtcgtaaagaggggatgaatcagtggaagtctgctcatgctgttccaacagataaacgcactctcgctgaagcgatggaaggtgctgacatgtttttcggggtttctgctaaaggcgcaattacccctgaaatggtaaagtcgatggcacctaagccgatcatttttgccatggctaatcctgatccggaaattacaccggaagaggttatgcaagtgcgtaatgatgcgattgtagcgacaggtcgttccgattatccaaatcagattaataatgtcctttgttttccttatatatttcgtggtgcgcttgatgtacgtgcgacagttattaatgaagatatgaagattgctgccgcaagggctcttgcgaatttagctcatgaggaagtgcctgacagcgttgcagaagcttatcgtggaaagcggttgaaatttggtccgaattatatcattcctgttccttttgatccgcgtttattcactgttgtttcaattgcagtggcaaaagcagcaatggaaagcggtgttgcgcaaaagcacattgatgatttagaggcttatgagcgtgatttaaatgcgagacgtgatcccatttcttccatgatgcgtggtgtttataatcatgttcgtcaggcgccaaaacaaattgtctttgcagaaggtgaagaagagcaggtaatgcgggcagctgtatcttatgttcatcaaaaattgggacaggcgattttggttggtcgtgaagagcaagttaaggaaacggctgctatttctggaattgatcttgagcgtgaaggtatatctattatgaatgccaagctctcctgtcgcctagatgcttacgctcattatctttataaaaaaatgcagcgtcaaggctggttgttgcgtgattgttatcgtcgcatcaacaatgatcgcaattattttgctgcttgtatggtagcattaggggatgctgatgcaatggttacaggggtcacacgcaattatgaaacagcgttgatcgatattcgccgggtgattgatgaaaaaccaaaagaacggttaattggtatttcaatggctatttgtcgtggacgaactgtgtttattgcagatacagctgtttatgagaatcctaacgctgaggaacttgctgatatagcagaacagacagcttcttttgttcgtaagttgggatctcaaccacgggtagcatttgtggcattttctacttttggctatatgaaaggacagattacacggcatattcaagatgctgtcaatattttgcatgaacgcaaggttggttttgaatttgatggagaaataagtgctgatgtggcgctcaatgtaaaattgatgcagcaatatccttttatgggattaacggaacctgctaatattttggtgatgcctggatatcatgcgtcttccatagcgagcaaaatgttgcaagagcttggtgaagcaaccattattggtcctattttgattggattggaaaaatctgttcaaattgtaccatttagtggaagtgatacggatgttgtcaatatcgcaaccttagctgcttaccatgcaaaaaagttataa

SEQ ID NO: 5708 - protein, 765 aa, Bartonella quintana str. Toulouse
MKKSEQDQKMPQMVYNVNEREALDFHSRGRPGKLEIVATKSMATQYDLALAYSPGVAVPVKAIAQNPALAYDYTAKGNLVAVISNGTAILGLGNLGALASKPVMEGKAVLFKRFADIDSIDLEIDTNDTESFINLVRHLEPSFGGINLEDIKAPECFMIESRLREVMNIPVFHDDQHGTAIIVAAGVLNALYLTGRNMENTRLVCNGAGSAGIACIELIKAMGFRPENIILCDTKGVVYEGRKEGMNQWKSAHAVPTDKRTLAEAMEGADMFFGVSAKGAITPEMVKSMAPKPIIFAMANPDPEITPEEVMQVRNDAIVATGRSDYPNQINNVLCFPYIFRGALDVRATVINEDMKIAAARALANLAHEEVPDSVAEAYRGKRLKFGPNYIIPVPFDPRLFTVVSIAVAKAAMESGVAQKHIDDLEAYERDLNARRDPISSMMRGVYNHVRQAPKQIVFAEGEEEQVMRAAVSYVHQKLGQAILVGREEQVKETAAISGIDLEREGISIMNAKLSCRLDAYAHYLYKKMQRQGWLLRDCYRRINNDRNYFAACMVALGDADAMVTGVTRNYETALIDIRRVIDEKPKERLIGISMAICRGRTVFIADTAVYENPNAEELADIAEQTASFVRKLGSQPRVAFVAFSTFGYMKGQITRHIQDAVNILHERKVGFEFDGEISADVALNVKLMQQYPFMGLTEPANILVMPGYHASSIASKMLQELGEATIIGPILIGLEKSVQIVPFSGSDTDVVNIATLAAYHAKKL

SEQ ID NO: 5709 - DNA, 2298 bp, Bartonella henselae str. Houston-1
  CDS (1)..(2298): transl_table=11
atgaaaaagaatgagcaagatcagaaaacacaccaaacggtttataatatcagtgagcgagaagctctagactttcatagtcgtggtcgtcctggaaagcttgaaattgttgcaacaaagtctatggcaacacagtatgatttagcacttgcttattcgccaggtgttgctgttccggttaaagcgattgctcaaaatccagaattggcttacgattatacgacaaagggcaaccttgttgctgtaatatcaaatggaaccgctatcttgggtttaggaaatttaggtgcactagcgtctaaaccggtgatggaaggtaaagcagtactttttaagcgctttgcggatattgattctattgatctggaaattgatacgaatgatccggaaaattttatcaatctggttcgtcatttagagccctcttttggcggcatcaatctggaagatattaaagcaccagaatgttttatgattgaaagtcgcttacgcgaggtcatgaatatacccgtttttcatgatgatcaacatggtacagcaatcattgtggctgctggagtactcaatgccttgtatttaacagggcgcgatatggaaaatacgcggttagtttgtaatggtgctggttctgcgggaattgcttgtattgagttgattaaggcgatgggatttcgatctgaaaatatcattttatgtgatacaaaaggtgttgtttatgaggggcgcaaagaggggatgaatcagtggaaatctgttcatgctgttcgaacagataaacgcacgcttgctgaagcgatggaaggtgccgatgtgttttttggggtttctgctaaaggtgcgattacccctgaaatggtaaaatcgatggcacctcgtccgattatttttgctatggctaatcctgatccagaaattacgccggaagaagtgatgcaagtgcgtaaggatgctattatcgcaacaggtcgttccgattatccaaatcagattaataatgttctttgttttccttatatatttcgtggtgcgcttgatgtgcgtgcgacagttattaatgaagatatgaagattgctgctgcaagagctattgcggatttggctcacgaagaagtacctgatagcgttgccgaagcttatcgtggaaagcgcttgaaatttggtccgaattatatcatccctgttccttttgatccgcgtttgtttactgttgtttcaattgcggtggcaaaagcggcaatgaaaagcggtgttgcgcaaaggcacattgatgatttagaagcttatgagcgtgatttgaatgcgagacgtgatcccatttcttccatgatgcgtggtgtttataatcacgttcgtcagtcaccaaaacaaattgtctttgccgaaggtgaagaagagcaggtaatgcgagcagctgtttcctatgtccatcaaaaattaggacaggcgattttgattggtcgtgaagaacaagtgagagagaatgctgctattgctggaattgatcttgagcgtgaaggcatttctgttatgaacgccaagctctcttgtcgtttggatgcttacgcgaattatctttataaaaaaatgcagcgtcaaggttggctgttgcgtgattgtcatcgtcgcatcaacaatgatcgcaattattttgctgcttgtatggtggcattaggggatgctgatgcaatggttacaggggttacacgcaattatgaaacagcgttgattgatattcgtcgggtgattgatgaaaaaccgcgagaacggttaattggtatttcaatggccatttgtcgtggacgaactgtgtttattgccgatacagctgtttatgagaatcctaacgccgaagaatttgcgcatatagccgaacagacagcttcttttgttcgtggattggggtatcaaccacgggtggcatttgtggcattttctacttttggttatatgaaaggacaggttacgcgccatattcaagatgccgttaatattttgcgtgaacgcagggctgattttgaatttgatggagaaataagtgctgatgtagcgcttaatgtgaaattgatgcagcaatatccctttatgggattaacggaacctgctaacattttggtgatgcctggatatcatgcgtcttctatagcaagtaaaatgttgcaagagcttggtgaagcaaccattattggtcctattttgattggactggaaagatctgttcaaattgtaccatttagtggcagtgatacggatgttgtcaatatcgcaaccctagccgcttaccatgcagaaaagttataa

SEQ ID NO: 5710 - protein, 765 aa, Bartonella henselae str. Houston-1
MKKNEQDQKTHQTVYNISEREALDFHSRGRPGKLEIVATKSMATQYDLALAYSPGVAVPVKAIAQNPELAYDYTTKGNLVAVISNGTAILGLGNLGALASKPVMEGKAVLFKRFADIDSIDLEIDTNDPENFINLVRHLEPSFGGINLEDIKAPECFMIESRLREVMNIPVFHDDQHGTAIIVAAGVLNALYLTGRDMENTRLVCNGAGSAGIACIELIKAMGFRSENIILCDTKGVVYEGRKEGMNQWKSVHAVRTDKRTLAEAMEGADVFFGVSAKGAITPEMVKSMAPRPIIFAMANPDPEITPEEVMQVRKDAIIATGRSDYPNQINNVLCFPYIFRGALDVRATVINEDMKIAAARAIADLAHEEVPDSVAEAYRGKRLKFGPNYIIPVPFDPRLFTVVSIAVAKAAMKSGVAQRHIDDLEAYERDLNARRDPISSMMRGVYNHVRQSPKQIVFAEGEEEQVMRAAVSYVHQKLGQAILIGREEQVRENAAIAGIDLEREGISVMNAKLSCRLDAYANYLYKKMQRQGWLLRDCHRRINNDRNYFAACMVALGDADAMVTGVTRNYETALIDIRRVIDEKPRERLIGISMAICRGRTVFIADTAVYENPNAEEFAHIAEQTASFVRGLGYQPRVAFVAFSTFGYMKGQVTRHIQDAVNILRERRADFEFDGEISADVALNVKLMQQYPFMGLTEPANILVMPGYHASSIASKMLQELGEATIIGPILIGLERSVQIVPFSGSDTDVVNIATLAAYHAEKL

SEQ ID NO: 5711 - DNA, 1239 bp, Bacillus thuringiensis serovar konkukian str. 97-27
  CDS (1)..(1239): transl_table=11
ttgtcaacacttcgtgaagaagcacttcacatgcataaagtgcatcaaggaaaattagaaactgtatcaaaagtaaaagtagaaaatgcaaaagatttaagtcttgcatattctccaggggttgcagaaccttgtaaggaaatttatgacgataaaagtaaggtatatgaatatacaatgaagggaaatatggtagcagttgtgacagatggaacggctgtacttggtcttggtaacattggacctgaagcatctcttccagtaatggaaggtaaagctgtattattcaagagctttgctggtgtagatgcattcccaattgccttaaatacaaacgatgtagataaaattgttgaaactgtaaaattaatggagccaacttttggcggcgttaacttagaagatatcgcagcaccaaactgcttcattattgaagaacgtttgaaaaaagaaacaaatattcctatcttccatgatgatcaacacggaacagctatcgtaacagtagcaggtcttgtgaacgcgctaaaactagttggaaagaaaatgtctgacattaaagttgtcgcaaatggcgcaggtgcagcaggtattgcaattattaaacttttatatcgctatggcgtacgcgacattattatgtgtgaccgtaaaggcgcgatctatgaaggtcgtcctacaggtatgaatccggtgaaggatgaagttgcaaaatatacaaataagaatcgtatcgaaggttctttagctgatgttgtacaaggtgcggacgtattcattggtgtatctgcagaaggtgcattaacagaagagatggttcgtacaatgaatgacgatgcaattatttttgcaatggcgaatccagttccagaaattatgccagaattggcaaaagcagcgggcgcagctgttgttggaacaggtcgttctgactttgcaaaccaagtaaataatgtactagcgttccctggtattttccgcggtgcacttgacgtacatgcgacacaaattaacgaagaaatgaagatggcagctgtacaagccattgctgagcttgtagcagaagatgagttgaatgcagactatatcattccagcaccgtttgatgcgcgtgtagcgcctcaagtagcagcttacgttgcgaaagctgcaatggagacaggagtagctcgccgtcaagtggatccaaatgaagttgctgagaaaacaaaacaattagcgctgattggtaaagaataa

SEQ ID NO: 5712 - protein, 412 aa, Bacillus thuringiensis serovar konkukian str. 97-27
MSTLREEALHMHKVHQGKLETVSKVKVENAKDLSLAYSPGVAEPCKEIYDDKSKVYEYTMKGNMVAVVTDGTAVLGLGNIGPEASLPVMEGKAVLFKSFAGVDAFPIALNTNDVDKIVETVKLMEPTFGGVNLEDIAAPNCFIIEERLKKETNIPIFHDDQHGTAIVTVAGLVNALKLVGKKMSDIKVVANGAGAAGIAIIKLLYRYGVRDIIMCDRKGAIYEGRPTGMNPVKDEVAKYTNKNRIEGSLADVVQGADVFIGVSAEGALTEEMVRTMNDDAIIFAMANPVPEIMPELAKAAGAAVVGTGRSDFANQVNNVLAFPGIFRGALDVHATQINEEMKMAAVQAIAELVAEDELNADYIIPAPFDARVAPQVAAYVAKAAMETGVARRQVDPNEVAEKTKQLALIGKE

SEQ ID NO: 5713 - DNA, 2271 bp, Acinetobacter sp. ADP1
  CDS (1)..(2271): transl_table=11
atggacgatcaatcattaaaacaagctgctttgtattatcacgaaaacccgactccagggaaaattagcgttacaccgagtaagcagcttgtcaatcagcatgacctggcacttgcctattctccaggagttgctgctccatgtttagagattgaacgtgatccttctactgctgccaaatatacagcacgcggaaatttagtggctgttgtaacgaacggtactgctgttttaggcctaggtaacattggacctttggcctctaaacctgtcatggaaggtaaaggcgttttatttaagaaatttgctggtgtcgatgtttttgatattgagattgcagaaaatgatccagacaaaatcgtagatatcgttgctgcacttgagcctacttttggcggtatcaacctagaagatattaaagcgccagaatgtttttatattgagaaaaaacttcgtgaacgcatgaatatccctgtgttccatgatgaccagcacggtaccagtattattgttggttcggctttactcaatgccctgcaacttgtaaacaaaaagattgaagatatcaagattgttgcctctggcgcgggtgctgcagcactgtcttgtcttgatctactatgtgcactgggtgcacgtaaagaaaacatcatcgtcgccgattcacgtggtttgttaaccacatctcgtgatggtcttgatgaatctaaaaaacgttatgttcaggatattacggcaacccagttacatgaagtcattactggtgccgacatgttccttggcctttcagcagcaggcattctcaccaaagaaatggtgaaaggcatggctgaaaatccaattatttttgcacttgcaaacccagatccagaaattttaccagagcacgcacatgaagtacgtccagacgtcatcatggcgacaggccgttctgactatccaaaccaagtcaataatgcactgtgcttcccttatatcttccgtggtgcacttgatgtcggtgcaaccacaattaatgaagatatgaaaattgcttgtgtacatgcgattgcacgcatggcgcatgtagaagccgatgcagcaacttatggtgaaaaatcagcctcctttggtcgtgattatttaattccacgtccacttgaccaacgtttgattcttgaaattgcgcctgctgtggctcaggcagcgatggattctggtgttgcaacacgcccaatcgaagatttttctgcatatcgtcaaaaactgtctgagtttgtttataactcggcatttattatgaagccaattttctctcaggcaaaagctgatccaaaacgcatcgcttatgctgaaggtgaagattatcgtgtattgcgtacagctcaaattgtcgttgatgacggtattgccttccctgtgttggttggtcgtactgccgtgattgaagccaatatcaaaaagctaggacttcgccttgaaaatggcgtaaatattgagattgttgatcaagaaaataatccactttatgaagagttctggaaagattattaccaaatcatgcaacgtaagggcgtaaccgttgaatatgcacaacgcgaagctcgtcgtcgttcaaccctgattgcagcgatgcttgtaaaatttggtaaagctgacggtatgctatgtggtacctatagtagctacgatattcacttggattttgtaagcaaagtgatcggtttaaaagaaggaatgaataatttctttaccttaaatgcattaatgcttgaagaccgtaatctatttattgcagatacctacgtaaataccaatcctactgctgaacagcttgcagacatgacaatcttggcagcagaagaagtacgccgttttggtattacacctcgcgtagcacttctttctcattcaagctttggtagtaaccaagaagacccaagtgcacaaaagatgcgtgaagtgtatcgccttctgaatgaacgtgcgcctgaacttgaagttgaaggtgaaatgcatggtgatgcagcacttgacgaaagtatccgtcattctgcattccctggatcaaacttcaaaggttctgcaaacctgttaatcatgccgaatcttgatgccgcgaatatctcctttaatcttttaaaggcgacttctggtaacaatgtcacaattggcccaattttactgggtgcagcaaaacctgttcatatccttacaccaacagcgacgacacgccgtgtattaaatatgacagccttaactgttgcagaaattcagcaaagcgaaggttaa

SEQ ID NO: 5714 - protein, 756 aa, Acinetobacter sp. ADP1
MDDQSLKQAALYYHENPTPGKISVTPSKQLVNQHDLALAYSPGVAAPCLEIERDPSTAAKYTARGNLVAVVTNGTAVLGLGNIGPLASKPVMEGKGVLFKKFAGVDVFDIEIAENDPDKIVDIVAALEPTFGGINLEDIKAPECFYIEKKLRERMNIPVFHDDQHGTSIIVGSALLNALQLVNKKIEDIKIVASGAGAAALSCLDLLCALGARKENIIVADSRGLLTTSRDGLDESKKRYVQDITATQLHEVITGADMFLGLSAAGILTKEMVKGMAENPIIFALANPDPEILPEHAHEVRPDVIMATGRSDYPNQVNNALCFPYIFRGALDVGATTINEDMKIACVHAIARMAHVEADAATYGEKSASFGRDYLIPRPLDQRLILEIAPAVAQAAMDSGVATRPIEDFSAYRQKLSEFVYNSAFIMKPIFSQAKADPKRIAYAEGEDYRVLRTAQIVVDDGIAFPVLVGRTAVIEANIKKLGLRLENGVNIEIVDQENNPLYEEFWKDYYQIMQRKGVTVEYAQREARRRSTLIAAMLVKFGKADGMLCGTYSSYDIHLDFVSKVIGLKEGMNNFFTLNALMLEDRNLFIADTYVNTNPTAEQLADMTILAAEEVRRFGITPRVALLSHSSFGSNQEDPSAQKMREVYRLLNERAPELEVEGEMHGDAALDESIRHSAFPGSNFKGSANLLIMPNLDAANISFNLLKATSGNNVTIGPILLGAAKPVHILTPTATTRRVLNMTALTVAEIQQSEG

SEQ ID NO: 5715 - DNA, 1254 bp, Symbiobacterium thermophilum IAM 14863
  CDS (1)..(1254): transl_table=11
atggagaaccggactggcgacgggcggcagaatccggcccgaaacgaagccgacctgaaggaagcggccctgcggttgcacgtgcagaaccgggggaagtggacgacggcttccaaggtgccgctgcagacgcaggaggacctggccctggcgtactcccccggggtcgcggagccctgccgggcgattgctgccgaccccgaggcggtcttccggtacactgcccggggcaatctggtggcggtggtctccgacggcagcgcggtactgggcctgggcgacatcgggccggaggcggcgctgccggtcatggaggggaaggccctgctgttcaaggccttcgcggacatcgacgcggtgccgctggtgctggcggagcgggacgtggacgagatcgtgcgcaccgtgacccgcctttcccccacgttcggggggatcaacctggaggacatcgccgcgccccgctgcttcgccgtcgagcggaagctgcaggcggccgtcgacatcccggtcttccacgacgaccagcacggcactgccatcgtggtggcggcggggctgcagaatgccctgaagctggtcggcaagcggctggaggaggtccgggtggtgatcgagggggcgggggccagcggcctggccacggcggcgctgctcctggacctgggcgtcagcgacctgaccctggtggactcccgggggacgatctaccccggccggcccgacgggatgaacccgttcaaggaggagctggctcagcggaccaacccgcgccgggtgcggggcgggctggcggaggccctggccggggccgacgtggccgtgggcctggcccggggcggcagcatgacgcgggagatggtgcgggccatggcgccggacccgatcgtcttcgcgctggccaacccggagccggcgatctggcccgaggaggcgaaggcggccggcgcggcggtggtcgccacgggccgctcggattaccccaaccagttgaacaacgtcctggcctttcccggcatcttccgcggtgccctggacgtgcgggcccgggagatcaacgaggcgatgaagcgggccgccgtccgggcgatcgccgacctggtggcccccgaggaactgtccgccgactacatcatccccgcaccgctggaccgccgcgtcgccccggcggtcgcggccgcggtggccgaggccgcggtccgcagcggcgtggcccgcagcccgggtttcgactcatttgacccatatatttga

SEQ ID NO: 5716 - protein, 417 aa, Symbiobacterium thermophilum IAM 14863
MENRTGDGRQNPARNEADLKEAALRLHVQNRGKWTTASKVPLQTQEDLALAYSPGVAEPCRAIAADPEAVFRYTARGNLVAVVSDGSAVLGLGDIGPEAALPVMEGKALLFKAFADIDAVPLVLAERDVDEIVRTVTRLSPTFGGINLEDIAAPRCFAVERKLQAAVDIPVFHDDQHGTAIVVAAGLQNALKLVGKRLEEVRVVIEGAGASGLATAALLLDLGVSDLTLVDSRGTIYPGRPDGMNPFKEELAQRTNPRRVRGGLAEALAGADVAVGLARGGSMTREMVRAMAPDPIVFALANPEPAIWPEEAKAAGAAVVATGRSDYPNQLNNVLAFPGIFRGALDVRAREINEAMKRAAVRAIADLVAPEELSADYIIPAPLDRRVAPAVAAAVAEAAVRSGVARSPGFDSFDPYI

SEQ ID NO: 5717 - DNA, 1221 bp, Bacillus licheniformis ATCC 14580
  CDS (1)..(1221): transl_table=11
atgtcattgaaagaaaaagcactgcatatgcacaaagtaaaccagggcaaattggaatcaaaatcaaaagtgcaggttcgcaatgcggacgatttaagccttgcatattctccgggtgtggctgaaccctgcaaagcgatttacgatgataacagcaaagtatatgattatacaatgaagggaaacatggtagcagtcgtctcggacggaacggctgtgctcggcctcggcaatatcggccctgaagccgccctccctgtgatggaaggaaaagcggttcttttcaaaagctttgccggtgtggacgctttcccaatctgtttaaatacatctgatgtcgataaaattgttgagacggtcaagctgcttgagccgacattcggcggcgtcaaccttgaagacattgcagctccaaactgttttgtcattgaagaacgcctcaaaaaagaaacgaaaattccggtgtttcacgatgaccagcacggtacagcaatcgtaacggtagccggtctcgtcaatgcgcttaagctgtccggcaaaacgatgtcttccgtcaaagttgtggcgaacggcgccggcgcagcgggaattgccatcattaagcttctttatcatttcggcgtgcgcgacatcatcatgtgcgacacgaaaggcgcgatctacgaaggccgtccgaacggcatgaacgcagttaaagaagaagtcgcaaaatatacgaacaaaaaccgcatagacggttcgctcaaagacgtgatcaaagacgccgatgtctttatcggggtttccgtcgaaggcgctctgacaaaagaaatggttgaaagcatggctgacaaaccgatcatcttcgccatggcgaatccaaatcctgagatcatgcctgccgaagcgcatgaagccggagcaagcgtcgttggaacgggacgctctgacttccctaaccaagtgaacaacgttctcgcttttcctggcatcttccgcggggcgctcgacgtccgcgcgacacatatcaacgaggagatgaaaatcgccgcggttgatgcgatcgcgtcactcgtttccgacgaagagctgagacctgaatatgtcattccggctccgttcgatccaagggtcgcaccagctgttgccaaagcggtagccaaagccgcgatggaaacaggcgtgcacgaatcgatgtcgatccagaagaagtcgctgaaaaaacaagaaagcttgcagtga

SEQ ID NO: 5718 - protein, 406 aa, Bacillus licheniformis ATCC 14580
MSLKEKALHMHKVNQGKLESKSKVQVRNADDLSLAYSPGVAEPCKAIYDDNSKVYDYTMKGNMVAVVSDGTAVLGLGNIGPEAALPVMEGKAVLFKSFAGVDAFPICLNTSDVDKIVETVKLLEPTFGGVNLEDIAAPNCFVIEERLKKETKIPVFHDDQHGTAIVTVAGLVNALKLSGKTMSSVKVVANGAGAAGIAIIKLLYHFGVRDIIMCDTKGAIYEGRPNGMNAVKEEVAKYTNKNRIDGSLKDVIKDADVFIGVSVEGALTKEMVESMADKPIIFAMANPNPEIMPAEAHEAGASVVGTGRSDFPNQVNNVLAFPGIFRGALDVRATHINEEMKIAAVDAIASLVSDEELRPEYVIPAPFDPRVAPAVAKAVAKAAMETGVHESMSIQKKSLKKQESLQ

SEQ ID NO: 5719 - DNA, 1200 bp, Bacillus cereus E33L
  CDS (1)..(1200): transl_table=11
atgttagaaaatcaaattaatgagagatcattgttattgcataaagaattagtaggaaaaattgagattacaagtaaagtagaagtaaattcagcggatgatttaagtctgacatatacaccaggtgtagcggagtcttgcaaagcaatcgcagcagatgaagaaacagtgtatgactatacagcacgtggaaatatggtggcagttgtctcagacggaacagcggtacttggtttagggaacattggaccaaaagcggctatgcctgttatggaaggaaaaagtatattatttaaaaaatttgcgaatgtagatgctttcccgttatgtttaggtacgactgatgtggatgaaatcgttagccttgtgaaaaatttagagcctacatttgcagggatcaatttagaagatattgcagcaccgcgttgttttgaaattgaaaaacgattaaaagaagaaacgaatattcctgtattccatgatgatcaacatggaacagctatcgtcgtcttagcagctgttattaatgcattaaaagttgttagcaaacaaatggatcatgtgaaaattgttattaacggtgcgggttcggcaggaattgcaattggaaaattattattaaaggctggtgcacagcacattacattagttagcttagaaggtattgtttgtgaaggtgaagcatggatgaacgaagcacaaattgaagtttcaaaaaagacaaatcgagaacatgtgcgtggaacattaaaagaagcgattcatcaggctgatatctttatcggtgtatctgcccctaacgtattaacgaaagaacttgtacagatgatgaatgagaaagcaattgtgtttgcaatggcaaatccaattccagaaatattccctgaggatgcgttagaggctggagcagctgtagtaggaactgggcgctcggattatgcgaatcaagtaaataatgtattggcgtttcctggaatattccgaggtgcgttagatgtgcgcgcgactgatattacagaagaaatgaaattagcggcagcatatgggatcgctaacatcattacggacgaagaacgtaatgcgaattatgtaatcccgaatccattagataaaagagttgttccaagtgttgcggaagctgtagcgaaagcagccattgattcaggtgtggcgcaaattatgaaaataccaagttattaa

SEQ ID NO: 5720 - protein, 399 aa, Bacillus cereus E33L
MLENQINERSLLLHKELVGKIEITSKVEVNSADDLSLTYTPGVAESCKAIAADEETVYDYTARGNMVAVVSDGTAVLGLGNIGPKAAMPVMEGKSILFKKFANVDAFPLCLGTTDVDEIVSLVKNLEPTFAGINLEDIAAPRCFEIEKRLKEETNIPVFHDDQHGTAIVVLAAVINALKVVSKQMDHVKIVINGAGSAGIAIGKLLLKAGAQHITLVSLEGIVCEGEAWMNEAQIEVSKKTNREHVRGTLKEAIHQADIFIGVSAPNVLTKELVQMMNEKAIVFAMANPIPEIFPEDALEAGAAVVGTGRSDYANQVNNVLAFPGIFRGALDVRATDITEEMKLAAAYGIANIITDEERNANYVIPNPLDKRVVPSVAEAVAKAAIDSGVAQIMKIPSY

SEQ ID NO: 5721 - DNA, 2274 bp, Mannheimia succiniciproducens MBEL55E
  CDS (1)..(2274): transl_table=11
atggacgaacaattacgtcaagccgcattagattttcatgaatttccggttcccggaaagatcgaagttaccccgactaaatcacttgccactcaacgtgaccttgcactggcttattcgccgggcgttgcaatgccctgtttagaaattcaagaagatccggcaaaagcttataattacaccgcaaaaggcaatttagttgccgtaatttcaaacggtaccgccgtgttgggattaggtaatatcggcgccctcgcaggcaaaccggtaatggaaggtaaaggcgttttattcaaaaaattcgccggcgtagatgtttttgatattgaaataaatgaaaaagatccggaaaaattagtggaaattatcgccgccctcgagccgacattcggcggtattaatcttgaagatatcaaagcgcccgaatgtttttacattgaacaaaaattacgcgagcgcatgaatattccggtattccacgatgatcaacacggtacggcgattatcagctccgctgcggttttaaacggtttacgcattattaataaaaaaatcgaagatgtgcgtttagtggcatccggtgcgggtgcggcctctattgcctgtttaaatctgttggtgtcgttagggatgaaacgtgaaaacattacggtttgcgactctaaaggcgttatttataaaggtcgcgacgaaaatatggatgcaacaaaaaaactgtatgccattgacgacaacggtacccgttcattagccgatgcaattccgaatgcggatattttcttaggttgctccgccgccggcgctttgactcaggaaatggtaaaaacaatggggcctaatccgttgattcttgcgttggctaacccgaatccggaaattacaccgccggaagcaaaagcggttcgtcccgacgccatcgtctgtaccggtcgttcagacttccctaaccaagtaaataacgtgctgtgcttcccgtttattttccgcggtgcgctagatgtgggtgcgactacaatcaacgaagaaatgaaaatggcggcggtgcgcgctattgccgatcttgcgcttgccgaacaaagcgatgtggtttcttcagcctacacggacgaaagcgaagtcactttcgggccggaatacgttattcctaaaccttttgatcctcgcttaattatccgtattgcaccggcggtagccaaagcggcaatggacagcggcgtggcaacccgcccgattcaaaatttcgacgcttatatcgaaaaactcacccaattcgtttacaaaaccaatctgttcatgaaacctgtctttaatcaggcgaaagcggataaaaaacgcgtattgctcacagacggcgaagaaacccgcattttgcatgcggtgcaagaaatttcgaccttaggaatcgcttatcccgtcttggtcggacgtttggatgtgatcgaagcgcaaattaaacgcctcggtttaaaaatccaggcgggtgtcgattttgaagtgctaaatacggataatgaagaaatctaccaacaatgctggtcgctctatcacaataaactaaaacgtcacggcgttaccgaagccatggcaaaacgccgtatgttaaccaactcgacggctatcggttccgctttactggaactcggttatgcggacgcaatgctttgcggattagtcggtacctattcttccagcctttctttattgaaagaagttatcggcattaaagaaaatgtagacatcccggcaacggtaaacggattggtactgccaagcggcaacttatttatcgcggatactttcgttaatttagcgccgacggcggaagaattagcggaaattaccttaatggcggcggaagaagtgcgccgtttcggtattgaaccgcaagtggcgttaatttctcattctaatttcggtacttcggaagatcaaagtgcggtcaaaatgcgcgaagttttacaattagtgaaaacgcaggcgcctgatttgatcattgacggcgaaatgcacgctaatgtagcgttaaatgagaatttacgccgcgaagttatgcctgacagtccgctcaaaggcgcggcaaatctgctcattatgccggatatggaatccgcccgtatcagtttgaatttattacagggcaccgcgacaccgattactatcggaccaatcctgatgggtatgaaaaaaccggcgcatattttaacttccgtgtcttccgtacgccgtattatcaatatggttgctattgcggcggttaaagcgcaacaaaactaa

SEQ ID NO: 5722 - protein, 757 aa, Mannheimia succiniciproducens MBEL55E
MDEQLRQAALDFHEFPVPGKIEVTPTKSLATQRDLALAYSPGVAMPCLEIQEDPAKAYNYTAKGNLVAVISNGTAVLGLGNIGALAGKPVMEGKGVLFKKFAGVDVFDIEINEKDPEKLVEIIAALEPTFGGINLEDIKAPECFYIEQKLRERMNIPVFHDDQHGTAIISSAAVLNGLRIINKKIEDVRLVASGAGAASIACLNLLVSLGMKRENITVCDSKGVIYKGRDENMDATKKLYAIDDNGTRSLADAIPNADIFLGCSAAGALTQEMVKTMGPNPLILALANPNPEITPPEAKAVRPDAIVCTGRSDFPNQVNNVLCFPFIFRGALDVGATTINEEMKMAAVRAIADLALAEQSDVVSSAYTDESEVTFGPEYVIPKPFDPRLIIRIAPAVAKAAMDSGVATRPIQNFDAYIEKLTQFVYKTNLFMKPVFNQAKADKKRVLLTDGEETRILHAVQEISTLGIAYPVLVGRLDVIEAQIKRLGLKIQAGVDFEVLNTDNEEIYQQCWSLYHNKLKRHGVTEAMAKRRMLTNSTAIGSALLELGYADAMLCGLVGTYSSSLSLLKEVIGIKENVDIPATVNGLVLPSGNLFIADTFVNLAPTAEELAEITLMAAEEVRRFGIEPQVALISHSNFGTSEDQSAVKMREVLQLVKTQAPDLIIDGEMHANVALNENLRREVMPDSPLKGAANLLIMPDMESARISLNLLQGTATPITIGPILMGMKKPAHILTSVSSVRRIINMVAIAAVKAQQN

SEQ ID NO: 5723 - DNA, 1236 bp, Legionella pneumophila subsp. pneumophila str. Philadelphia 1
  CDS (1)..(1236): transl_table=11
ttggataatgaagtaataaagcagcgggcattggattatcatgagttccctgttccagggaaactctctgttcatcttacaaaatcgactaattcccaagacgatttgtctttggcttatacacctggtgtagctgccccagttttagccatagctgaagcgcccgaaaatgcgtatcgttttaccagcaaaggcaatctggttgcggtgatgaccaatggtactgcagtgttaggtttgggaaatcttgggcccttagcgagtaagcctgtgatggaaggcaaagcggtattatttaaacgatttgccgatcttgatgtctttgatatagaaattgatgcagaggatcctcagtcttttattgctactgcaaaacgcattgccccaacttttggcggcataaatcttgaagacatcaaagctccggagtgttttgaaatagaacaagctttgattgagcagttaaatattcctgtattccatgatgatcagcatggtactgcgattgtagttgcagctggtttgttaaatgctttggaactacagaacaagaaattaagtgatattaaaattgtctgcatgggtgctggagctgctggtattgcttctatgcgacttcttgtggcattaggggctcccaaaagtaacatgctccttctggacaccaagggcgttattcattcaggccgcgaggatttaaatccctacaagtttgcttttgccagaaatacttcctgtcgtacacttgaagatgctttggtcgatgccgatgtgtttattggcgttgcaaggccagatttgctgaatgctcatttattaagtttgatggcgcccaatccagtgatttttgctttatctaaccctgatcctgaaatcaaacccgaattggctcatagtgtacgtaaagatctggtgatggcaacaggacgaagtgattatcctaatcaagttaataatgtattatgttttccttatatttttcgtggtgcgctagatgttcgtgccacttgcattaaccaggccatgcaaattgcagctgttgaagccattcgtcaattggtgcatgagcctgttcctcaggtagtgaaggacaattacccaggagttgtgaattgggattttggacctgactatattattccaaagcctatcgatcctcgcttaaaagagagggtccctgctgctgtagcgaaagctgcaatagcgagtggcgcgagtcaatttaataatttataa

SEQ ID NO: 5724 - protein, 411 aa, Legionella pneumophila subsp. pneumophila str. Philadelphia 1
MDNEVIKQRALDYHEFPVPGKLSVHLTKSTNSQDDLSLAYTPGVAAPVLAIAEAPENAYRFTSKGNLVAVMTNGTAVLGLGNLGPLASKPVMEGKAVLFKRFADLDVFDIEIDAEDPQSFIATAKRIAPTFGGINLEDIKAPECFEIEQALIEQLNIPVFHDDQHGTAIVVAAGLLNALELQNKKLSDIKIVCMGAGAAGIASMRLLVALGAPKSNMLLLDTKGVIHSGREDLNPYKFAFARNTSCRTLEDALVDADVFIGVARPDLLNAHLLSLMAPNPVIFALSNPDPEIKPELAHSVRKDLVMATGRSDYPNQVNNVLCFPYIFRGALDVRATCINQAMQIAAVEAIRQLVHEPVPQVVKDNYPGVVNWDFGPDYIIPKPIDPRLKERVPAAVAKAAIASGASQFNNL

SEQ ID NO: 5725 - DNA, 2310 bp, Burkholderia mallei ATCC 23344
  CDS (1)..(2310): transl_table=11
atgtcgacctcgtcctcctcctcttcctcgaaagaaaaactccgcgaagccgctctcgattaccacgaattcccgacaccgggcaaagtcgcgatcgcgccgaccaaacagatgatcaatcagcgcgatctcgcgctcgcctattcgccgggcgtcgcgttcgcgtgcgaggagatcgtcgagaacccgttgaacgccgcgcgcttcaccgcgcgcagcaacctcgtcggcgtcgtcacgaacggcaccgcggtgctcggcctcggcaacatcggcccgctcgcgtcgaagccggtgatggaaggcaaggcggtcctcttcaagaagttcgccgggatcgacgtgttcgacatcgagctcaacgaatccgatccgcacaagctcgtcggcgtgatcgccgcgctcgaaccgacgttcggcgggatcaacctcgaggacatcaaggcgccggactgcttcatcgtcgagcgcgaatgccgcaagcgaatgaagattccggtgttccacgacgaccagcacggcaccgcgatcgtcgtcgcggccgcggtcaccaacgggctgaaggtggtcggcaagagcatcaaggaagtgaagctcgttgcgtcgggcgcgggcgcggccgcgctcgcgtgcctcgatttgctcgtcgatctcggcttgccgctcgagcacatcacggtgaccgatctggcgggcgtcgtctacaagggccgtgcggagctgatggacccggacaaggagcgtttcgcgcgcgaaaccgatgcgcgcacgctgtcggaggtgatcgacggcgcggacatcttcctcggcctgtcggcggccggcgtgctgaaggccgacatggtgaagaagatggccgagcgcccgctgattctcgcgctcgcgaatccgactccggaaatcctgccggaagtggcgctggaggcgcggccggacgccgtgctcgcgacgggccgcaccgattatccgaaccaggtcaacaacgtcctatgcttcccgttcatcttccgtggcgcgctcgatgtcggcgcgacgacgatcacccgcgagatggagatcgccgccgtcaacgcgatcgccgagctcgcgcagcaggagcaaagcgacatcgtcgcgaccgcgtatggtattcaggatctctcgttcgggcccgaatatctgattccgaagccgttcgacccgcgcctcatcgtgaagatcgcgcccgcggtcgcgcaggcggcgatggacggcggtgtggcgacccgtccgatcgaggacatggaagcgtacaaggttcacctgcagcagttcgtctaccacagcggcacgacgatgaagccggtgttccagatcgcgcgcggcgcgcccgccgagaagaagcgggtggtgttcgcggagggcgaggaagagcgcgtgctgcgcgcggtgcagatcgtcgtcgacgagaagctcgcgaagccgatcctgatcgggcggcccgccgtgatcgagcaccggatccagcgctacggcctgcggctcacgccgggtgtcgatttcacgatcgtcaacaccgagcacgacgagcgttaccgcgatttctggcaaacctacttcaagatgatggcccgcaaggggatcagcgagcagctcgcgcgcgtcgaaatgcgccgccgcacgacgctgatcggctcgatgctcgtcaagaagggcgaggcggacgggatgatttgcggcacgatcagcacgacgcaccgccacctgcacttcatcgatcaggtgatcggcaagcgcgccggctgcagcgtatacggcgcgatgaacgcgctggtgctgcccggccgccagattttcctggtcgacacgcacgtgaacgtcgatccgaccccggcgcagctcgccgagatcacgatcatggcggcggaagaggtgcgccgtttcggcatcgagccgaaggtcgcgctgctgtcgcattcgaacttcggcacgagcaacgcgccttccgcgcagaagatgcgcgatacgctcgcgatcctgcgagaacgcgcgcccgatctgcatgtcgacggcgagatgcacggcgacgtcgcgctcgacgcggcgttgcgcaaggagatcctgcccgaatcgacgctcgagggcgaagcgaacctgctcgtgctgccgaacatcgatgccgcgaacatcgcctacaacctgctcaaaacggctgccggcaacaacatcgcgatcgggccgattctgctcggcgccgcgcagcccgtgcacgtgctgaccgaatcggcgaccgtgcgccggatcgtcaacatgacggcgctgctggttgccgacgtgaacgcggtacgttga

SEQ ID NO: 5726 - protein, 769 aa, Burkholderia mallei ATCC 23344
MSTSSSSSSSKEKLREAALDYHEFPTPGKVAIAPTKQMINQRDLALAYSPGVAFACEEIVENPLNAARFTARSNLVGVVTNGTAVLGLGNIGPLASKPVMEGKAVLFKKFAGIDVFDIELNESDPHKLVGVIAALEPTFGGINLEDIKAPDCFIVERECRKRMKIPVFHDDQHGTAIVVAAAVTNGLKVVGKSIKEVKLVASGAGAAALACLDLLVDLGLPLEHITVTDLAGVVYKGRAELMDPDKERFARETDARTLSEVIDGADIFLGLSAAGVLKADMVKKMAERPLILALANPTPEILPEVALEARPDAVLATGRTDYPNQVNNVLCFPFIFRGALDVGATTITREMEIAAVNAIAELAQQEQSDIVATAYGIQDLSFGPEYLIPKPFDPRLIVKIAPAVAQAAMDGGVATRPIEDMEAYKVHLQQFVYHSGTTMKPVFQIARGAPAEKKRVVFAEGEEERVLRAVQIVVDEKLAKPILIGRPAVIEHRIQRYGLRLTPGVDFTIVNTEHDERYRDFWQTYFKMMARKGISEQLARVEMRRRTTLIGSMLVKKGEADGMICGTISTTHRHLHFIDQVIGKRAGCSVYGAMNALVLPGRQIFLVDTHVNVDPTPAQLAEITIMAAEEVRRFGIEPKVALLSHSNFGTSNAPSAQKMRDTLAILRERAPDLHVDGEMHGDVALDAALRKEILPESTLEGEANLLVLPNIDAANIAYNLLKTAAGNNIAIGPILLGAAQPVHVLTESATVRRIVNMTALLVADVNAVR

SEQ ID NO: 5727 - DNA, 2256 bp, Silicibacter pomeroyi DSS-3
  CDS (1)..(2256): transl_table=11
atgcccaaagcgaagatcaccaacgaagaggcgctggcctttcacctggaaccgacccccggcaagtgggaggtgcaggccaccgttccgatgaccacgcagcgcgatctgtcgctggcctattcccccggcgtggcagtaccgtgcgaggcgatcgcggccgatccggggctggcctatgactataccaacaagggcaacctggttgcggtgatctcgaacgggacggcggttctgggtctgggcaatctgggtgcgctgggcggcaagccggtgatggagggcaaggcggtgctgttcaaacgctttgccgatgtgaactcgatcgacatcgagctggataccgaggacccggacgagttctgccgcgcggtgcggctgatggggccgacattcggcggcatcaacctggaagacatcaaggcgcccgagtgtttcatcatcgagcagcgtctgaaggaagagatggatatccccgtctttcacgacgaccagcacggcacggcggtgatctgtgcggcggggctgatcaacgcgctgcacatctcgggcaagaagatcgaagatgtgaagatcgtgctgaacggcgccggcgcggcgggcatcgcctgtatcgaactgctgaaaaccatgggcgcgcggcatgaaaactgcattgtctgcgataccaagggtgtgatctttcagggtcgcaccgagggcatgaaccagtggaaatcggcccatgccatcaagaccgagctgcgcagccttgaagaggcgatgaaaggggccgacgtgttcctgggcgtcagcgtcaagggtgcggtgacgcaggaaatggtgcagagcatggccgacaatccggtcatctttgccatggcgaaccccgatccggaaatcacacccgaagaggcgcatgaggtgcgtcccgatgccatcgttgccaccgggcgcagcgactatcccaaccaggtcaacaacgtgttgggctttccctatctgttccgcggcgcgctggatattcacgcccgcgccatcaacgacgagatgaagatcgcctgcgcccatgcgctggcggcgctggcccgcgaggatgtgcccgacgaggttgcgatggcctatggcaagagcctggcttttggacgcgactacatcatcccgaccccgttcgacccgcgcctgatccaccgcattccgcccgccgtcgcgcgcgcgggcatggataccggcgccgcgcggcggccgatcatcgacatggatgcctatgagctgggcctgaaatcgcggatggacccgaccgccagcatcctgcgcggcatcaacgcccgcgcgcgcaaggcgcaaagccggatgatctttgccgagggcgacgatccccgcgtgctgcgcgcggcggtcacctatcagcgctcgggctatggcaaggcgctggtggtgggtcgtcatgacgacgtgaaggccaagcttgaagccgccggcctgggcgacgcggtgcgcgagcttgaggtggtgaacgccgccaacaccacgcatctggagacctataaggagttcctgtactcgcgcctgcaacgcaagggcttcgataacaaggacgtacaccggctggccgcgcgcgaccggcatgtgttctcggccctgatgctggcgcatggccacggcgacgggctggtgaccggcgcgacccggaaatcggcgcatgtgctgcaccagatcagccatgtgttcgacgccgatgcggcgcatggggcggcggggatcaccgcattgttgcacaagggcaagatcgtgctgatcggcgacacgctggtgcatgaatggcccgacgaacacgatctggccaccatcgccgaacgcgccgctgacgtggcccgccatatgggtctggagccgcgcgtggcctttgtcagcttctcgacctttggttatccgatctcggagcggaccgaaaagctgacgaaggcgcccaaggtactggaagcgcgcggcgtgagtttcgagttcgaaggcgagatgactgtcgatgtggcgctgaacccgcgctcgaaagaggcctatcccttctcgcgcctcaccggccccgcgaacatcctgatcgtgcccgcgcggcattcggcgtcgatctcgaccaagctgatgcaggagatggcgggtgccacggtgatcggcccgatcctgaccggtgtcgacaagccgatccagatctgttcgaccgtctccaccgccaatgacatcctgaacatggcggtgctggcctcggccgagatcggctag

SEQ ID NO: 5728 - protein, 751 aa, Silicibacter pomeroyi DSS-3
MPKAKITNEEALAFHLEPTPGKWEVQATVPMTTQRDLSLAYSPGVAVPCEAIAADPGLAYDYTNKGNLVAVISNGTAVLGLGNLGALGGKPVMEGKAVLFKRFADVNSIDIELDTEDPDEFCRAVRLMGPTFGGINLEDIKAPECFIIEQRLKEEMDIPVFHDDQHGTAVICAAGLINALHISGKKIEDVKIVLNGAGAAGIACIELLKTMGARHENCIVCDTKGVIFQGRTEGMNQWKSAHAIKTELRSLEEAMKGADVFLGVSVKGAVTQEMVQSMADNPVIFAMANPDPEITPEEAHEVRPDAIVATGRSDYPNQVNNVLGFPYLFRGALDIHARAINDEMKIACAHALAALAREDVPDEVAMAYGKSLAFGRDYIIPTPFDPRLIHRIPPAVARAGMDTGAARRPIIDMDAYELGLKSRMDPTASILRGINARARKAQSRMIFAEGDDPRVLRAAVTYQRSGYGKALVVGRHDDVKAKLEAAGLGDAVRELEVVNAANTTHLETYKEFLYSRLQRKGFDNKDVHRLAARDRHVFSALMLAHGHGDGLVTGATRKSAHVLHQISHVFDADAAHGAAGITALLHKGKIVLIGDTLVHEWPDEHDLATIAERAADVARHMGLEPRVAFVSFSTFGYPISERTEKLTKAPKVLEARGVSFEFEGEMTVDVALNPRSKEAYPFSRLTGPANILIVPARHSASISTKLMQEMAGATVIGPILTGVDKPIQICSTVSTANDILNMAVLASAEIG

SEQ ID NO: 5729 - DNA, 1233 bp, Bacillus clausii KSM-K16
  CDS (1)..(1233): transl_table=11
gtgccaacgacgagagaagaagcgcttcacatgcaccggataaaccaaggaaaactagaatcaaaagcgaaagtcccagtgaaggatgcccgagacttaagcttagcctattccccaggtgtagcagaaccgtgcaaagaaatttttgaagatgttgaaacggtgtatgagtacacgatgaaagggaatatggttgctgtcgtcagcaatggcacagccgtgcttggcctcggtaacataggcccagaagcttccctccctgttatggaaggaaaagcggttttatttaagtcgtttgccggtgtagatgcttttccaatatgcctccgttcaaacgatgtcgatgaaattgtcaatacggtgaagttgcttgagccgacgttcggcggtgtcaacttagaagatattgcggcaccagactgctttgtgattgaagagcggctaaaaaaggagacaaatattccgattttccacgatgaccagcatggcacagcgattgttacccttgcaggcttgatcaacgctctaaaaattagcggcaaaaaactgtcagaaatcaaagtagtcgccaatggcgcaggagctgctgggatcgccatcattaaattgatgctccgcatgggtgtgcgcaacattattatgtgcgatacgaaaggcgcaatctatgaaggacgcccatatggaatgaacgcagtcaaagaagcggttgcaaaacggacaaacatgaataaagaagaaggcaagcttgaagatgtcattaaaggggccgacgtgtttattggtgtatccgttgaaggggcagtcacaaaagaaatggttgaaagcatgaatgacaacccgattatttttgccatggctaaccctgttccagaaattatgccagaagatgcgaaagcagcaggcgcttctgttattggtactggccgttctgatttcccgaaccaagtgaataatgttttggcttttccaggaattttccgcggagcgctagatgcccgtgctacccatattaacgaagagatgaaagtggcggctgtttatgcaattgccaatttagtttctgaagaagaattgtctgttgattatgtgatcccagcaccatttgactctcgtgttgccccagcagtcgcggcggcagtagctaaaaaagcgatggaaacgggcgttgcccgcgtaaaagtagacccggaagaagtagctgaaaaaacacggaaattagcgattattgattga

SEQ ID NO: 5730 - protein, 410 aa, Bacillus clausii KSM-K16
MPTTREEALHMHRINQGKLESKAKVPVKDARDLSLAYSPGVAEPCKEIFEDVETVYEYTMKGNMVAVVSNGTAVLGLGNIGPEASLPVMEGKAVLFKSFAGVDAFPICLRSNDVDEIVNTVKLLEPTFGGVNLEDIAAPDCFVIEERLKKETNIPIFHDDQHGTAIVTLAGLINALKISGKKLSEIKVVANGAGAAGIAIIKLMLRMGVRNIIMCDTKGAIYEGRPYGMNAVKEAVAKRTNMNKEEGKLEDVIKGADVFIGVSVEGAVTKEMVESMNDNPIIFAMANPVPEIMPEDAKAAGASVIGTGRSDFPNQVNNVLAFPGIFRGALDARATHINEEMKVAAVYAIANLVSEEELSVDYVIPAPFDSRVAPAVAAAVAKKAMETGVARVKVDPEEVAEKTRKLAIID

SEQ ID NO: 5731 - DNA, 1236 bp, Campylobacter jejuni RM1221
  CDS (1)..(1236): transl_table=11
atgaatttaaaagaagaagctttaaaataccatttaggtgggaaaattgatattgtaccaagtaagccaatggctacaagccatgatctatctttggcgtatagcccaggagttgcagaaccttgccttgaaatcgctaaagataatgagcttgcttatacttatacaaataaggctaatttagtagctatagttagtgatggttctgctgttttaggacttggaaacataggagcgcaggcttcaaaacctgttatggaaggtaaggcttgtttgtttaaaaaatttgcaaatgtcaatgcttatgatatagaaattgatgttcatagtgtggaagagattgtaaatttttgcaaagctttggctccaactgtgggcgggataaatttagaagatatagctgctccaaaatgttttgaaatcgaagcggctttgcaagatttaggaattcctgtaatgcacgatgatcagcacggaacagctattatttcaactgcgggacttatgaatgctatggaaataagtggtaaaaaatttaaagacatcaaagtagttgtaagtggtgcaggtgccgcaggtatagcaagtgctaaaatgtatagaaatttaggggtcgaaaatattattttagtagatagcaaaggagtgatttctaaagatagaaatgatttaactcctcaaaagcttgaatttgctgttgattctaaggaaaagactttaaaagaagttttaaaaggagctgatgttttcctaggacttagtgcaccaaaaattcttgatgatgaaatggttttaagcatggcaaaagatcctgtgatttttgctttggcaaatcctattcctgaagtgatgcctgaagatgtagctagacttagaaaagatgcgattgtaggaacaggaagaagtgattatccaaatcaaatcaataatgttttaggttttccttttattttccgtggggctttagatgtgcgtgcaagtaaaatcactgaaaatatgaaagtagcggctgctaaagcattagcagatcttgcaaaacttcctgtaagcgatgcggttaaaaaagcttataatttaagcactttagaatttggaagagattatgttataccaaaaccttttgatgaaagagtaaaagctgcagtaagtacagctgtagcagcagctgcggtaaaagatggtgtggctaaggtgaaaaattttgatgagaaagcttattttgaaagcttaaaatga

SEQ ID NO: 5732 - protein, 411 aa, Campylobacter jejuni RM1221
MNLKEEALKYHLGGKIDIVPSKPMATSHDLSLAYSPGVAEPCLEIAKDNELAYTYTNKANLVAIVSDGSAVLGLGNIGAQASKPVMEGKACLFKKFANVNAYDIEIDVHSVEEIVNFCKALAPTVGGINLEDIAAPKCFEIEAALQDLGIPVMHDDQHGTAIISTAGLMNAMEISGKKFKDIKVVVSGAGAAGIASAKMYRNLGVENIILVDSKGVISKDRNDLTPQKLEFAVDSKEKTLKEVLKGADVFLGLSAPKILDDEMVLSMAKDPVIFALANPIPEVMPEDVARLRKDAIVGTGRSDYPNQINNVLGFPFIFRGALDVRASKITENMKVAAAKALADLAKLPVSDAVKKAYNLSTLEFGRDYVIPKPFDERVKAAVSTAVAAAAVKDGVAKVKNFDEKAYFESLK

SEQ ID NO: 5733 - DNA, 1278 bp, Thermococcus kodakarensis KOD1
  CDS (1)..(1278): transl_table=11
atgaatcccctcgaattccatagggacaactttcctggaaatgggaagatagaggtcataccgaaggtaccagttaacagggagaccctgagcctcgcctacactcccggcgttgccgagccctcgaaggcgatagccaacggagccgatccagacgagtacaccgtcataccgaacaccgtggcggttgttaccgatggttcagcaattctgggcctcggggacatagggccggtcgccggaatgcccgtcatggagggaaaagctgttctcttcaaggcgctcgcgggcgtggacgctttcccaatcctcattaacacgaaggacgttgacgaaatcgtcaggacggttgagctgataagccccggcttcggcgggataaacctggaagacatctcagcacccagatgctttgagatagaggagaggctgagggagaggctcgacataccagtttttcacgacgaccagcacgggacggccgttgtaaccctcgccgggctgataaacgccctgaagctcgttggcaaaaagttcagcgagataaaggtcgcgatcagcggcgcgggggcggctgggatagctatagcgaagatcctccacagcgttggtgtcaaggagatagtcaccgttgacaggaaggggataatacacgagggcagggaggacctcaacccgtacaagcgcgaagtcgcggaatacaacgtccacgggatagagggcggcctgaaggaggcgatggaaggggccgatgtttttatcggagtcagcgctggcgggatagtaaccccggatatggttagggctatggccgacgatgcaatagtcttcgcgatggccaatccgattcctgaaataatgccggaagaagcgaagagggcgggagcaaggatcgttgccacgggaaggagcgacttcccgaaccagataaacaacgtgctcggctttcccggaatcttcaggggcgccctcgacgttaaagcagaagacataacgccaagcatgaagctggcggccgctgaggctatagcctcggtcgtgagcgatgacgagctgggcgaagattacataatcccctctccgctccatcctgacgttttcccgaaggaagcgagggcagtcgcggaagtggccatgaaagagggcgttgcggggagaaaggtaagcggtgagtgggtcgaggagcacacgaggaggctcagggagttctactcggctttcatcgaaccattgaacgaaaaaagaaagaccttcagcggtagagggagttccccctag

SEQ ID NO: 5734 - protein, 425 aa, Thermococcus kodakarensis KOD1
MNPLEFHRDNFPGNGKIEVIPKVPVNRETLSLAYTPGVAEPSKAIANGADPDEYTVIPNTVAVVTDGSAILGLGDIGPVAGMPVMEGKAVLFKALAGVDAFPILINTKDVDEIVRTVELISPGFGGINLEDISAPRCFEIEERLRERLDIPVFHDDQHGTAVVTLAGLINALKLVGKKFSEIKVAISGAGAAGIAIAKILHSVGVKEIVTVDRKGIIHEGREDLNPYKREVAEYNVHGIEGGLKEAMEGADVFIGVSAGGIVTPDMVRAMADDAIVFAMANPIPEIMPEEAKRAGARIVATGRSDFPNQINNVLGFPGIFRGALDVKAEDITPSMKLAAAEAIASVVSDDELGEDYIIPSPLHPDVFPKEARAVAEVAMKEGVAGRKVSGEWVEEHTRRLREFYSAFIEPLNEKRKTFSGRGSSP

SEQ ID NO: 5735 - DNA, 1230 bp, Staphylococcus epidermidis RP62A
  CDS (1)..(1230): transl_table=11
atgtctttaagagatgacgctttagaaatgcatagagagaaccaaggtaaactagaaattacaccaaatgttaaagtgacaaataagcaacaattaagcctagcatactcacctggcgttgcagaaccttgtaaagaaatccatgaagattcaagaaaagtatatgagtacactattaaaggaaatacagttgctgttgtaacagatggaactgctgttctcggtttagggaatattggagcagaagcaagtattccagtaatggaaggaaaggcagcactgttcaaaagttttgcgggtattaatggtgtgccaatagctctagatacaactgacactcaagaaatcataaaaacagtaaaacttattgcaccaaactatggtggaattaatcttgaagatatatcagctccccgctgttttgaaattgaagaaaccttaaagaaagagaccaatatacctatttttcatgacgatcaacatggtacagctattgttactatggctgggttaatcaatgctttaaaaattgtagataaagagttaacggatataaaagttgtattaaatggtgcaggtgcagcaggtatcgctatagtgaagttacttcatgcttatggtgtgaataatatgattatgtgcgattcaaaaggtgctatttattctggcagaaattttggtatgaatgatacaaaaacatatgtagctaagtggacgaataaagataaagttgaaggttcacttgaagaagtgattaaagatgcagatgtttttataggtgtatctgtagtggatatattaactcaagatatggtgaagacaatggctgatgatccaattatttttgctatggctaatcctaatcctgaaatcaatcccaatgaagccaaacaggcaggtgcaaaggtcgtaggtacaggtcgatctgattttccaaaccaaattaataatgtattagcatttccaggtatttttagaggtgcattggatgttgaagccactcatattaacgaagatatgaaaaaggcagctgtagaagctatcgttcatttaatagacgaaaatgagttacatcctgattactgtataccaggaccatttgataaaagagtagctccatcagtagccaaaaatgtagctaaagctgctatggaatccggtgtagcaagaattaaaattgatacacaagaaatatttgataaaactatgaaacttactgacttaaaatag

SEQ ID NO: 5736 - protein, 409 aa, Staphylococcus epidermidis RP62A
MSLRDDALEMHRENQGKLEITPNVKVTNKQQLSLAYSPGVAEPCKEIHEDSRKVYEYTIKGNTVAVVTDGTAVLGLGNIGAEASIPVMEGKAALFKSFAGINGVPIALDTTDTQEIIKTVKLIAPNYGGINLEDISAPRCFEIEETLKKETNIPIFHDDQHGTAIVTMAGLINALKIVDKELTDIKVVLNGAGAAGIAIVKLLHAYGVNNMIMCDSKGAIYSGRNFGMNDTKTYVAKWTNKDKVEGSLEEVIKDADVFIGVSVVDILTQDMVKTMADDPIIFAMANPNPEINPNEAKQAGAKVVGTGRSDFPNQINNVLAFPGIFRGALDVEATHINEDMKKAAVEAIVHLIDENELHPDYCIPGPFDKRVAPSVAKNVAKAAMESGVARIKIDTQEIFDKTMKLTDLK

SEQ ID NO: 5737 - DNA, 1281 bp, Neisseria gonorrhoeae FA 1090
  CDS (1)..(1281): transl_table=11
atggaaaactcattgaaagaagccgccctcaagttccacgaattacccgttccgggcaaaatttccgttaccccgaccaaatctctggcgaccgacaaagatttggcgttggcgtactctccgggcgtagccgccccctgtatggaaatccatgccgatccgcaaaatgcctacaaatacaccggcaaaggcaacttggtcgccgtcatttccaacggtacggccgttttgggcttgggcgacatcggcgcgctggcgggcaaacccgtgatggaaggcaaaggcgtattgttcaaaaaattcgccggtgtggacgtgttcgacatcgaaatcgacgaaaaagacccgcaaaaactggtggacatcatcgccgctttggagccgactttcggcggcatcaacctcgaagacatcaaagcacccgagtgtttttacatcgaacgcgaattacgcaaacgctgcaaaatccccgtatttcatgatgaccagcacggcacggccatcattaccgccgccgccgtattgaacgccctgcgttataccggccgtaaaatcgaagaagcgactttggtgtgctccggcgcaggtgccgccgcgattgcctgcctgaaccaactgctggatttgggcttgaaacgtgaaaacgtaaccgtttgcgactccaaaggcgtgatttaccaaacccgcgaagacaaagaccgcatggacgaatccaaaaaattctacgccgttgaagacaacggccggcgcgtacttgccgatgcggttaaaggcaaagacatcttcttgggcctctccggcgcaaacctgctgacgcctgaaatgttgaacacgatgaacgaaaaacccatcgtgttcgccatggccaacccgaatccggaaatcctgccgccgctggcgaaagaaacccgtccggacgtggttatcggtaccggccgctccgacttcccgaaccaagtgaacaacgtattgtgcttcccgttcatcttccggggcgcgttggatgtcggcgcaaccaccatcaacgaagaaatgaaacgcgcctgcgtgtatgctttggcagatttggcgatggaagaagtaaccgaagaagtggttgccgcttacggtaagaaattcgaattcggcgcggaatacctgattcctactccgttcgattcccgcctgctgcctcgcgtcgctacggctgccgccaaagcagcgatggaaagcggcgtggcaacccgtccgattgcagatttggaagcttacgctgccaagttgggcgaatggaagctgtaa

SEQ ID NO: 5738 - protein, 426 aa, Neisseria gonorrhoeae FA 1090
MENSLKEAALKFHELPVPGKISVTPTKSLATDKDLALAYSPGVAAPCMEIHADPQNAYKYTGKGNLVAVISNGTAVLGLGDIGALAGKPVMEGKGVLFKKFAGVDVFDIEIDEKDPQKLVDIIAALEPTFGGINLEDIKAPECFYIERELRKRCKIPVFHDDQHGTAIITAAAVLNALRYTGRKIEEATLVCSGAGAAAIACLNQLLDLGLKRENVTVCDSKGVIYQTREDKDRMDESKKFYAVEDNGRRVLADAVKGKDIFLGLSGANLLTPEMLNTMNEKPIVFAMANPNPEILPPLAKETRPDVVIGTGRSDFPNQVNNVLCFPFIFRGALDVGATTINEEMKRACVYALADLAMEEVTEEVVAAYGKKFEFGAEYLIPTPFDSRLLPRVATAAAKAAMESGVATRPIADLEAYAAKLGEWKL

SEQ ID NO: 5739 - DNA, 2289 bp, Bacteroides fragilis NCTC 9343
  CDS (1)..(2289): transl_table=11
atggctaaaataaccaaagaagccgcattgctctatcattcacagggcaaacccggtaaaattgaggtggtacctaccaaaccctacagtacacaaaccgacttatctctcgcttactctcccggcgtggcagaaccatgcctcgaaatagaaaagaacccacaagatgcttataaatatacagccaaaggcaatctggtagctgttatctcaaacggtacagctgttctgggattgggtgatatcggcgctcttagcggcaaaccggtaatggaaggtaaaggtttgcttttcaaaatctatgcaggaatcgatgtattcgatatcgaagtcaatgaaaaagaccccgacaaatttatcgaagccgtcaaagccatcgcccctactttcgggggtatcaacctggaagatatcaaagcacccgaatgttttgaaatagaacgccgcctgaaagaggaactcgacattcccgtaatgcatgacgaccagcacggaacggccatcatctccagtgcgggattggtcaatgccttgcaagtagccggtaaaaagattgaagatgtaaaaatcgtagttaacggtgcaggtgcttcggccgtatcgtgtacgaagctttatgtatcattgggcgcacgccttgaaaacattgtcatgctcgatagcaaaggtgttatcagcaaggcacgcaccgacctgaacgaacagaagcgttatttcgcaaccgaccgtaccgatattcacacactggccgaagccatcaaagatgccgacgtattcttaggactctccaaaggaaacactttgtcgcaggatatggtgcgcagcatggctccgatgcctatcgtctttgccctggcaaacccgaccccggaaatctcttacgaagacgccatggcagcccgtccggacgtattgatggcaaccggacgttcggattatcccaatcagattaataatgtaatcggtttcccgtatatcttccgcggagctctcgacacgcaagcgaaagcgatcaatgaagagatgaaaattgccgctgtacacgccattgccaatctggccaaacagcccgtacccgatgtagtgaacgaagcctaccatgtgaacaacttcaccttcggtccggaatattttattccgaaaccggtagatccccgcctgatcacggaagtatccatcgccgtggcccgtgccgctatggagagtggtgttgcccgtaagaatatagagaactgggatgattataaaacacatctccgcgaattgatgggacaggaatctcagctgacccgccaactctacgacacggcccgtcgcaatccgcaacgtgtggtatttgccgaaggcggacaccccaacatgttgaaagctgctgtcgaagccaaatcggaaggaatctgccatcctattatattaggtaacgaagagcgcatcgagaaactggccaaagaactcgacctgagcctggacggaatcgaaatcatcaacctccgccacgaccgtgaagcggaacgccgtgagcgctatgcacacatcctctctcagaagcgtgcccgcgaaggtgctacatacgaagaggccaacgacaagatgttcgagcgcaactacttcggtatgatgatggttgaaaccggagacgcagacgctttcatcaccggactgtacaccaaatacagcaataccatcaaagtagcgaaagaagttatcggcatccgtccggaatacaaacatttcggaaccatgcacatcctgaactccaaaaagggaacttacttcctggctgacactttgatcaaccgtcatccggatacttccactttgatagatatagccaaactggccgatcaaactgtcagattcttcaatcatactccggtgatctccatgctgagctattccaacttcggttccgaccaggcaggaagcccgctgaaggtacacgaggcagtggcctatatgcaacaggaatatcccgaactggcaattgacggtgaaatgcaggtgaacttcgccatgaaccgcgagctccgtgactctaagtaccctttcacccgcctcaacggcaaggatgtcaatacattggtattccccaacctgagttctgccaacgcaggatatcagctgctgcaagccatggacccggataccgaattcatcggcccgatccagatgggactgaacaaacctatccactttacggatatagaaagctcggtacgcgacatcgtaaacatcacagccgtggctgtgatcgacgctattgtagaaaagaaaaaagctaataaatga

SEQ ID NO: 5740 - protein, 762 aa, Bacteroides fragilis NCTC 9343
MAKITKEAALLYHSQGKPGKIEVVPTKPYSTQTDLSLAYSPGVAEPCLEIEKNPQDAYKYTAKGNLVAVISNGTAVLGLGDIGALSGKPVMEGKGLLFKIYAGIDVFDIEVNEKDPDKFIEAVKAIAPTFGGINLEDIKAPECFEIERRLKEELDIPVMHDDQHGTAIISSAGLVNALQVAGKKIEDVKIVVNGAGASAVSCTKLYVSLGARLENIVMLDSKGVISKARTDLNEQKRYFATDRTDIHTLAEAIKDADVFLGLSKGNTLSQDMVRSMAPMPIVFALANPTPEISYEDAMAARPDVLMATGRSDYPNQINNVIGFPYIFRGALDTQAKAINEEMKIAAVHAIANLAKQPVPDVVNEAYHVNNFTFGPEYFIPKPVDPRLITEVSIAVARAAMESGVARKNIENWDDYKTHLRELMGQESQLTRQLYDTARRNPQRVVFAEGGHPNMLKAAVEAKSEGICHPIILGNEERIEKLAKELDLSLDGIEIINLRHDREAERRERYAHILSQKRAREGATYEEANDKMFERNYFGMMMVETGDADAFITGLYTKYSNTIKVAKEVIGIRPEYKHFGTMHILNSKKGTYFLADTLINRHPDTSTLIDIAKLADQTVRFFNHTPVISMLSYSNFGSDQAGSPLKVHEAVAYMQQEYPELAIDGEMQVNFAMNRELRDSKYPFTRLNGKDVNTLVFPNLSSANAGYQLLQAMDPDTEFIGPIQMGLNKPIHFTDIESSVRDIVNITAVAVIDAIVEKKKANK

SEQ ID NO: 5741 - DNA, 1269 bp, Pseudomonas syringae pv. syringae B728a
  CDS (1)..(1269): transl_table=11
atgtcagatctgaaaactgccgcgctcgaataccatgccaatcctcgtccggggaagctgagcgtcgaactcaccaagccgaccgcaaccgctcgtgacctggctctggcctacagccctggcgttgctgaacccgtgcgtgaaattgcccgtgaccccgagctggcttacaagtacaccggcaaaggcaatctggtagcagttatttctgatggcaccgcgattctcggcctcggcgatctggggccattggcttccaagccggtcatggaaggtaagggcgttctgttcaagcgcttcgccggtatcgacgttttcgatatcgaagtcgattccgaaagcccgcaggcgttcatcgacaccgtcaagcgtatctccatcaccttcggtggcatcaacctggaagacatcaaggcgcctgagtgctttgaaatcgagaaggcgctgatcgaacagtgcgacatcccggttttccatgatgaccagcacggcaccgctatcgtgacggcggccggcatgatcaacgcactggaaatcgtcggcaagaccctcgaatcggcgaagatcgtctgcctgggcgctggcgctgcagccatctcctgcatgaagctgctggtgagcatgggcgcgaagatcgaaaacatcttcatggtcgaccgtaccggcgttatccactccggccgtaccgacctgaaccagtacaaggctgcattcgctcacgctaccgagaagcgctcgctgaccgatgcactggatggcgctgacgtattcgtaggcctgtccggccctaacctgctgagcgctgaaaacctcaagctgatggccaaggacccgatcgtgttcgcttgctcgaaccctgatccggaaatctccccggaactggctcacgccacgcgcagcgatgtgatcatggccactggccgttcggactacccgaaccaggtcaacaacgtgctgggcttcccgttcatcttccgcggtgctctggacgttcgcgccaagcgcatcaacgaagaaatgaaaatcgctgcggccaacgccctgcgcgaactggccaagctgcctgtgccacaggaagtcagcgacgcctacggcggcatcaaactggaattcggtcgtgagtacatcatcccgaaaccaatggatacgcgcctgctgggcctgatcgccgatgcagtggccaaggccgctatcgaaagcggcgttgccaccctgccttatccgaagcactacccgctgaccagcgtggatgacgtgttcaagggctga

SEQ ID NO: 5742 - protein, 422 aa, Pseudomonas syringae pv. syringae B728a
MSDLKTAALEYHANPRPGKLSVELTKPTATARDLALAYSPGVAEPVREIARDPELAYKYTGKGNLVAVISDGTAILGLGDLGPLASKPVMEGKGVLFKRFAGIDVFDIEVDSESPQAFIDTVKRISITFGGINLEDIKAPECFEIEKALIEQCDIPVFHDDQHGTAIVTAAGMINALEIVGKTLESAKIVCLGAGAAAISCMKLLVSMGAKIENIFMVDRTGVIHSGRTDLNQYKAAFAHATEKRSLTDALDGADVFVGLSGPNLLSAENLKLMAKDPIVFACSNPDPEISPELAHATRSDVIMATGRSDYPNQVNNVLGFPFIFRGALDVRAKRINEEMKIAAANALRELAKLPVPQEVSDAYGGIKLEFGREYIIPKPMDTRLLGLIADAVAKAAIESGVATLPYPKHYPLTSVDDVFKG

SEQ ID NO: 5743 - DNA, 1269 bp, Pseudomonas fluorescens Pf-5
  CDS (1)..(1269): transl_table=11
atgtctgatttgaaaactgccgctctcgaataccatgccaatcctcgtccaggaaagctgagtgtcgagctcaccaaggccactgctaccgctcgtgatctggcgttggcctacagccccggcgtagccgagccggtacgcgaaatcgctcgcgatccggaactggcctacaagtacaccggcaaaggcaacctggttgccgtcatttccgatggcaccgcgattctcggcctgggtaacctcggcccactggcctccaagccagtgatggaaggcaagggcgtgctgttcaagcgtttcgccggcatcgatgtattcgacatcgaagtcgactccgaaagcccgcaggctttcatcgacaccgtcaagcgcatttccatcaccttcggtggcatcaacctggaagacatcaaggcacccgagtgctttgagatcgagcgcgctctgatcgagcagtgcgacattccggtgttccacgatgaccagcacggcaccgcgatcgttaccgccgccggcatgatcaacgccctggaaatcgctggcaaaaccctggccgacgccaagatcgtctgcctgggtgccggtgctgccgccatctcctgcatgaagttgctggtgagcatgggtgcacagatcgaaaacatcttcatggtcgaccgtaccggcgtgatccactccggccgcgatgacctgaaccagtacaaggcggtgttcgcccacgccactgacaagcgcaccctggccgacgccctgcaaggcgccgacgtgttcgtcggtctgtccggcccgaacctgctgagtgctgaaggcctgaaatccatggcgccgaacccgatcgtgttcgcctgctccaaccctgatccggaaatcgccccggaactggcgcacgccacccgcgatgacgtgatcatggctaccggccgttcggactacccgaaccaggtgaacaacgtcctgggcttcccgttcatcttccgtggtgccctggacgtacgcgccaagcgcatcaacgaagaaatgaagatcgccgcggccaacgccctgcgtgacctggccaagctgccggttcctcaggaagtgtgcgacgcctacggtggcatcaagctggaattcggccgtgagtacatcattcccaagccaatggatgcccgcctgatcaccgtgatctccgatgccgtggccaaggccgccatcgagaccggcgtggctaccctgccgtacccgaagaactacccgctcaagagcgtggatgatgtgttcaacggttaa

SEQ ID NO: 5744 - protein, 422 aa, Pseudomonas fluorescens Pf-5
MSDLKTAALEYHANPRPGKLSVELTKATATARDLALAYSPGVAEPVREIARDPELAYKYTGKGNLVAVISDGTAILGLGNLGPLASKPVMEGKGVLFKRFAGIDVFDIEVDSESPQAFIDTVKRISITFGGINLEDIKAPECFEIERALIEQCDIPVFHDDQHGTAIVTAAGMINALEIAGKTLADAKIVCLGAGAAAISCMKLLVSMGAQIENIFMVDRTGVIHSGRDDLNQYKAVFAHATDKRTLADALQGADVFVGLSGPNLLSAEGLKSMAPNPIVFACSNPDPEIAPELAHATRDDVIMATGRSDYPNQVNNVLGFPFIFRGALDVRAKRINEEMKIAAANALRDLAKLPVPQEVCDAYGGIKLEFGREYIIPKPMDARLITVISDAVAKAAIETGVATLPYPKNYPLKSVDDVFNG

SEQ ID NO: 5745 - DNA, 2340 bp, Psychrobacter arcticus 273-4
  CDS (1)..(2340): transl_table=11
atggcaattattatgaatgacgatatcactttgaatacggacacccctacccctagtacggaaaaagagcagtttgagcaggctgccttacattaccatgagttcccccgcccaggtaaaatctcagtcacccctatcaagcaactggcaaaccaacgtgatctggcgctcgcctactcaccaggtgtggcagtaccttgtcttgagattcaaagagatccgtctcttgcggcaaaatataccgcacgtagcaacttagttggtgttatcaccaatggtaccgcagtgctaggtttagggaatattggtccattggcatcaaagcctgtcatggaaggtaaaggggttctatttaaaaaattcgctggtatcgacgtttttgatattgaaattgcacaaaacgatccggacaaattcattgaagcagttgcctctttagagcctacttttggtggtatcaacttagaagacatcaaagcaccagagtgtttcaaaatcgagcgcgaattgcgtaagcgtatgaatattccagtattccatgatgaccaacatggtacttcaatcatcgttgcggcggcgatgctcaatgcattgatcatcactaacaaaaagattgaagacattaaaatcatctgttctggtgctggtgctgcagcgatttcttgcttggacatcatttgcgcccttggtgtgaataaaaacaacatctacgtatcagactcacgcggcattatctctactacccgtgaaaaccttgatgagactaagcagcgctatgctcgtgaaaccactgctacgactattgaagagctgatggatgatgtcgatatgttcttaggcttatctatgcccggtacattgacagaagatatggttcgccgtatggcaaaagaccctattatctttgcgcttgctaacccaacgcctgagattatgccagaaatcgcccatgccgtccgtccagacgttatcatggcaactggtcgctctgattaccctaaccaagtaaacaatgctttgtgtttcccttatatcttccgcggtgcgttagatgtgggcgcgacgacggttaacgaagaaatgaaagttgcgtgcgtacgtgctattgctgctatggcacatgttgaagcgacgccaataagcaacatcaaaaacgttgaaagtacgccaagctttggtcgtgattatctaatcccaggaccacttgagccaaacctaatcattgaaatcgcttctgcagtcgcaaaagcggcaatggattcaggcgttgcaacgcttcctatcgccgacatgaaagcctatcgtcaacgtctgtctgagtttgtctataactcagcgtttgtgatgaagcctatctttgctcgtgcaaaagccgatccaaagcgtatcgtttattgtgaaggtgaagacagagatgttttgttggctgtccaagtggtcgtcgatgagcaattggcttatccaatcttggtcggtcgtccttcagtaatcgaaaataacattaccaagctagcactacgcttgaaagatggcgagaacattactatcgtcaatgttgatgatgacccacgctacaacgattactggaaaggctactacgagaaaaacaaacgtactggtgtcagtatcgagcttgctcgccgtgatgtacgccgcaagacgtctctaattggtgcccttttggttgaaaatggcgatgccgatggtatgatttgtggtacattcggtcattatcaactgcatttaaaatatgtcagtagagtgattaataaaaaagaaggcatcaatgatttttatgcgatgaatgctgtgctcatgcaagatcgcaatatctttattgctgatacctatatccatgaagatccgactgctgagcaattggctgagatgactgtattggcaacagagcagttgcgccgttttagcatcaccccgcgtgtggctttggtgtcgcattcaaactttggtacttctgatcgtgccagcgcggtgaaaatgcgtaaagtacatcaattactaaccgagatgaatgtcgactttgaattcgatggtgagatgcaaggtgatgcggcacttgatgagcatattcgtgccaatgatttgccttcgagcaaccttaaaggttcagcaaatctactcatcttgccaacactagatgcatcgaacattgcttttaacctgcttaaaacagcaaccggtagcgcctctattggtcctatcttattaggcgcgagtaaacctgtgcatatcctaacgccatcagccacagcgcgccgtgtggtcaacatgactgcccttgcggttactgaagctcaagacttagaaaacaagcaacagtaa

SEQ ID NO: 5746 - protein, 779 aa, Psychrobacter arcticus 273-4
MAIIMNDDITLNTDTPTPSTEKEQFEQAALHYHEFPRPGKISVTPIKQLANQRDLALAYSPGVAVPCLEIQRDPSLAAKYTARSNLVGVITNGTAVLGLGNIGPLASKPVMEGKGVLFKKFAGIDVFDIEIAQNDPDKFIEAVASLEPTFGGINLEDIKAPECFKIERELRKRMNIPVFHDDQHGTSIIVAAAMLNALIITNKKIEDIKIICSGAGAAAISCLDIICALGVNKNNIYVSDSRGIISTTRENLDETKQRYARETTATTIEELMDDVDMFLGLSMPGTLTEDMVRRMAKDPIIFALANPTPEIMPEIAHAVRPDVIMATGRSDYPNQVNNALCFPYIFRGALDVGATTVNEEMKVACVRAIAAMAHVEATPISNIKNVESTPSFGRDYLIPGPLEPNLIIEIASAVAKAAMDSGVATLPIADMKAYRQRLSEFVYNSAFVMKPIFARAKADPKRIVYCEGEDRDVLLAVQVVVDEQLAYPILVGRPSVIENNITKLALRLKDGENITIVNVDDDPRYNDYWKGYYEKNKRTGVSIELARRDVRRKTSLIGALLVENGDADGMICGTFGHYQLHLKYVSRVINKKEGINDFYAMNAVLMQDRNIFIADTYIHEDPTAEQLAEMTVLATEQLRRFSITPRVALVSHSNFGTSDRASAVKMRKVHQLLTEMNVDFEFDGEMQGDAALDEHIRANDLPSSNLKGSANLLILPTLDASNIAFNLLKTATGSASIGPILLGASKPVHILTPSATARRVVNMTALAVTEAQDLENKQQ

SEQ ID NO: 5747 - DNA, 1242 bp, Colwellia psychrerythraea 34H
  CDS (1)..(1242): transl_table=11
atgacaaattttcgacaacgagcgcttgattaccatgctttacctactccgggtaaaattagtgttgcattaaccacagctgctgaaacgagtgatgatctgtcactagcttatagcccaggtgttgctgaaccagtaagagaaatagccgctaaccctgatgatgtctataagtacactgcaaaagggaatactgttgccgttatcactaacggtactgctattttaggtttaggtaatttaggccctatggcatctaagcccgtaatggaaggtaagtcattattatttaaacgctttgcaaatatcgactcgtttgatattgaagtaaaacacaaaaccgttgaagagtttgtaaatacagtttcgaatattgccgatagttttggaggtataaatcttgaagacattaaagccccagagtgttttgctattgagaaagccctaattgaacgttgtaaaatccctgtatttcatgatgatcaacatggtactgccattgttaccgctgcggctatgatcaacgcattagatattcaaggcaaagatattaaattggctaaaattgtttgtttaggggccggtgctgctgcaattgcctgtatggaactattgatcaaatgtggtgctcagcgtgaaaaaatctatatgcttgatactaaaggcatagtacatactcgtcgtgatgacttaaatgaatataaaaaactttttgcaaataatactgacaagcgtactttagatgacgccattgaaggcgctgatgtgtttgttggtgtgtctggtcctaatttgttgagtcaagaacaagttaaattaatggcgccgaacccaattatttttgcttgttcaaatccagatcctgaaattaaacctgaattggcgttagccgcccgtgctgatgcaattatcgctacaggtcggtctgattatcctaaccaagttaataatgtgctttgttttccttttatcttccgtggtgctttagatgttcgtgcccgtactatcaacgatgaaatgaaagttgcagctgtacatgctattagagcaatagccaaagaagaagtaccaaatgaagtgttaattgcatcaggtgaaactgagttaacttttggtcgagactatattattcccaagccaatggattcgcgtttattgcctgctgttgctttagccgtagcaaaggcggcggtagattctggtgttgcagcgctccccttccctgataattacatgcagtaa

SEQ ID NO: 5748 - protein, 413 aa, Colwellia psychrerythraea 34H
MTNFRQRALDYHALPTPGKISVALTTAAETSDDLSLAYSPGVAEPVREIAANPDDVYKYTAKGNTVAVITNGTAILGLGNLGPMASKPVMEGKSLLFKRFANIDSFDIEVKHKTVEEFVNTVSNIADSFGGINLEDIKAPECFAIEKALIERCKIPVFHDDQHGTAIVTAAAMINALDIQGKDIKLAKIVCLGAGAAAIACMELLIKCGAQREKIYMLDTKGIVHTRRDDLNEYKKLFANNTDKRTLDDAIEGADVFVGVSGPNLLSQEQVKLMAPNPIIFACSNPDPEIKPELALAARADAIIATGRSDYPNQVNNVLCFPFIFRGALDVRARTINDEMKVAAVHAIRAIAKEEVPNEVLIASGETELTFGRDYIIPKPMDSRLLPAVALAVAKAAVDSGVAALPFPDNYMQ

SEQ ID NO: 5749 - DNA, 1248 bp, Colwellia psychrerythraea 34H
  CDS (1)..(1248): transl_table=11
atgtctgattttaaacaagcagcactggattatcacgccttgccaacggctgggaaaattgccattgctatcacaacacccgccgaaaccagtgctgatttatcgctcgcttatagtcctggagtcgctgaaccttgtcgagaaatagccaaaaatcctgatgatgtctataaatacacaggtaaaggtaataccgttgccgttatctcaaacggtactgctgttttaggtttaggtaatttagggccaatggcctctaagccagtaatggagggtaaagcattattgtttaaacgctttgctgacattaattcattcgatattgaagtaacgcatagaacacctgaagagttcatcaatacggtcgctgctatcgcggatagttttggtggtattaacttagaagatatcaaagcacctgagtgttttataattgaaaaagcactaaatgagcgttgtaaaataccggtgtttcatgatgaccagcacgggactgctatcgtgacggcggctgccatgattaatgccttagaaatacaaaataagaaaattgaacaagctgatatcgtttgtttaggtgccggtgcggctgcgattgcctgtatggagttgctgatccaatgtggcgcaattcgtgaaaaaatatatatgctcgacacgaaaggggttatccatactcgccgtgatgatttatctgaatataaaacccgttttgccaataacaccgacaaacgaactttagatgatgttattgaaggcgctgatgtttttcttggtgtttctggccctaacttgcttaacacagagcagttaaagaaaatggcagacaacccagttgtgtttgcgtgttctaacccagatcctgaaataaaacctgaactagcacacagtgttagaagtgatttaattatggcgaccggtcgctctgattatccaaatcaagtgaacaatgttctatgtttcccctttattttccgcggtgctttagatgtacgagcgcgtaagattaataacgaaatgaaaatagctgcggtccatgcaattagagaactagccaagcaagacgtgccgaaaagtgttttaaaagcaagtaatgaaaaggaattgtcctttgggaaaggttacatcattcctcgcccaatggatccaaggttatgcaaaaatgttgccttagcagttgctaaagctgcggttgattcaggcgttgctgctttacctttgcctgataactatatgaatgatacttaa

SEQ ID NO: 5750 - protein, 415 aa, Colwellia psychrerythraea 34H
MSDFKQAALDYHALPTAGKIAIAITTPAETSADLSLAYSPGVAEPCREIAKNPDDVYKYTGKGNTVAVISNGTAVLGLGNLGPMASKPVMEGKALLFKRFADINSFDIEVTHRTPEEFINTVAAIADSFGGINLEDIKAPECFIIEKALNERCKIPVFHDDQHGTAIVTAAAMINALEIQNKKIEQADIVCLGAGAAAIACMELLIQCGAIREKIYMLDTKGVIHTRRDDLSEYKTRFANNTDKRTLDDVIEGADVFLGVSGPNLLNTEQLKKMADNPVVFACSNPDPEIKPELAHSVRSDLIMATGRSDYPNQVNNVLCFPFIFRGALDVRARKINNEMKIAAVHAIRELAKQDVPKSVLKASNEKELSFGKGYIIPRPMDPRLCKNVALAVAKAAVDSGVAALPLPDNYMNDT

SEQ ID NO: 5751 - DNA, 1269 bp, Pseudomonas syringae pv. phaseolicola 1448A
  CDS (1)..(1269): transl_table=11
atgtcagatttgaaaactgccgcgctcgaataccatgccaatcctcgtccggggaagctgagcgtcgaactcaccaagccgactgcaaccgctcgtgacctggctctggcctacagccctggcgttgctgaacccgtgcgtgaaattgcccgtgaccccgagctggcttacaagtacaccggcaaaggcaacctggtagcagttatttccgatggcaccgctattctcggcctcggcgatctgggcccattggcctccaagccggtcatggaaggtaaaggggttctgttcaagcgtttcgccggtatcgacgttttcgatatcgaagtcgattccgaaagcccacaggccttcatcgacaccgtaaaacgtatctccatcaccttcggtggcatcaacctggaagacatcaaggcacctgagtgctttgaaatcgagaaagcgctgatcgaacagtgcgacatcccggttttccacgatgaccagcacggcaccgctatcgtgactgctgccggcatgatcaacgcactggaaattgtcggtaaaaccctcgataccgcgaagatcgtctgcctgggcgctggcgctgcagccatctcctgcatgaagctgctggtgagcatgggcgcgaagatcgaaaacatcttcatggtcgatcgtaccggcgtcattcactccggccgtaccgacctgaaccagtacaaggctgtgttcgctcacgcgaccgagaaacgctcgctgaccgatgcgctggatggcgctgacgtattcgtgggcctgtcaggtcctaatctgctgagcgctgaaaacctcaagctgatggccaaggacccgatcgtgttcgcctgctcgaacccggacccggagatctccccggagctggctcacgccacccgtagcgatgtgatcatggcgaccggccgttcggattacccgaaccaggtcaacaacgttctgggcttcccgttcatcttccgcggtgctctggacgttcgcgccaagcgtatcaacgaagaaatgaagatcgctgcagccaacgccctgcgtgaactggccaaactgcctgttcctcaggaagtcagcgatgcctacggcggtatcaaactggaattcggtcgtgagtacatcatcccgaaaccaatggacacccgcctgctgggcttgatcgccgatgcagttgccaaggcagccatcgagagcggtgttgccaccctgccgtatccgaagcactacccgctgaccagcgtggacgatgtgttcaagggctga

SEQ ID NO: 5752 - protein, 422 aa, Pseudomonas syringae pv. phaseolicola 1448A
MSDLKTAALEYHANPRPGKLSVELTKPTATARDLALAYSPGVAEPVREIARDPELAYKYTGKGNLVAVISDGTAILGLGDLGPLASKPVMEGKGVLFKRFAGIDVFDIEVDSESPQAFIDTVKRISITFGGINLEDIKAPECFEIEKALIEQCDIPVFHDDQHGTAIVTAAGMINALEIVGKTLDTAKIVCLGAGAAAISCMKLLVSMGAKIENIFMVDRTGVIHSGRTDLNQYKAVFAHATEKRSLTDALDGADVFVGLSGPNLLSAENLKLMAKDPIVFACSNPDPEISPELAHATRSDVIMATGRSDYPNQVNNVLGFPFIFRGALDVRAKRINEEMKIAAANALRELAKLPVPQEVSDAYGGIKLEFGREYIIPKPMDTRLLGLIADAVAKAAIESGVATLPYPKHYPLTSVDDVFKG

SEQ ID NO: 5753 - DNA, 1287 bp, Thermobifida fusca YX
  CDS (1)..(1287): transl_table=11
gtgtcccacaaaccgcatcttcgaccctctccgctcgctgcttcccatcgcacactgtccccgtcaacgtggatggggacgcgcacggattcattgaggggtttctacgtgaccagcgaccgcagttcccggcttgacgacgatcccgcatttgctctccaccgcgggggcaagctggaagtccgctccaccgttgaggtcaacgaccaaaagagcctgtccctggcctacaccccgggtgtggcgcgtgtctgcaccgccatcgcggacaccccagagctggcggatacctacacctggaagaacaacgttgtcgccgtcgtcaccgacggtacggccgtgctcggcttgggggacatcggcccggaggcttccctgcccgtcatggagggcaagtcgctgctgttcaagcagttcgccgggatcgactcggtgcctatcgcgctcgcgtgcactgacgtcgacgagattgtcgagacggtggtccgcatggccccgtccttcggcggcatcaacctggaggacatctccgcgccccgctgcttcgagatcgaacagaggctgcgggagcgactcgacatcccggtcttccacgacgaccagcacggtacggccatcgtggcgctggccgcgatccgcaacgcggcccgggtcaccggccgcgaactcagcgacctgcgcgcggttgtctccggcgcaggggcgtccgggatcgcggtctcccgcatgctgatccggggcgggatcggcgacatcgcggtggccgacagcaagggcctgatctacgaggggcggcccgggctcaacaagtacaaggcggaactggcggccatcagcaacaaggccggtctgcagggttccatcgagtccgcgctggccggagcagacgtgttcgtgggcctgtccgcgggcgaagtgcccgaggaggtcgtcgccaccatggccgacaacgccatcatctgcgcgatggccaaccccaaccctgaggtccaccccgatgtggcccgcaagtacgcggcggtcgtggcgaccgggcgcagcgacttcccgaaccagatcaacaacgtgctcgccttcccgggtgtcttccgcggggccctggacgtgcgggccacgcagatcaccgagaacatgaagctcgcggcggccaccgcgctggccgacttggtgggcgacgatctcgcccccgactacatcatccccaagccgttcgacgagcgggtcgtcccggcggtggctgccgcagtggccgaccaggcccgcaaggacggcgtggcccgggcctaa

SEQ ID NO: 5754 - protein, 428 aa, Thermobifida fusca YX
MSHKPHLRPSPLAASHRTLSPSTWMGTRTDSLRGFYVTSDRSSRLDDDPAFALHRGGKLEVRSTVEVNDQKSLSLAYTPGVARVCTAIADTPELADTYTWKNNVVAVVTDGTAVLGLGDIGPEASLPVMEGKSLLFKQFAGIDSVPIALACTDVDEIVETVVRMAPSFGGINLEDISAPRCFEIEQRLRERLDIPVFHDDQHGTAIVALAAIRNAARVTGRELSDLRAVVSGAGASGIAVSRMLIRGGIGDIAVADSKGLIYEGRPGLNKYKAELAAISNKAGLQGSIESALAGADVFVGLSAGEVPEEVVATMADNAIICAMANPNPEVHPDVARKYAAVVATGRSDFPNQINNVLAFPGVFRGALDVRATQITENMKLAAATALADLVGDDLAPDYIIPKPFDERVVPAVAAAVADQARKDGVARA

SEQ ID NO: 5755 - DNA, 2325 bp, Ralstonia eutropha JMP134
  CDS (1)..(2325): transl_table=11
atgaccagccctcagcagtccccgtcccaagacgatctgaaacagcagcagcgtgaggcgctgcgcaaagcggcgctcgagtatcacgagtttccgactcccgggaagatctccgttacgccgaccaagccgctgtcgaaccagcgcgacctggccctggcctattcgccgggcgtggcagctgcctgcgaggagatcgtcgccgaccccgccaactccttccgctacaccgcgcgcggcaacctggtggcggtaatcaccaatggcaccgccgtgctgggcctgggcgacattggcgccgcggcgtccaagccggtcatggaaggcaaggccggcctgttcaagaaattcgccggcatcgacgtctttgacatcgaaatcgacgaaaaagaccccgaaaagctcgtgcaggtcattgccgcgctggagccgaccttcggcggcatcaacctcgaagacatcaaggcaccggagtgcttctacgtcgagcgcaagctgcgcgagaagatgaagatcccggtcttccacgatgaccagcacggtaccgccatcgtcgtggctgccgccgtcatcaacggcctgaaggtcgtcggcaaggacatcaagagcgtcaagctggtggcctcgggcgccggcgccgccgcgctggcctgcctggatctgctggtggacctgggcctgcccatcgagaacatctgggtgacggacctggccggcgtggtctacgaaggccgtaccgaattgatggacccggagaaggcccgcttctgccagaagaccgacaagcgcaagcttggcgaggtgatcgatggcgccgacattttcctgggcctgtccgccgccggcgtgctcaagcaggacatggtccagcgcatgggcgagaagccgctggtgctggccctggccaacccgaacccggaaatcgcaccggaactggtcaaggaagtccgcccggacgccatcatggcgaccggccgtaccgactacccgaaccaggtcaataacgtcctgtgcttcccgttcatcttccgcggcgcgctcgattgcggtgcgaccaccatcacgcgtgagatggagatcgccgccgccaacgcgatcgccgagctggcgcgccaggagcagagcgatatcgtggccacggcctacggcatccaggacctggcgttcggcccggaatacctgatcccgaagccgttcgatccgcgcctgatcgtgtgggtggcaccggctgtggcggaagccgccatgaaatctggcgtggcctcgcgtccgatcgaggacatggacgcctaccgcctgcagttgcagcagttcgtgtaccactccggcacgctgatgaagccgatctacgccgccgcccgcaaggtcgagatggcgaagaagcgcatcgtctttgccgagggcgaggaggagcgcgtgctgcgcgccgtgcaggtggtcgtcgatgaaaagctggccaacccgatcctgatcggccgcccggcggtgttgcagcatcgcattgagcgtttcggcctgcgcctgcgcccgggcgtggacttcgccgtggtcaaccccgagcacgacgagcgcttccgcgattattccgacgcgtattaccgcatgatggcgcgcgaaggcgttacgccgcagtacgccaagctcgaactgcgccgccgcaccacgctgattggcgccatgctggtcaagaggggcgaggccgatggcatgatctgcggtaccgtcagcaacaccgccgcacacctgcgctacatcgaccaggttctgggtgggaccagcaaggtctacgcagccatgaacggcctggtgctgccgggccgccagatcttcctggtggatacccacgtgaacgtggatccgaccgccgatgaactggccgagatcacgctgatggcggctgaagagctcaagcgcttcggcatcgagcccaaggtggggctgctgtcgcactcgaatttcgggtcgtccgaagcgccttcggcccgcaagatgcgcgatacgctcgcgatcctgcgcgaacgcgcaccggagctcgaagtcgacggcgaaatgcacggcgacagcgcgctggacgagaagctgcgcaataccctggtgccggacggcacgctcaagggcgaggcgaacctgctggtctgcccgaacatcgacgcggccaatatctcgtacaacctgctgaaggttgcggcgggcaacaacgtcgccatcgggccgattttgctcggcgtgaaggcgccggtgcacatcctgaccccgtcggcaacggtgcgccgcatcgtcaacatgacctcgctggtcgtggtcgacgctgctgccaagcgctaa

SEQ ID NO: 5756 - protein, 774 aa, Ralstonia eutropha JMP134
MTSPQQSPSQDDLKQQQREALRKAALEYHEFPTPGKISVTPTKPLSNQRDLALAYSPGVAAACEEIVADPANSFRYTARGNLVAVITNGTAVLGLGDIGAAASKPVMEGKAGLFKKFAGIDVFDIEIDEKDPEKLVQVIAALEPTFGGINLEDIKAPECFYVERKLREKMKIPVFHDDQHGTAIVVAAAVINGLKVVGKDIKSVKLVASGAGAAALACLDLLVDLGLPIENIWVTDLAGVVYEGRTELMDPEKARFCQKTDKRKLGEVIDGADIFLGLSAAGVLKQDMVQRMGEKPLVLALANPNPEIAPELVKEVRPDAIMATGRTDYPNQVNNVLCFPFIFRGALDCGATTITREMEIAAANAIAELARQEQSDIVATAYGIQDLAFGPEYLIPKPFDPRLIVWVAPAVAEAAMKSGVASRPIEDMDAYRLQLQQFVYHSGTLMKPIYAAARKVEMAKKRIVFAEGEEERVLRAVQVVVDEKLANPILIGRPAVLQHRIERFGLRLRPGVDFAVVNPEHDERFRDYSDAYYRMMAREGVTPQYAKLELRRRTTLIGAMLVKRGEADGMICGTVSNTAAHLRYIDQVLGGTSKVYAAMNGLVLPGRQIFLVDTHVNVDPTADELAEITLMAAEELKRFGIEPKVGLLSHSNFGSSEAPSARKMRDTLAILRERAPELEVDGEMHGDSALDEKLRNTLVPDGTLKGEANLLVCPNIDAANISYNLLKVAAGNNVAIGPILLGVKAPVHILTPSATVRRIVNMTSLVVVDAAAKR

SEQ ID NO: 5757 - DNA, 1284 bp, Methanosarcina barkeri str. Fusaro
  CDS (1)..(1284): transl_table=11
ttggaaaagaattcagaaaataatctggaaaaggactcaggacagggtctggaaaaacaccaggaaaaaagcggtgatgaacacacgtccttatatcaggaatcacttgctgtgcaccgacggtttgggggcgtactggaggttgccagtaaagtcagccttcaaacgatccacgacctcagcgttgcctatacaccaggagttgccgagccgtgcaggaagataatcaaggacccggaacttgtctatctctataccatgaagagaaatactattgctgtcgttactgacggatcggcagtgctggggctcgggaatataggaccttatgctgcactgcctgttatggagggaaaggcgataattttcaaagaatttgcaggcattgatgcctttccgatctgcctggacacacaggaaaccgaagaagtgataaaagcggtaaagcatctggctcctgcatttgggggcatcaaccttgaagacatcagcgctcctcgttgctttgaaatcgagggtagactgcgtgaagaactcgatgtgccagttatgcacgatgaccagcatgggacagccattgtagtttttgccgggcttctcaatgcccttaaaattgtgaataaaaagttaaatgaactccatatagtgatttcaggcatgggggcggcaggagtagcaattttccgatttctggttcgggcaggagcaaacccggcaagaattcttgtctgcgacagtaaagggctcgtgtacgaaggccggaaaaacggtatgaaccccgtaaaagaggaagttgccaggcttacaaaccctgaaaaattgaagggagggcttgaaaatgcttttccggatgctgacctttttatcggagtctctgtggggggcatagtcaatgaggaaatggttcggtccatggcaaaagatgcaattgtaatggctatggcaaaccctctgcctgagattatgcctgatgccgcaaagcgagcaggagcaagggttgttgctacgggcaggtcggattttccaaaccagcttaataactgcctgagctttccgggagtttttaaaggagctctcagcacttgtgcgagaaaaataacacctgagatggaaatggctgcgtcccatgcgcttgcagaggttgtaacactaaacgaactttctgaagatcgcataattcctgatccccttgacagacgtgtagtgcctgcggttgcaaaagctgttgcaagtgcatcacttgaaagctgtgttgcaaggaaaagtcatgaagatatggcctga

SEQ ID NO: 5758 - protein, 427 aa, Methanosarcina barkeri str. Fusaro
MEKNSENNLEKDSGQGLEKHQEKSGDEHTSLYQESLAVHRRFGGVLEVASKVSLQTIHDLSVAYTPGVAEPCRKIIKDPELVYLYTMKRNTIAVVTDGSAVLGLGNIGPYAALPVMEGKAIIFKEFAGIDAFPICLDTQETEEVIKAVKHLAPAFGGINLEDISAPRCFEIEGRLREELDVPVMHDDQHGTAIVVFAGLLNALKIVNKKLNELHIVISGMGAAGVAIFRFLVRAGANPARILVCDSKGLVYEGRKNGMNPVKEEVARLTNPEKLKGGLENAFPDADLFIGVSVGGIVNEEMVRSMAKDAIVMAMANPLPEIMPDAAKRAGARVVATGRSDFPNQLNNCLSFPGVFKGALSTCARKITPEMEMAASHALAEVVTLNELSEDRIIPDPLDRRVVPAVAKAVASASLESCVARKSHEDMA

SEQ ID NO: 5759 - DNA, 1224 bp, Thiobacillus denitrificans ATCC 25259
  CDS (1)..(1224): transl_table=11
atgagccaagcctccctcaagaaaaaagccctcgactaccaccgcctgcccagacctggcaagctcgaagtcgtttcgtcgaaaccctgcgcgacccaggccgacctctcgctcgcctataccccgggcgtcgcccagccggtgctggagatcgcgaagaatcccgccaaggcctacgactacaccaacaagggcaatctcgtcgccgtgatcaccgacggtaccgcgattctcggactcggtgaccgcggcgcgctcgccgcgaagccggtcatggaaggcaaggccgtcctcttcaagcaattcgccgacatcgacgtctacgacatcgaggtcaatgccagaacgccgcaggacttcatcaaggtcgtcgaggcgatcgcgccgaccttcggcggcatcaatctcgaggacatcgccgcaccgcactgcttcgagatcgaagccgcgctgaagaagaagctcgacatcccggtgttccacgacgaccagcatggcaccgccgttatcatctgcgcggggctcatcaacgcgctgcacgtccagggcaagacgctcgacagtgcgaagatcgtctgcctcggcgcgggcgccgcggggatcgcgtcgatgaagctcctgctcgcgatgggcgcgaggaagtccaacatcctgctcgtcgattccaagggcgtcgtgcacaaggggcgcaccgacctgaacgccttcaagaagggtttcgcccgcgcgaccaaactgcgtacgctcgaggacgcgatgaacggcgccgacgtgttcgtcggcgtctcgggcgccgacctcgtgagcccggccatggtcaagagcatggccgacaacccggtggttttcgcgctcgccaacccgaatcccgagatctcgccggcgaaggcgatggccgcgcgcagcgacctcgtgatggcgaccggacgctccgactatccgaaccaggtcaacaacgtacttggctttcccttcatcttccgcggcgcgctcgatgcgcgcgcacgcgagatcacgcaggacatgctgatcgccgccgtcaacgcgctcgccgaactcgcgcgcgagccggttccggctgcggtgctcaaggcctatcagctgaagaaactcaagttcggaccggactacatcctgcccaagcctttcgacccgcggctggccgagcgtgtgccgcaggccgtcgccaaggcggcccggaaggccgtcagaaaacggcgctga

SEQ ID NO: 5760 - protein, 407 aa, Thiobacillus denitrificans ATCC 25259
MSQASLKKKALDYHRLPRPGKLEVVSSKPCATQADLSLAYTPGVAQPVLEIAKNPAKAYDYTNKGNLVAVITDGTAILGLGDRGALAAKPVMEGKAVLFKQFADIDVYDIEVNARTPQDFIKVVEAIAPTFGGINLEDIAAPHCFEIEAALKKKLDIPVFHDDQHGTAVIICAGLINALHVQGKTLDSAKIVCLGAGAAGIASMKLLLAMGARKSNILLVDSKGVVHKGRTDLNAFKKGFARATKLRTLEDAMNGADVFVGVSGADLVSPAMVKSMADNPVVFALANPNPEISPAKAMAARSDLVMATGRSDYPNQVNNVLGFPFIFRGALDARAREITQDMLIAAVNALAELAREPVPAAVLKAYQLKKLKFGPDYILPKPFDPRLAERVPQAVAKAARKAVRKRR

SEQ ID NO: 5761 - DNA, 1392 bp, Anabaena variabilis ATCC 29413
  CDS (1)..(1392): transl_table=11
atggcagacctaactcctaattccagttttagtgttactctcaggttgcagattcccaatcgtgtgggaatgctagcatctatcactcaggcgatcgcatctagtggtggtaatctcggtcaaatcgatttaatcgagcaaacacgccaagtttctctccgtgacttaactgttgatgctgctagtaccgaacacgcggaaactattgtgcaagcagtcaaagccatacctgatattaagttagtcagcgtttacgatcgcacctttaatttacatcgtggcggcaaaatcagcatcaccagccggattcctctcaagagtgtgtccgacttggcaatggcttatacccctggtgtgggtcgggtttgtacagcgatcgctcaagacccatcgcaagtatacaacttaactatcaaacaaaatactgtcgccattgtcaccgatggtagtgcagttttgggattgggtaatcttggcccccatgcagctttaccagtaatggaaggtaaagccatgttatttaaggaatttgctggacttgatgcctttcccatttgcttggctactcaaaatacagaagagattatccaagcagttaaaaatattgccccggtctttggcggtgtgaatttagaggatatcgccgcaccccgttgctttgaaattgagcagagattaaaacaggaactagatatccctgtgtttcacgatgaccaacatggtacagcaattgtcaccttggcagcgttatttaactccttgaaactggtgcagaagtcactcaccgacatccgcatcgtgattaatggtgctggtgcggctggtgtggcgatcgcccggttactgcggaaagctggggcagaaaaaatttggatgtgcgactctaaaggcattatctccaccactcgcaccgacctcaatgaagaaaaacaagagtttgcagtcaaagctcaaggtacactagcaggtgcagtccaaggggcagatgtatttattggtgtgagtgcgcctggagtcttaacaccagaaatggtcaagtctatggctaaagacccgattgtctttgctatggccaatcccatacccgaaattcagccggaattagtgcagaacgatgtagctgttatcgctactggtcgcagtgactaccccaaccaaattaataacgtgttagcctttcctggggtattccgtggggcgttggattgtcgcgcgcaaacaattaccaccactatgtatttagaagcagctagtgcgatcgcttctttggttaatccttcagacttgagtcgggaacatattattccctcggtctttgatgagcgtgtcgttaccgccgtcgctgctgctgtgcaacgcgcagcgcgagaagaggggattgcacgggcttaa

SEQ ID NO: 5762 - protein, 463 aa, Anabaena variabilis ATCC 29413
MADLTPNSSFSVTLRLQIPNRVGMLASITQAIASSGGNLGQIDLIEQTRQVSLRDLTVDAASTEHAETIVQAVKAIPDIKLVSVYDRTFNLHRGGKISITSRIPLKSVSDLAMAYTPGVGRVCTAIAQDPSQVYNLTIKQNTVAIVTDGSAVLGLGNLGPHAALPVMEGKAMLFKEFAGLDAFPICLATQNTEEIIQAVKNIAPVFGGVNLEDIAAPRCFEIEQRLKQELDIPVFHDDQHGTAIVTLAALFNSLKLVQKSLTDIRIVINGAGAAGVAIARLLRKAGAEKIWMCDSKGIISTTRTDLNEEKQEFAVKAQGTLAGAVQGADVFIGVSAPGVLTPEMVKSMAKDPIVFAMANPIPEIQPELVQNDVAVIATGRSDYPNQINNVLAFPGVFRGALDCRAQTITTTMYLEAASAIASLVNPSDLSREHIIPSVFDERVVTAVAAAVQRAAREEGIARA

SEQ ID NO: 5763 - DNA, 1164 bp, Streptococcus agalactiae A909
  CDS (1)..(1164): transl_table=11
atgagtgaaaatttaggtcaattagctatcaaccaagctagagaaaatggtggaaaattagaagtaatttcaaaagttaaggtggaagataagagggatcttagtattgcctataccccaggggtggcgtcagtatcatcggctattgcagaggatgtggagcttgcatatgagttgacgactaaaaaaaatacagtagccgtagtaagtgatggttcagctgttcttggattaggagatattggtcctgaggcagcaatgccagtcatggaaggtaaagcagcactctttaaacgttttgcaaatgtagatgctgtgccaattgtgttgaaaacaaatgatacagaggaaattatttctatagtaaaagcgatttcgccgacttttggagggattaatttagaggatatttcagcaccacgttgtttcgaaattgaacaacgcctaattgaagaatgtgatataccagttttccatgatgaccaacatggtacagcaatcgtagtattagcggctttgtttaacagtttgaagttagttaaaaaagacattgaagatatcaaagtagttgttaatggtggaggttcagcgggcttatctataacaaggaagcttctatcagcaggagcaaaacatgtaacggtagttgatcgatttggcattattaacgataaagatcgggagtcattagcccctcatcacaaagcgattgcaaaattgactaatagagaattccaatctggatccttagaagatgctttggagaatgccgatgtttttataggtgtttctgctccggaagcattacatgcagaatggatttccaagatggctgataaacctattgtatttgcaatggcgaatcctattccagaaatttatccagatcaagccttaaaagccggagcttacatagttggaactggtcgtagtgattttccaaatcaaattaataatgttttagcatttccgggtattttcagaggagcattagatgctagagcaaaaacgataactgttgaaatgcaaattgcggcagcgagaggcatagctagtttaataccggaggaagaattaagcacaactcacatcattccaaatgcttttcaaaatgatgtggccgatgtagttgctaaaagcgttagtaatgctgtacaaaaataa

SEQ ID NO: 5764 - protein, 387 aa, Streptococcus agalactiae A909
MSENLGQLAINQARENGGKLEVISKVKVEDKRDLSIAYTPGVASVSSAIAEDVELAYELTTKKNTVAVVSDGSAVLGLGDIGPEAAMPVMEGKAALFKRFANVDAVPIVLKTNDTEEIISIVKAISPTFGGINLEDISAPRCFEIEQRLIEECDIPVFHDDQHGTAIVVLAALFNSLKLVKKDIEDIKVVVNGGGSAGLSITRKLLSAGAKHVTVVDRFGIINDKDRESLAPHHKAIAKLTNREFQSGSLEDALENADVFIGVSAPEALHAEWISKMADKPIVFAMANPIPEIYPDQALKAGAYIVGTGRSDFPNQINNVLAFPGIFRGALDARAKTITVEMQIAAARGIASLIPEEELSTTHIIPNAFQNDVADVVAKSVSNAVQK

SEQ ID NO: 5765 - DNA, 1353 bp, Pseudomonas fluorescens PfO-1
  CDS (1)..(1353): transl_table=11
gtgaccgggcagtcttgtggggactttgcgaggcgcgtatcctcgctgaccagtctgtccaacagtaaaaagcggaatgccaaaatgtctgatctgaaaactgccgctctcgaatatcatgccaatcctcgtccaggaaagctgagtgtcgagctcaccaaggccactgctaccgcccgcgacctgtcgctggcctacagccccggcgtagctgaaccagtgcgcgagatcgcccgcgatcctgaactggcctacaagtacaccggcaagggcaacctggttgcagtcatttccgatggcaccgcgattctgggcctgggtaacctcggcccactggcttccaagccagtcatggaaggtaaaggcgtgctgttcaagcgcttcgccggcatcgacgtcttcgacattgaagtcgactccgagagcccgcaagccttcatcgacaccgtaaaacgcatttccatcaccttcggtggcatcaacctggaagacatcaaggcacctgagtgctttgagatcgaacgcgctctgatcgagcagtgcgacattccggtcttccacgatgaccagcacggcaccgcgatcgtgaccgctgcgggcatgatcaacgccctggaaatcgcgggcaaaaccctggccgacgccaagatcgtctgcctgggcgctggcgccgccgccatctcctgcatgaaattgctggtgagcatgggcgccaaggtcgaaaacatcttcatggttgaccgtaccggcgtgatccacgctggccgtgacgacctgaaccagtacaaggctgtgttcgctcaccctaccgagaaacgcaccctggacgacgccatcgaaggtgctgacgtattcgtcggcctgtcgggtccaaacctgctgagcgccgagcaactcaagcgcatggcagccaacccgatcgtcttcgcctgctccaacccggatccggaaatctccccggaactggctcatgccacccgtaacgacgtgatcatggccaccggccgttcggactacccgaaccaggtcaacaacgtgctgggcttcccgttcatcttccgtggtgccctggacgttcgcgccaagcgcatcaacgaagaaatgaagatcgctgccgccaacgccctgcgcgaactggccaagctgccggtcccgcaggaagtctgcgacgcctacggcggtatctccctggaattcggccgtgagtacatcattccgaagccaatggacaaacgcctgatcaccgtgatctccgacgccgtggccaaggccgcgatcgagactggtgtggcgaccctgccgtatccgaagaactacccgctgaaaagcgtggatgacgtgttcaacggctaa

SEQ ID NO: 5766 - protein, 450 aa, Pseudomonas fluorescens PfO-1
MTGQSCGDFARRVSSLTSLSNSKKRNAKMSDLKTAALEYHANPRPGKLSVELTKATATARDLSLAYSPGVAEPVREIARDPELAYKYTGKGNLVAVISDGTAILGLGNLGPLASKPVMEGKGVLFKRFAGIDVFDIEVDSESPQAFIDTVKRISITFGGINLEDIKAPECFEIERALIEQCDIPVFHDDQHGTAIVTAAGMINALEIAGKTLADAKIVCLGAGAAAISCMKLLVSMGAKVENIFMVDRTGVIHAGRDDLNQYKAVFAHPTEKRTLDDAIEGADVFVGLSGPNLLSAEQLKRMAANPIVFACSNPDPEISPELAHATRNDVIMATGRSDYPNQVNNVLGFPFIFRGALDVRAKRINEEMKIAAANALRELAKLPVPQEVCDAYGGISLEFGREYIIPKPMDKRLITVISDAVAKAAIETGVATLPYPKNYPLKSVDDVFNG

SEQ ID NO: 5767 - DNA, 2280 bp, Rhodobacter sphaeroides 2.4.1
  CDS (1)..(2280): transl_table=11
gtgcttgcacaggatggccccctcatgaccaagaccaagatcacgcccgaagaggcgcttctctaccatctggaaccgcggcccggcaaatacgagatcaccgcctcgacgccgatggccacgcagcgcgacctgagcctcgcctattcgccgggggtggccgtcccggtgcaggcgatcgccgacgcgcccgagacggtctacgactatacggtcaagggcaacatggtggcggtgatttcgaacgggaccgcgatcctcggcatgggcaatctcggggcgatggcctcgaagccggtgatggagggcaaggcggtgctcttcaagcgcttcgccgacgtgaacgccatcgacatcgagctcgacaccgaggatccggacgagatcatccaggcggtgaagctgatggggccgaccttcggcggcatcaacctcgaggacatcaaggcgcccgagtgcttcatgatcgagcagcggctgaaggagctcatggacattccggtgttccatgacgaccagcacggcacggcggtgatctgcgcggcgggtctcatcaacgcgctggagctgtcgggcaagaagatcgaggattgccgcatcgtgctgaacggcgcgggggcggcggggatcgcctgtctggagctcctcaagaccatgggcgcgcgccacgacaactgcatcatgtgcgacaccaagggcgtgatctggcagggccgcaccgagggcatgaaccagtggaagtcggcccatgccgcgcgcaccgagctgcgcacgctggaagaggcgatggcaggggccgatgtgttcctcggcgtctcggccaagggcgcggtcacgcccgagatggtcaggagcatggccgacaatccggtgatcttcgccatggccaaccccgatcccgagatcacgcccgaggaggcgcaggcggtccgcgccgacgccatcgtggccacgggccggtcggactatccgaaccaggtcaacaacgtgctgggcttcccctatctcttccggggcgcgctcgacatccacgcccgcgcgatcaacgacgagatgaagatcgcctgcgcccgggcgctggcgcagctcgcgcgcgaggacgtgccggatgaggtggcgatggcctacgggcgcaagctctcgttcgggcgcgactacatcattcccacgcccttcgacccgcggctgatctacacgatcccgcccgcggtggcgaaggccggcatggatacgggcgtcgcgcggcggcccatcatcgaccttcagggctacgagctggcgctgaagtcccggatggacccgaccgcctcgatcctgcagggcatccatgcccgggccaaggcggcgcaggcccggatgatcttcgccgagggcgacgatccgcgcgtgctgcgcgcggccgtggcctatcagcgcgccggcatgggcaaggcgctggtcgtgggccgcgagcaggacgtgcgcgagaagctcgaggcgacgggcctcggcgatgcggtgcgcgagctcgaggtggtgaacgccgccaattcgcgccacatggaggcctacaagagcttcctttacaaccgtctccagcgcggcggcttcgacagctacgacatccagcggctggccacgcgcgaccggcatgtcttctcggcgctgatgctggcgcatgggcacggcgacgggctggtgacgggcgccacgcgcaaatcggcctatgtgatgcagctcatcaaccatgtgttcgatgccaaggcctcggacggcgcggtgggtgtgacggcgctgctgcacaagggccgcatcgtgctcatcgccgacacgctggtccatgaatggcccgaggccgaggatctggccgacattgcgatcaagtcggcgcgggtggcacgcaacctcgggctcgagccgcgggtggccttcgtctccttctcgaccttcggttatccggtctcggagcgggcggccaagatgggcgaggcctcgcgcgtgctcgacgggatgaaggtcgatttcgaatatgagggcgagatgaccgtcgacgtggcgctgaacaagacagccatggcgcaatatcccttctgccggctcacgggtcctgccaatatcctcgtggttccggcgcggcactcgtcgtcgatctcgatcaagctcatgcaggagatggcgggggcgaccgtgatcggtcccattctcaccggcgtgtcgaagccgatccagatctgcggcgtgaactcgacggtcaatgacattctcaacatggccgtgatggccgcgtgcaaggtggggtga

SEQ ID NO: 5768 - protein, 759 aa, Rhodobacter sphaeroides 2.4.1
MLAQDGPLMTKTKITPEEALLYHLEPRPGKYEITASTPMATQRDLSLAYSPGVAVPVQAIADAPETVYDYTVKGNMVAVISNGTAILGMGNLGAMASKPVMEGKAVLFKRFADVNAIDIELDTEDPDEIIQAVKLMGPTFGGINLEDIKAPECFMIEQRLKELMDIPVFHDDQHGTAVICAAGLINALELSGKKIEDCRIVLNGAGAAGIACLELLKTMGARHDNCIMCDTKGVIWQGRTEGMNQWKSAHAARTELRTLEEAMAGADVFLGVSAKGAVTPEMVRSMADNPVIFAMANPDPEITPEEAQAVRADAIVATGRSDYPNQVNNVLGFPYLFRGALDIHARAINDEMKIACARALAQLAREDVPDEVAMAYGRKLSFGRDYIIPTPFDPRLIYTIPPAVAKAGMDTGVARRPIIDLQGYELALKSRMDPTASILQGIHARAKAAQARMIFAEGDDPRVLRAAVAYQRAGMGKALVVGREQDVREKLEATGLGDAVRELEVVNAANSRHMEAYKSFLYNRLQRGGFDSYDIQRLATRDRHVFSALMLAHGHGDGLVTGATRKSAYVMQLINHVFDAKASDGAVGVTALLHKGRIVLIADTLVHEWPEAEDLADIAIKSARVARNLGLEPRVAFVSFSTFGYPVSERAAKMGEASRVLDGMKVDFEYEGEMTVDVALNKTAMAQYPFCRLTGPANILVVPARHSSSISIKLMQEMAGATVIGPILTGVSKPIQICGVNSTVNDILNMAVMAACKVG

SEQ ID NO: 5769 - DNA, 1239 bp, Carboxydothermus hydrogenoformans Z-2901
  CDS (1)..(1239): transl_table=11
atggcagattttaaagctaaagctttagaattacacaagaaatttcgcggaaaaattgaagtaaagtcgaaagtacctgctaaaactgcggaagacttatctttagcctatacccctggagttgcagagccctgtaagttaattgctgaaaataaggatttgtcatatgagtataccagccgctggaatatggtggcggtagtgtccgacggtactgcagttttaggattaggagatattggaccttatgccgccatgcctgtaatggaaggtaaggcactcctctttaaagaatttgccggggttgatgccttcccaatttgccttgataccaaagatccggataaaattgtcgaggtagtaaaacttttagagcctacttttggagggattaatttagaagatatcgcagcacctaattgtttttacatcgaagagcgattaaagaaagaaacatccattcccatttttcatgatgaccagcatggaaccgctattgttaccctggcggctctaataaatgcgttaaaaatagttaataaagatatttcaaagattaaagtagtggtcaatggtgcaggggcttcagcgactgcagtttccaagcttattatggcaagcggagtaaaaaatttaataatgtgtgatagtaagggaattatttaccggggccgtcaagaaggaatgaataaatacaaagaagaattagcccaaatcactaaccctgaaaatattaaaggaacccttaaggatgctttaaagggagcagatgtttttattggactttccaaagcaaaacaagtaacggaagaaatggttaagtcaatgaataaagatgcaattgtctttgctatggccaatccagaaccggaaatctaccccgatgaagcgaaaagagcgggggccaggattgtagctaccggtcgctccgatttccccaatcaagtaaataatgttttggcattcccgggagttttccggggtgcattggatgtaagggcgacagatatctccgaaaagatgaaaatagcagcaagttatgctataagttctttggttgccgaaaatgagcttaatgaagattatattttacccaaagctttcgatgcaagagttgcatcaacagttgctcgcgaagtggcaaaagcggctttagaggaaggaatagcaagaattaagataagcccggatgatgtctttaaacatacccttgaacttttggaaaaaagcggctcctaa

SEQ ID NO: 5770 - protein, 412 aa, Carboxydothermus hydrogenoformans Z-2901
MADFKAKALELHKKFRGKIEVKSKVPAKTAEDLSLAYTPGVAEPCKLIAENKDLSYEYTSRWNMVAVVSDGTAVLGLGDIGPYAAMPVMEGKALLFKEFAGVDAFPICLDTKDPDKIVEVVKLLEPTFGGINLEDIAAPNCFYIEERLKKETSIPIFHDDQHGTAIVTLAALINALKIVNKDISKIKVVVNGAGASATAVSKLIMASGVKNLIMCDSKGIIYRGRQEGMNKYKEELAQITNPENIKGTLKDALKGADVFIGLSKAKQVTEEMVKSMNKDAIVFAMANPEPEIYPDEAKRAGARIVATGRSDFPNQVNNVLAFPGVFRGALDVRATDISEKMKIAASYAISSLVAENELNEDYILPKAFDARVASTVAREVAKAALEEGIARIKISPDDVFKHTLELLEKSGS

SEQ ID NO: 5771 - DNA, 2259 bp, Geobacter metallireducens GS-15
  CDS (1)..(2259): transl_table=11
atgagcaaaaaacaggatgccctggaataccattcgagcggacgcaaaggaaagatagaagtcgtcgcctcgaagccttgccttacccagcgggacctctctcttgcctactccccgggcgttgccgaaccgtgcctggaaatcgagaaaaaccctgaggatgcttataagtacaccgcgaaaggaaacctggtcgccgtagtctccaacggcaccgcggtcctggggctcgggaacatcggcgcccttgccggcaaaccggtcatggaagggaaaggcgtcctcttcaagcgctttgccgacatcgacgtctttgacatcgaactgaacaccgagaaccccgatgaggtgatcaaagcctgccaactcctcgagcccacgttcggcggcatcaacctggaggatatcaaggcccccgagtgcttctatatcgaggaagagctcaagaagaccatgaacatcccggtcttccacgacgaccaacacggcaccgccatcatctccgccgccgccctcaccaatgcgctggagatcatcgacaagaagatcgaggatattcgcatcgtggtgaacggggccggggcctcggccatcgcctgcgccaacctcgccatctcgttgggggtgaagaaggaaaacctcgtcatgtgcgataccaagggtgtcatctacaagggacgcaccgaggggatgaacaagtataaggaacgcttcgccgtggacacccctctgcgcaccctggaagaggccgcgacaggggccgacgtcctctacggcctctcctccaagggggcattcacgccggagattgtgcgcaagctggccaagaatcccattatcttcgccatggccaacccggacccggaaatatcgccggaagaggcccatgccgtgcggggcgatgtcctcatcgccaccggccgttccgattatccgaaccaggtgaacaacgtcctcggcttccccttcatcttccggggagccctcgatgtccgggccactaccattaacgaggagatgaagaaggctgctgttttcgcccttgccgagcttgcccgtgaggaatgccccgactcggtctgccgcgcttacggcaacgtgaagttttcctttggccgcgactacatcattccgaaaccctttgacccccgtgccctcctgcgggtggcaccggcagttgccaaagcggccatggaatcgggggtggcccgccagcccatcgaggatatggagaagtacgttgagcatcttgagtcgttgcagggtaaagcaaaggaagccctgcggatgatcattaacaaggccaaagccgatcccaggaagctcgtcttccccgagggagataacgaaaaaatcctcagggcgactcagattctcattgaagaagagattgccaaaccgatcctcatcggcaaccaggacaagatccgggaaaagatggcggaactgggactcgacttcaacggcagtgtccagatcattgacccggccacctttgagcgttccgaagaatatgcccaggaactcttcagcctgcggcagcgcaagggactgaccctcactgaagcacgccggatcatgacccgcaaatcccgcacccatttcggctgtatgatggtacacatgggggatgcggactgcctcctctccggcatcgacacccattaccccgagaccatccgtccggcccttgaggtcatcggcagacagccgggtctgtccagcgtgcacggtctctacatgatggtcttcaagaaggggatttatttcatggccgataccacggtctgcatcgagccgactccggaagaactggcggaaaccgccattcttgcggcggaaaaagtccgcatgctcgacatcgagccgacaatcgccatgctctccttctccaacttcggctccgtcaaccatccccaggcccagaaggtcaggcgtgccgtcgagatcgtcaaacaaaaggctcccgatcttatcgtcgacggtgaaatgcagtcggacaccgcagtcgtctcggagatgctgcagaagagcttctcctttgcctccctcaaggaggcggccaacgtcctgattttccccgacctgaactccggaaacatctgctacaaactcctccaccatctaggcggggctgaagcgatcggtccgattcttatgggaatgcagaaaccggttcacgtcctccagcggggtgacgatgtgagcgacatcgtgaacatggcggcgcttgcagtggtggatgcccagaattcgtaa

SEQ ID NO: 5772 - protein, 752 aa, Geobacter metallireducens GS-15
MSKKQDALEYHSSGRKGKIEVVASKPCLTQRDLSLAYSPGVAEPCLEIEKNPEDAYKYTAKGNLVAVVSNGTAVLGLGNIGALAGKPVMEGKGVLFKRFADIDVFDIELNTENPDEVIKACQLLEPTFGGINLEDIKAPECFYIEEELKKTMNIPVFHDDQHGTAIISAAALTNALEIIDKKIEDIRIVVNGAGASAIACANLAISLGVKKENLVMCDTKGVIYKGRTEGMNKYKERFAVDTPLRTLEEAATGADVLYGLSSKGAFTPEIVRKLAKNPIIFAMANPDPEISPEEAHAVRGDVLIATGRSDYPNQVNNVLGFPFIFRGALDVRATTINEEMKKAAVFALAELAREECPDSVCRAYGNVKFSFGRDYIIPKPFDPRALLRVAPAVAKAAMESGVARQPIEDMEKYVEHLESLQGKAKEALRMIINKAKADPRKLVFPEGDNEKILRATQILIEEEIAKPILIGNQDKIREKMAELGLDFNGSVQIIDPATFERSEEYAQELFSLRQRKGLTLTEARRIMTRKSRTHFGCMMVHMGDADCLLSGIDTHYPETIRPALEVIGRQPGLSSVHGLYMMVFKKGIYFMADTTVCIEPTPEELAETAILAAEKVRMLDIEPTIAMLSFSNFGSVNHPQAQKVRRAVEIVKQKAPDLIVDGEMQSDTAVVSEMLQKSFSFASLKEAANVLIFPDLNSGNICYKLLHHLGGAEAIGPILMGMQKPVHVLQRGDDVSDIVNMAALAVVDAQNS

SEQ ID NO: 5773 - DNA, 1317 bp, Desulfovibrio desulfuricans G20
  CDS (1)..(1317): transl_table=11
atggctctgttcaccaaggaagaagcgctgcactatcacgaagccccccgccacggtaaggtggaggtcattcccgtaaaaccgtgccgcaaccagaaagacctttccatggcgtattcgcccggcgttgccgaagcatgcaaagccatcaaggaagacccttccaaggccgagatatacaccggcagaagcaatctggtggctgtggtatccgacggcaccgcagtgctcgggctgggcaatatcggcccgctggccggaaaaccggtcatggaaggcaaaggcgttcttttcaaaacatttgcagacattgatgtttttgacatcaacctcgacgtttccagtgccgaccagctcatcggcgtggtcaaggcgctggaacccaccttcggcggtatcaaccttgaagatatcaaggcgccggaatgcttctacattgaagatacgctgaaaaaagaaatgaacataccggtgtttcacgacgaccagcacggcacggctgtcatttccggcgccggcctgctcaacgcgctggaaataaccaaccgcaaagccgaaaacatgaaggtcgtcgtggtgggagccggggctgcaggcatcgcatgcgccaagttctacgtttcgctgggcgtggatcccgccaacatatacatgttcgactcacgcggacttatccacaagggccgtaaagatctgaacgaatacaaagctcttttcgcccagccgtccgatgcgggcactctggcagaggtgatgaagggcgcagacatgttcctggggctttccaccaaaaaccttgtctcgcaggacatggtgcgctccatggccaaagaccccgttctgtttgccatggccaaccccgaccccgaaatcacctatcccgatgccaagcaggcaagccccaactgcatcatgggtacagggcgctccgacttccccaatcaggtcaacaacgtatccgggttcccctacatcttccgcggggcgctggatgtgggtgccaccgaaatcaacgaagaaatgaaagtggcggcagcccgttcgctggcagcgctggccaaagaacccgtaccttcggagatatgcgacatgtacggcgtgaaggaactgaccttcggcgtcgactatgtcatccccaagcctctcgatcccagagttcttgtctgggaaacccccgctgttgccaaggcagccatggactccggcgtggccagaaagcccatcgccgacatggaagcctacaaaaagcagctcaccacccgcttcgatgagtcgcgcaagcgtattgcgcgtgttgtcgacagctacggtctttaa

SEQ ID NO: 5774 - protein, 438 aa, Desulfovibrio desulfuricans G20
MALFTKEEALHYHEAPRHGKVEVIPVKPCRNQKDLSMAYSPGVAEACKAIKEDPSKAEIYTGRSNLVAVVSDGTAVLGLGNIGPLAGKPVMEGKGVLFKTFADIDVFDINLDVSSADQLIGVVKALEPTFGGINLEDIKAPECFYIEDTLKKEMNIPVFHDDQHGTAVISGAGLLNALEITNRKAENMKVVVVGAGAAGIACAKFYVSLGVDPANIYMFDSRGLIHKGRKDLNEYKALFAQPSDAGTLAEVMKGADMFLGLSTKNLVSQDMVRSMAKDPVLFAMANPDPEITYPDAKQASPNCIMGTGRSDFPNQVNNVSGFPYIFRGALDVGATEINEEMKVAAARSLAALAKEPVPSEICDMYGVKELTFGVDYVIPKPLDPRVLVWETPAVAKAAMDSGVARKPIADMEAYKKQLTTRFDESRKRIARVVDSYGL

SEQ ID NO: 5775 - DNA, 2262 bp, Rhodospirillum rubrum ATCC 11170
  CDS (1)..(2262): transl_table=11
atggccgacgaaaccaaccgcaatctcgatcgtgaggcccttctgttccacatcaccggccgtccgggcaagatcgagatcgccgccaccaagccgctgaccacccagcgcgatctgtcgttggcctattcgccgggggtggccgcgccctgcctcgccatccagcgcgatcccaccaccgcttatgattataccgccaagggcaatatggtcgccgtcatctccaatggcaccgccgtgctcgggctgggcgatctgggcgccctggccagcaagccggtgatggagggcaaggcggttctgttcaagaagttcgccgatgtcgacggcattgatcttgaagtcgatacccgcgacgtcgatgaattcgtcaattgcgtgcgctacctggggccgaccttcggcggcatcaacctggaagacatcaaggcccccgaatgcttcatcatcgagcagcgcctgcgcgccctgatggacatccccgtcttccatgacgaccagcatggcacggcgatcatcgccgccgccgggctgatcaacgcccttgacctgtcgggccgcgatatcggcgacgccaagatggtggtcaatggcgccggcgccgccgccatcgcctgcgtcgagctggtcaaggcgatgggcatgcgctcggccaatgtcacgctgtgcgattccaagggcgtcgtccatcgcgggcgcagcgatctcaaccagtggaaatccgcccacgccatcgataccgaagcccgcagcctgcaagacgccatgcgcggcgccgacgtgttcttgggcctgtcggtcaagggcgcggtcacggccgagatggtggcgacgatggcgccccagccgatcatcttcgccatggccaaccccgacccggaaatcacccccgaagacgtgctttcggtgcgcgacgacgccatcatcgccaccggccggtcggattatcccaaccagatcaacaatgttctcggcttcccctatatcttccgcggcgcgcttgacgtgcgggcccgcaccatcaacgacgagatgaagatcgccgccgcccgcgccatcgccgccctggcccgcgaggacgtgcccgacgaggtggccgccgcctattcgggccggcgcctgcgctatggccgcgactatatcatccccgtgcccttcgatccccggctgatcgccgccatctccccggcggtggccgaggcggcgatgcgctcgggcgtcgcccgcaagccgatcatcgacatcatcggctaccggcgcgagctgtcggcccgcctcgatccgacggcggccagcctgcaggcgctgtcggcccaggtcatcaacaatcccaaacgggtggccttcgccgagggcgaagaggaaaagatgatccgcgccgccctgtcttaccgcaatgccggctatggcacgccgatcctgatcggccgggccgagaagatcgccgccaccatggccgcgatggggctgggcggcctggagggcatggagatccagaacgccaagctctcgacccagaccaagccttacaccgattacctgtacggccgcctgcagcgccatggctacctttatcgcgatgtccagcggctggtgaacagcgaccgcaatgtcttcgccgcgtcgatggtgatgcttcaagacgccgacgccatggtgacgggcaccatccgccacttccacagctgcctgtccgacatcaccaaggtcatcgatcagaccccgggcgagttggtgttctcggtcaccttgctgatcgcgcgcggccgcaccgtgttcatcgccgataccaatgtccacgaggcgccctcggcccaggaactggccgatatcgccatccaaaccgccgccctggcccggcgcatgggtcacgagccgcgcgtcgccctgctgtcctattcgaccttcggcgcgccgctcggccgcacccccgaccgcccgcgtcaggccgtcgccctgctcgaggaccgcaaggtcgaattcgaattcgacggcgagatcggcgtccatgtcgcgctcgatcccgatctgctcaagctctatcccttctgccggctgtcggcgccggccaatgtgctgatcatgccggggctgcattcggccaatatcagttccaagctgatgcagaagatgggcggggcgaccaccatcggaccggtgctgatggggctgtcgcggccttgccagatcgtgccgatggacgccaccgtatcggacatcgttcacatggccaccctcgccgccgccgaggccgggcgttaa

SEQ ID NO: 5776 - protein, 753 aa, Rhodospirillum rubrum ATCC 11170
MADETNRNLDREALLFHITGRPGKIEIAATKPLTTQRDLSLAYSPGVAAPCLAIQRDPTTAYDYTAKGNMVAVISNGTAVLGLGDLGALASKPVMEGKAVLFKKFADVDGIDLEVDTRDVDEFVNCVRYLGPTFGGINLEDIKAPECFIIEQRLRALMDIPVFHDDQHGTAIIAAAGLINALDLSGRDIGDAKMVVNGAGAAAIACVELVKAMGMRSANVTLCDSKGVVHRGRSDLNQWKSAHAIDTEARSLQDAMRGADVFLGLSVKGAVTAEMVATMAPQPIIFAMANPDPEITPEDVLSVRDDAIIATGRSDYPNQINNVLGFPYIFRGALDVRARTINDEMKIAAARAIAALAREDVPDEVAAAYSGRRLRYGRDYIIPVPFDPRLIAAISPAVAEAAMRSGVARKPIIDIIGYRRELSARLDPTAASLQALSAQVINNPKRVAFAEGEEEKMIRAALSYRNAGYGTPILIGRAEKIAATMAAMGLGGLEGMEIQNAKLSTQTKPYTDYLYGRLQRHGYLYRDVQRLVNSDRNVFAASMVMLQDADAMVTGTIRHFHSCLSDITKVIDQTPGELVFSVTLLIARGRTVFIADTNVHEAPSAQELADIAIQTAALARRMGHEPRVALLSYSTFGAPLGRTPDRPRQAVALLEDRKVEFEFDGEIGVHVALDPDLLKLYPFCRLSAPANVLIMPGLHSANISSKLMQKMGGATTIGPVLMGLSRPCQIVPMDATVSDIVHMATLAAAEAGR

SEQ ID NO: 5777 - DNA, 1224 bp, Moorella thermoacetica ATCC 39073
  CDS (1)..(1224): transl_table=11
atgagcatccaggaaagagcccttaacctgcacagggaatggcagggtaaaatcgaaacccggccgcgggtacaggttagaaatgcggatgatctaaccatggcttatacccccggggtagccgagccctgcaaagagatccacaaggaccccaatttggttgatgtttacacccgccgctggaacctggtggctgtcgtttccgacggttcggccgtcctcggcctggggaacattggcgcccgggccgccatgcctgtaatggaaggtaaaagcgtcctcttcaaatcctttgccggcgtggatgccttccctatttgcattgattcccaggatgtcgatgaaatagtccgtaccgtccagctcctgaccccgacttttggcggcgtgaacctggaagacattgccgcaccccgttgctttgagatcgagcggcgcctcaaggagactacggacatccccatcttccacgacgaccagcacggcaccgctgtagttgtcctgagcgccatcatcaacgcttgcaagattaccaaacgtgaactgtccgacctgaaggtggtcatcaacggtgccggcgcggcaggcattgcctgcggtaaactcctcgtggatgtgggcgttagtgatgtaatcctctgcgactcgaaggggattatctgctctaagcgcgacgacctcaacgccatcaaaaaagaaatgctccaaataaccaataaagaggatcgctgtggcaccctggccgatgccatggaaggagccaattgcttcattgggctttccgtcaaggatgccgtcacccccgagatggtccgttccatggacaaagattccattcttttcgccatggccaatccggtgccggagatcttgcctgacgtggcccgggctgccggagccgctgtggtgggaacgggccggagcgacttccccaaccaggtgaacaacgtcctgggcttccccggtattttccgcggcgccctggatgtcaaagcttcggatatcaatgatgccatgaagattgccgccgcccacgccctggccgatctggttggtgacagactctcggctgactttgtcatgcccgaagccttcgatcccagggtagcgccggcggtagccatggccgtagccagggcagccatagaaagcggtgtggcccgcgatcccaaggatcctgaatgggtaaaacgtcacactgaggaactcatcgctagacaatag

SEQ ID NO: 5778 - protein, 407 aa, Moorella thermoacetica ATCC 39073
MSIQERALNLHREWQGKIETRPRVQVRNADDLTMAYTPGVAEPCKEIHKDPNLVDVYTRRWNLVAVVSDGSAVLGLGNIGARAAMPVMEGKSVLFKSFAGVDAFPICIDSQDVDEIVRTVQLLTPTFGGVNLEDIAAPRCFEIERRLKETTDIPIFHDDQHGTAVVVLSAIINACKITKRELSDLKVVINGAGAAGIACGKLLVDVGVSDVILCDSKGIICSKRDDLNAIKKEMLQITNKEDRCGTLADAMEGANCFIGLSVKDAVTPEMVRSMDKDSILFAMANPVPEILPDVARAAGAAVVGTGRSDFPNQVNNVLGFPGIFRGALDVKASDINDAMKIAAAHALADLVGDRLSADFVMPEAFDPRVAPAVAMAVARAAIESGVARDPKDPEWVKRHTEELIARQ

SEQ ID NO: 5779 - DNA, 2271 bp, Burkholderia thailandensis E264
  CDS (1)..(2271): transl_table=11
atggacgaacaactgaagcaaagcgctctcgcctatcaccagaatccgaaacccggcaagatttcggtcacccccacgaagccgctgtcgaaccagctcgacctgtcgctcgcgtattcgccgggcgtcgcggccgcgtgcgaggcgatccacgcggacccgctcgacgcgcagaagtacacgtcgcgcggcaacctggtcggcgtcgtgacgaacggcaccgcggtgctcggcctcggcaacatcggcccgctcgccgcgaagcccgtgatggaaggcaagggctgcctgttcaagaagttcgcgggcatcgacgtgttcgacatcgaactcgccgaatccgatccggacaagcttgtcgaggcgatcgcgatgctcgagccgacgctcggcggcatcaacctcgaggacatcaaggcgcccgagtgcttctacatcgagcagaagctgcgcgagcggatgaagatccccgtcttccacgacgaccagcacggcaccgcgatcatcgcgtcggcggcgatcctgaacggcctgaaggtggtcggcaaggatctgtcgagcgtgaaactcgtctgctcgggcgcgggcgcggcggccatcgcgtgtctcgacctgctcgtgaagctcggcctgtccaaatcgaacgtgctcgtcgccgattcgaagggcgtgatctacgaaggccgcggcaaccttgatccgtcgaagcagcgctacgcggcggtgaccgatgcgcgcacgctcgccgacgcgatccgcgatgcggacgtgttcctcggctgctcgagcgcgggcgtgctgaagcaggacatggtgaagacgatggcggacaagccgctcatcctcgcgctcgcgaacccggagccggaaatccgtccggaagacgcgaaggcggtgcgcccggacgcgatcgtcgcgacgggccgctccgactatccgaaccaggtcaacaacgtcctgtgcttcccgttcatcttccgcggcgcgctcgacgtcggcgcgacgacgatcaccgaggagatgaagctcgcgtgcgtgcgcgcgatcgccgagctcgcgcaggaaaccgaccagagcgaggaagtcgcgaaggcgtatgaaggccattcgctcgaattcggtccggattacctgattccgaagccgttcgatccgcgcctcatcatcaagatcgcgccggccgtcgcgcaggccgcgatggattcgggcgtggccacccgcccgatcgccgacatggacgcgtaccgcgagcagctcggcacgaccgtctatcgcaccggcatggtgatgcgccccgtgttcgcgaccgcgaagacgaaggccgcgcgcatcgtgttcgccgagggcgaggacgagcgcgtgctgcgcgccgcgcagttcgtgctgcaggagaggatcgcgaagccgatcatcgtcggccggccgtcggtcgtcgagatgcggctgcagaagatcggctcgaagctgaagtgcggcgtcgatttcgagatcgtcaatccggaagacgatccgcgctatcagcaatgctggcaggcgtatcacgagatgggcgcgcgcgacggcgtgacgccggaggtcgcgaaggccgcgctgcgcaagttcaacacgctgatcggcgcgatgctcgtgcatctcggcgacgcggacggcatgatctgcgggatgatcgacacgtatcacagccacctgaagttcatcgagcaggtgctgggccgcgcgaagggcgccgagcacttcgccgcgatgaacctgctgatgctgccgggccgcaacctgttcatgtgcgacacgtacgtgaacgagcagccgagcgccgagcagctcgccgacatgacgatccaggccgcggccgagatcgagcgcttcggcatcacgccgaaggcggcgctcttgtcgaactcgaacttcggcagcgcgccgtcggcgtcgtcgcgccggatggcggaggcgcgcaaactgatcgtcgagcgcgcgcccgagctcgaagtcgacggcgaaatgcacggcgacgcggcgctgtccgaagtggtccgcaaggccgcgtttccgggcacgacgctcacgggcgaggcgaacctcctgatcatgccgaacgtcgaggcggcgaacatcgcgtacaacctgctgaagatggtcggcggcgaaggcgtgaccgtgggcccgttcctgctgggtgcggcgaagcccgtgcatatcctgacgccggccgcgaccgtgcgccggatcatcaacatgacggccgtcgccgcagcgaacgttcaggtgaagtga

SEQ ID NO: 5780 - protein, 756 aa, Burkholderia thailandensis E264
MDEQLKQSALAYHQNPKPGKISVTPTKPLSNQLDLSLAYSPGVAAACEAIHADPLDAQKYTSRGNLVGVVTNGTAVLGLGNIGPLAAKPVMEGKGCLFKKFAGIDVFDIELAESDPDKLVEAIAMLEPTLGGINLEDIKAPECFYIEQKLRERMKIPVFHDDQHGTAIIASAAILNGLKVVGKDLSSVKLVCSGAGAAAIACLDLLVKLGLSKSNVLVADSKGVIYEGRGNLDPSKQRYAAVTDARTLADAIRDADVFLGCSSAGVLKQDMVKTMADKPLILALANPEPEIRPEDAKAVRPDAIVATGRSDYPNQVNNVLCFPFIFRGALDVGATTITEEMKLACVRAIAELAQETDQSEEVAKAYEGHSLEFGPDYLIPKPFDPRLIIKIAPAVAQAAMDSGVATRPIADMDAYREQLGTTVYRTGMVMRPVFATAKTKAARIVFAEGEDERVLRAAQFVLQERIAKPIIVGRPSVVEMRLQKIGSKLKCGVDFEIVNPEDDPRYQQCWQAYHEMGARDGVTPEVAKAALRKFNTLIGAMLVHLGDADGMICGMIDTYHSHLKFIEQVLGRAKGAEHFAAMNLLMLPGRNLFMCDTYVNEQPSAEQLADMTIQAAAEIERFGITPKAALLSNSNFGSAPSASSRRMAEARKLIVERAPELEVDGEMHGDAALSEVVRKAAFPGTTLTGEANLLIMPNVEAANIAYNLLKMVGGEGVTVGPFLLGAAKPVHILTPAATVRRIINMTAVAAANVQVK

SEQ ID NO: 5781 - DNA, 1440 bp, Syntrophus aciditrophicus SB
  CDS (1)..(1440): transl_table=11
atgttaaaaaacccaggtccaagttacagtttccgcgtttctctggacatgccggaaggaaccgatgccctttcacgactcatggccgcagttggcagggtgggcggcgagatcatggaaatgaagacgcctgcccagaatgatggaaagattgtccgggaaattcttgtttacgcgcctgacgaagacagagaacgggaaattctgaaaaccatcggagccctggaaggattccgaacctttgatgtgattgactgcacctttctcaggcacacgggagggaaaatcgaggtggtcagcaaaattccaatggcaaaccgcgatgacctggccatggcctatacccccggcgtcgcgcggatatccctcgctgtttcggaggatatcgaacgagcctatgatctgaccatcagaaaaaacaccgttgcgatcgtcaccgacggatcggccgtcctcgggctcggggatatcggtcctgaagccgcgttgccggtcatggaagggaaagccgtattgttcaaaagcttcggcggcgttgacgccttccccatttgcctgaatacaaaaaatccggaagaaatcatccaggctgtaaaatggattgcccccggtttcggagggatcaatctggaagacatttccgcgccccgctgcttcgaaatcgagcagcgtctgaaaaaggaactcgatatccccgttttccatgacgatcagcacggtacggcagtcgttatcctcgccggcctgatcaatgccctgaaaatcgtcggcaaacggatcgaggaaatcaccgtcgtcgtcaacggcctgggagcggccggcatcgcctccatttctctgctgtcagccgcaggggtcagaaaaattatcggctgcgaccgtgggggaattctgtatcggggaaggcaggaagacatgaatccattcaaggccgaactcgccctgacaaccaatccggaagggttgaaaggcggtctggctgacgccctgcggggcgccgacgtcttcatcggtttgtcccgtcccggcctgcttcaaggaaaggatatctcgaaaatggcaagggatccgatcgtctttgccatggccaatccggttcccgaaattctgcctgaagaagcggagccctatgccgctgtcgtggcaacgggtcgctccgattacaacaaccaggtgaacaatgtcctgtgcttccccggccttttccggggagccctggactgtcacgcccgggacatcaatcaggaaatgctgctggccgcggttcacgccatcgctacggccgttaaagccgatgcgctgaggcgggattttatcatccccagcatttttgatcccaccgtccagccccgggtcgccgcggcagtcatggaggccgccagaaagaccggcgctgcccgttcccgtaaagcgtatatttcgccgatcaatcggagttga

SEQ ID NO: 5782 - protein, 479 aa, Syntrophus aciditrophicus SB
MLKNPGPSYSFRVSLDMPEGTDALSRLMAAVGRVGGEIMEMKTPAQNDGKIVREILVYAPDEDREREILKTIGALEGFRTFDVIDCTFLRHTGGKIEVVSKIPMANRDDLAMAYTPGVARISLAVSEDIERAYDLTIRKNTVAIVTDGSAVLGLGDIGPEAALPVMEGKAVLFKSFGGVDAFPICLNTKNPEEIIQAVKWIAPGFGGINLEDISAPRCFEIEQRLKKELDIPVFHDDQHGTAVVILAGLINALKIVGKRIEEITVVVNGLGAAGIASISLLSAAGVRKIIGCDRGGILYRGRQEDMNPFKAELALTTNPEGLKGGLADALRGADVFIGLSRPGLLQGKDISKMARDPIVFAMANPVPEILPEEAEPYAAVVATGRSDYNNQVNNVLCFPGLFRGALDCHARDINQEMLLAAVHAIATAVKADALRRDFIIPSIFDPTVQPRVAAAVMEAARKTGAARSRKAYISPINRS

SEQ ID NO: 5783 - DNA, 1227 bp, Frankia sp. CcI3
  CDS (1)..(1227): transl_table=11
gtgaccgcaaccactgaccagccgactctcggttccaccacgtcggacttcgccgggctcagcccgcggccgtccgacgacgatcccgcgttcgccctgcaccgcggaggaaagatcaacatcaacgctaccgctccattgaacagtcgggaagacctgtccctggcctatacgcccggagtcgcgcgggtgtgtaccgccatcgccgggactccggcccttgccgacgactacacctggcggtctaacaccgttgccgtggtcacggatgggacggccgtgctcggcctcggtgacatcggccccgcggcctccctgccggtgatggagggcaaggccgcgttgttcaagcgcttcggtggtgtggacgcggtgccactggcccttgcctgcacggacgtcgaggagatcgtcgacaccgtcgcgcgcctcgctccgagcttcggcgggatcaacctcgaggacatctcggcaccgcgctgcttcgccatcgagcgcctcctgcaggaccgcgtcgacatcccggtcttccacgacgaccagcacggaacggccatcgtcgcgctggccgcgctggagaatgcggcgaagctcaccggacgcaccctcggtgatctgcgtgccgtggtgtccggcgcgggcgctgccggcgccgccgtggcccgcatcctgctggccgccggcatcggggacatcgcggttggcgacagccgcggcatcctctacgccggtcgggacaacctcaccccgagcaaggccgcgctcgccgccgagaccaaccgtgccggcctggccgggtccatcaccgacgcgctcgccggcgccgatgtcttcctcgggctgtccgccgggcaggtcccggaggaggcggtcgccaccatggcgccggaggcgatcattttcgcgatggccaaccccgatcccgagatcgacccggcggtcgcccacaagtacgcgcggatcgtggcgaccggtcgcagcgactacccgaaccagatcaacaacgtcctcgccttccccggaatcttccggggagcgctcgatgtccgggccagccgcgtgacggagggcatgaagctcgccgccgcgagggcgctcgccgcggtgatcgcggacgagctggccgaggatctcatcatcccgagcgtgttcgacgaccgggtcgccccggccgtcgccgcggcgacggccgcggccgcgcgggcggacggggtggcccgccgctga

SEQ ID NO: 5784 - protein, 408 aa, Frankia sp. CcI3
MTATTDQPTLGSTTSDFAGLSPRPSDDDPAFALHRGGKININATAPLNSREDLSLAYTPGVARVCTAIAGTPALADDYTWRSNTVAVVTDGTAVLGLGDIGPAASLPVMEGKAALFKRFGGVDAVPLALACTDVEEIVDTVARLAPSFGGINLEDISAPRCFAIERLLQDRVDIPVFHDDQHGTAIVALAALENAAKLTGRTLGDLRAVVSGAGAAGAAVARILLAAGIGDIAVGDSRGILYAGRDNLTPSKAALAAETNRAGLAGSITDALAGADVFLGLSAGQVPEEAVATMAPEAIIFAMANPDPEIDPAVAHKYARIVATGRSDYPNQINNVLAFPGIFRGALDVRASRVTEGMKLAAARALAAVIADELAEDLIIPSVFDDRVAPAVAAATAAAARADGVARR

SEQ ID NO: 5785 - DNA, 2265 bp, Novosphingobium aromaticivorans DSM 12444
  CDS (1)..(2265): transl_table=11
atgtccgaggaaagcaacgtccgcttcaccgagcgcgaggcgcttttctaccataacacgatccgcccgggtaagatcgagatcatcgcctcgaagccgatggcgacgcagcgcgatctcagcctggcctattcgcctggcgttgcggtgccggtacgcgcgatcgcggaagatccgtccacggcgtacgactataccgcgaagggcaatcttgtcgcggtcatctccaatggcaccgcaatcctcggcctcggcaatctgggcgcgcttgcttccaagccggtgatggaaggcaaggcggtgctgttcaagcgctttgccgacgtcgattcgatggacatcgaactggcgaccgaagatgccgatgccttcatcgaggcggtcgccctgctcgaaccgacgttcggcggcatcaaccttgaagacatcaaggcgcctgagtgcttcatcatcgaacaggcgctgaaggagcgcctcaagatcccggtcatgcacgacgaccagcacggcaccgcgatcatctccgctgctggcctgcttaacgcctgccacctgaccggtcgccggctcgaggacgtgaaggtcgtcgtgaacggtgcgggggcggcggcaatcgcctgcaccgcgctgatcaaggcgatgggcgtgcgccacgacaacgtgatcatgtgcgaccggtccggcgtgatctaccgtggccgcgaatccggcatggaccagtggaagagcgcgcatgcggtcgacaccacggcgcgcagcctcgaggatgcgctcgtcggggcggacatcttcctgggtctttccgccgcgggcgcgctcaagcccgaatgggtgctgaagatggcgccgcagccgatcatcttcgcgatggccaatccggacccggaaatcacgccgcccgatgccaaggccgtccgcccggattgcatcgtcgcgacgggccggtccgactatcccaaccaggtcaacaacgtccttggtttccccttcatcttccgcggcgcgctcgatgtgcgggcgaccgcgatcaacgaagagatgaagatcgccgcggcagaggccatcgcccagctcgcgcgcgagccggtgcccgaggaagtggctgccgcctatggcatgaaccacaccttcgggctggactacatcattcccgcgccgttcgatccgcgcctgatggaagtcgtctcctccgccgtcgccaaggcggcgatggattcgggcgtcgcgcagaagcctatcgaggacttcgacgcctatcgcaccagcctcaaggcgcgtctcaacccgacgacttcggtcctgaccaacgtcttcgccacggccaaggacaaccccaagcgcgtcgtcttcgctgaagccgagaacgaggtggtgctgcgcgccgcgatccagttcaaggatttcggttatggcacgccggtgctggtgggccgcacccagccggttctcgacctgctgaccgaacttggcgtcagcgacccgtcgtcctacgagatccacaactcggcggtttcgccgctggtgccggagatggtcgagtacctctacgaacggctcaagcgtcgcggctatctcgagcgtgacgtcagacgcatggtcaaccaggaccgcaacgtcttcgcctcgctgctcgtcgcgcttggacatggcgatgcgctcatcaccggcatgacgcgcaccttcgcgcagtcgatgaaggaggtacgccgcgtcctcgatccgaagccggggcacctgcccttcggcatccacctgatggtggcgaagaactacaccgtgttcctcgccgacacgacggtgaacgagcgtccctcggccgaagacctcgcgcacatcgcgcgcgagaccgccgccgttgcccgccgcatgggccacgagccgcgcgtggcgttcctgtcctattcgaccttcggcaatccctatggccgctggctcgattcgatccggggcgcggtggcgatcctcgacgccgagaatcccggcttcgagtatgagggcgaaatggcgccggacgccgcgctcaaccccaaggtcatggcgaactatccgttcagccgcctctcgggcccggccaacgtgctgatcatgcctgggctgcaatcggccaacatctcggccaagctgctgcgcgaattggcgggcaatgcggtgatcgggccgatgctgctgggcatggagaagccggtgcagatcgcgccgatgacgtcgatcgcgcccgacatcctgaccctggccgtgctggcagcggcgggcatcgtcggctga

SEQ ID NO: 5786 - protein, 754 aa, Novosphingobium aromaticivorans DSM 12444
MSEESNVRFTEREALFYHNTIRPGKIEIIASKPMATQRDLSLAYSPGVAVPVRAIAEDPSTAYDYTAKGNLVAVISNGTAILGLGNLGALASKPVMEGKAVLFKRFADVDSMDIELATEDADAFIEAVALLEPTFGGINLEDIKAPECFIIEQALKERLKIPVMHDDQHGTAIISAAGLLNACHLTGRRLEDVKVVVNGAGAAAIACTALIKAMGVRHDNVIMCDRSGVIYRGRESGMDQWKSAHAVDTTARSLEDALVGADIFLGLSAAGALKPEWVLKMAPQPIIFAMANPDPEITPPDAKAVRPDCIVATGRSDYPNQVNNVLGFPFIFRGALDVRATAINEEMKIAAAEAIAQLAREPVPEEVAAAYGMNHTFGLDYIIPAPFDPRLMEVVSSAVAKAAMDSGVAQKPIEDFDAYRTSLKARLNPTTSVLTNVFATAKDNPKRVVFAEAENEVVLRAAIQFKDFGYGTPVLVGRTQPVLDLLTELGVSDPSSYEIHNSAVSPLVPEMVEYLYERLKRRGYLERDVRRMVNQDRNVFASLLVALGHGDALITGMTRTFAQSMKEVRRVLDPKPGHLPFGIHLMVAKNYTVFLADTTVNERPSAEDLAHIARETAAVARRMGHEPRVAFLSYSTFGNPYGRWLDSIRGAVAILDAENPGFEYEGEMAPDAALNPKVMANYPFSRLSGPANVLIMPGLQSANISAKLLRELAGNAVIGPMLLGMEKPVQIAPMTSIAPDILTLAVLAAAGIVG

SEQ ID NO: 5787 - DNA, 2256 bp, Anaplasma phagocytophilum HZ
  CDS (1)..(2256): transl_table=11
atgagcgatttttcagaaaaagacatggaggctcttgagtttcatagcaggggacggccgggtaaagtagccttgttgccaacgaagcctttgttgactcagggagatctgtctctagcatactctccgggggttgctgtaccgtgtatcaagatagcgtcggaccccgatctggtatacgaatatacggcaagaggtaattacgttgctgtgatatcaaatggcacagcagttttgggcttaggaaatataggcactttggctgctaagccggttatggagggtaaagctgttctgtttaaacgcttcgctgacatagatgcagtggatattgaagtgaacacagaagacgtagatgagttcattaatgctgttaaatatctggggcatagttgggggggtatcaatctagaagatatacgtgcgcccgaatgttttgttatagagagacgcctgagcgaacttatggatataccggtgttccatgatgatcagcatggaacggcgattattgtgcttgccggtataataaatgcccttgatattacgggaaaggtcctcaagaacgttaagatagtagtaaatggtgcaggtgctgcaggcattgcttgtgttgagatgcttaagtttgttgggatacctaacgacaatatcatattgtgcgaccaaaatggtgtaatatacaaggggcgccaacttggcgttaatgagtggaagttgaagcatgctgttgagacagacgcaagagacttgaaagatgcgataaaaggtgcagacattttcataggtttgtctgtgcgggatgttctcagcagggaaatgctcctttctatgaataaagaccctgtaattttcgctcttgctaatccgtatccagaggttaatccagagtttgcgagagaagtgaggggagatgcgatcatagcaactggaagatcagattacagcaaccagataaacaatgtgatgggtttcccttacatatttaggggagcgttggatgtgcgagctaagagagttaacaatgagatgaaattagctgttgcgcaggccatagcgatgctggcaagagaagtggtgagtgatgaagtgttggaggcttatggtggccgaggcatgaggtatggaagggattatataatacctacaccgtttgatccacgtctcatatcggtagtctccccagcggtagcaagagctgcgatagaaacaggggtagcgcagaagggaatagatgactgggacaagtatgcgcgtgcattaggttctagaatatcacctacttcgaacgtgcttaatcttatttatggttccgtaaagcagactcctaaaagggttatcttttctgaaggtgaggagataaaggtcattaaggctgccttgcagtggaggagtcagggatatggtgtgcctattttggtagggcgcgctgataagattaaggagggattggagcgtataggagttgatagcctggatggtatagagatagccaatgcggcggtttctactcgcaatgatgtatacatagattatctgtacagtaagctccagagaaaaggatacctacatcgcaggtgcgttagggatgtgaaaacagatagaaatgtctttgctgcgtgtatgttagcgtgtggtgatggggatattttggttacaggtgtaactcgaggatatagagaatcgctatctgatgtaagtaaggtgataggagcgcgtagtgagattatggggctatctgttattgttatggaagatagaacattgtttattgctgatactgcgattaatgaatttccaacatctaagcagatggcagatatagctgtaacagcagcggctgctgcgaaaaagatggggcatgaacctagggtggcgtttgtatcgtgctctaattttggtagtcatgcgcaggagggaactgaaaggataagagagagcatagagattctcgatcgccttggtgtaggctttgagtatgatggagagatgtccatagatgttgcactgaggaaggagtctttggcattatatccctttaaccgcataaagggtggacctgctaatgttttgataatgcctagtctgtacagtgccagcatctcttccaagttgctacaggaggtaggaggtgttgcagttgtagggcctattcttatgggtatggaaaaaccggtgcagattgtacaaatgacagcatctgtctctgagatattgaatcttgcggtgctctcaacgctatataatgcattgtag

SEQ ID NO: 5788 - protein, 751 aa, Anaplasma phagocytophilum HZ
MSDFSEKDMEALEFHSRGRPGKVALLPTKPLLTQGDLSLAYSPGVAVPCIKIASDPDLVYEYTARGNYVAVISNGTAVLGLGNIGTLAAKPVMEGKAVLFKRFADIDAVDIEVNTEDVDEFINAVKYLGHSWGGINLEDIRAPECFVIERRLSELMDIPVFHDDQHGTAIIVLAGIINALDITGKVLKNVKIVVNGAGAAGIACVEMLKFVGIPNDNIILCDQNGVIYKGRQLGVNEWKLKHAVETDARDLKDAIKGADIFIGLSVRDVLSREMLLSMNKDPVIFALANPYPEVNPEFAREVRGDAIIATGRSDYSNQINNVMGFPYIFRGALDVRAKRVNNEMKLAVAQAIAMLAREVVSDEVLEAYGGRGMRYGRDYIIPTPFDPRLISVVSPAVARAAIETGVAQKGIDDWDKYARALGSRISPTSNVLNLIYGSVKQTPKRVIFSEGEEIKVIKAALQWRSQGYGVPILVGRADKIKEGLERIGVDSLDGIEIANAAVSTRNDVYIDYLYSKLQRKGYLHRRCVRDVKTDRNVFAACMLACGDGDILVTGVTRGYRESLSDVSKVIGARSEIMGLSVIVMEDRTLFIADTAINEFPTSKQMADIAVTAAAAAKKMGHEPRVAFVSCSNFGSHAQEGTERIRESIEILDRLGVGFEYDGEMSIDVALRKESLALYPFNRIKGGPANVLIMPSLYSASISSKLLQEVGGVAVVGPILMGMEKPVQIVQMTASVSEILNLAVLSTLYNAL

SEQ ID NO: 5789 - DNA, 2277 bp, Ehrlichia chaffeensis str. Arkansas
  CDS (1)..(2277): transl_table=11
atggtagatcttgaaaataacggttttgatgaaaagagaaaagaagctcttgaattccattgtaaggatttaaaacctggaaaagtttctctgttacccactaaacctctattaacacaaagagacttatcattagcatattctcctggtgttgcagtaccttgtttagaaatagctagaaatcctgatttagtatatgaatatactgcgcgaggaaattatgttgctgtcatttcaaatggtacagctgtgcttggattaggtaatatagggcctttagcatctaaacctgttatggaaggtaaagctgttttatttaaacggtttgctgatattgatgcagtggatatagaagttaacacttctgatgtagatgaatttgttaatactgtaaaatatttgggactaagttggggaggcataaatttagaagatataaaagctcctgagtgttttattattgaaaaaagattgagtgaaataatggatattccagtgttccatgatgatcaacatggaactgctattattgtggctgctggacttattaatgctcttgatattacaggtaaaagttttaaagatgttaaaatagttataaatggtgctggtgctgcaggtattgcatgtcttgaaatgataaagttaataggagttcctgctgagaatataactttatgtgaccaaaatggggtaatatataaaggtagacaacttggcatgaatgagtggaaagaaaagcatgcgattgaaacagaaaataggtctttgaaagatgcattgataatggctgatgtatttcttgggttatcagttaaggatgtgttgagtaaagatatgctgttgtctatgaacagagatcctgtcatttttgctctagcaaatccagatcctgaaattaatcctaatgttgcacatgagattcgacctgatgctattatagctacgggaagatcagattataataatcagattaataatgtaatgggattcccttatatatttcgtggtgcgttagatgtacgtgctaaatcagttaacaatgagatgaaaatagctgcagcaaatgcaattgctatgttagcgcgtgaatatgttagtgatgaagtgtctgatgcatatggtggtcgtaaaatgaattatgggaaggattatattatacctactccatttgatcctagattaattactgtagtatctcctgcagttgcaaaagctgctattgattctggagttgctagaaaaaatatagagaattgggatgaatatactaaacagttagcatcacgactatcattgacttctaatatccttagtatgatgtacagtgctgttaaatgtgatcctaaaagagttattttttcggaaggagaagaagaaaaagttattgaggctgctgtacagtggcgtaatcaagaatatggattacctatacttgtagggcgtatcgacaaagtgcaagaagcatttgaccgtttaggtattaaagatacaaaaggtatagagattgctaatgcagcaatttctcaacgaaataatgagtatacagactatttatataagaaattacagcgtgaaggatatttatacaggagttgtgtacgagatgtaaaaacagatcgtaatgtttttgctgcgtgtatgcttgcatgtggtgatggtgatgtgttgattactggaatgacaagggggtattatgcttctattaatgatgtacagaaagtcataggttctcaaggtgtcgtatttggattatcaataattgttatgaaggagcgtactatatttgttgcagatactgctatacatgaatctccaactccagagcaaattgctgagatagcaattcaggcatctgttcaagctaagaaaatggggtatgaacctcgtgttagctttatttcttcttcaaactttggtagtcattctcaagaagatgctaagaaaatgagacaagctataaaaattttggatagttataatgttagctttgaatatgatggagaaatgtctgttgatactgcgcttaatccagagttgttaacattataccctttctgtaagttaactggtgaagcaaatgttttagtgatgccaactcttcatagtgctagtatatcttctaagttattacagagggctgctggagtatctgtaataggtcctattttaattggaatggaaaagcctgtacaaattgtacaaatgtcttcttctgtgtctgagattcttaatcttactgtacttgcatctttagtgaataatactaatttttaa

SEQ ID NO: 5790 - protein, 758 aa, Ehrlichia chaffeensis str. Arkansas
MVDLENNGFDEKRKEALEFHCKDLKPGKVSLLPTKPLLTQRDLSLAYSPGVAVPCLEIARNPDLVYEYTARGNYVAVISNGTAVLGLGNIGPLASKPVMEGKAVLFKRFADIDAVDIEVNTSDVDEFVNTVKYLGLSWGGINLEDIKAPECFIIEKRLSEIMDIPVFHDDQHGTAIIVAAGLINALDITGKSFKDVKIVINGAGAAGIACLEMIKLIGVPAENITLCDQNGVIYKGRQLGMNEWKEKHAIETENRSLKDALIMADVFLGLSVKDVLSKDMLLSMNRDPVIFALANPDPEINPNVAHEIRPDAIIATGRSDYNNQINNVMGFPYIFRGALDVRAKSVNNEMKIAAANAIAMLAREYVSDEVSDAYGGRKMNYGKDYIIPTPFDPRLITVVSPAVAKAAIDSGVARKNIENWDEYTKQLASRLSLTSNILSMMYSAVKCDPKRVIFSEGEEEKVIEAAVQWRNQEYGLPILVGRIDKVQEAFDRLGIKDTKGIEIANAAISQRNNEYTDYLYKKLQREGYLYRSCVRDVKTDRNVFAACMLACGDGDVLITGMTRGYYASINDVQKVIGSQGVVFGLSIIVMKERTIFVADTAIHESPTPEQIAEIAIQASVQAKKMGYEPRVSFISSSNFGSHSQEDAKKMRQAIKILDSYNVSFEYDGEMSVDTALNPELLTLYPFCKLTGEANVLVMPTLHSASISSKLLQRAAGVSVIGPILIGMEKPVQIVQMSSSVSEILNLTVLASLVNNTNF

SEQ ID NO: 5791 - DNA, 2256 bp, Silicibacter sp. TM1040
  CDS (1)..(2256): transl_table=11
atgcccaaagccaagattaccgatgaagaggcactggcctttcacttggaacccagccccggtaaatgggaggtcaccgcgacggttccgatgaccacgcagcgggatctgtccttggcctatagccccggtgttgcggtgccttgcgaagccatcgctgaaaaccccgaaaccgcctatgactacacaaacaagggcaatcttgttgcggtgatctccaatgggaccgccgttctgggtcttggcaacctcggcgcgctgggttcaaagcccgtgatggaagggaaatcggtcctcttcaaacgctttgcagatgtgaactcgatcgacatcgaactcgacaccgaggacccggacgaattcatcaaggcggttagactgatggggccgacctttggcggcatcaaccttgaggacatcaaggcgcccgagtgtttcatcatcgaacagaagctcaaggaagagatggacattccggtcttccatgacgaccagcatggcaccgccgtgatctgcgccgccggtctgatcaacgcgctgcatttatcgggcaagaagatcgaagatgtgcggattgtcctcaatggggcaggggcggcgggcattgcttgtattgagctcttgaaatccatgggcgcgcggcacgaaaactgcatcgtctgcgacaccaagggcgtgatctatcagggccgtaccgaggggatgaaccagtggaagtcagcgcatgcggtgaagacagaactgcgctcgctcgaagaagccatgaatggcgcggatgtattccttggcgtttcggtcaaaggtgcggtgacgcaggacatggtaaaatccatggccgacaacccggttatctttgcgatggcaaaccccgatccggaaattacgcccgaagaggcgcatgaggttcgcgtggatgcgatcgtggcgacgggacgttcggactatccgaaccaggtaaacaacgttctcggctttccttatctcttccgcggagcgctcgatattcatgcccgggccatcaatgatgagatgaagatcgcctgcgcgcatgctttggcgcgccttgcgcgcgaggatgtgccggatgaggtcgcgctggcctatggtaaatccctgtcctttggtcgcgactacatcatcccgacgccctttgatccacgcctgatccaccgcattccgccagcggttgccaaggccggcatggatactggtgtagcccgtcgtccgatcatcgatatggacgcctacgaacacggtctgcgcggacgtatggacccgacgcaatcgatcttgcgcggtctcaatgcacgcgcgcgtgcagcgcagtcgcggatgatcttcgccgaaggtgatgatccacgcgttctgcgtgcagccgtcacctatcagcgctcaggatttggcaaggctctggtcgtgggacgtcaggacgacgtcaaagccaaacttgaagaagcgggtctgggcgatgccgtgcgtgagctggaggtcgtgaacgccgccaatacgcatcactttgaaacctataaggatttcctttacgagagactgaaccgcaaagggtttgatcgcaaggatattcaccgtctggtggggcgtgatagacatgtgttctctgcgctgatgcttgcacatggacatggcgacggtctggtttcgggcgcgactcgcaagtctgcgcatgtgctcgaccggatcaaccatgtgttcgacgcagatgcggaacatggtgccgctggggtcacggcattgcttcacaagggtcgcattgtcttgatcggagacacgctcgttcatgaatggcctgacgagaatgacctagccaccattgcagagcgtgcagctggtgtggcgcgccacatgggtcttgatccgcgtgtggccttcgtcagtttttcgaccttcggctatccggtctcggagcgggcggagaagatgcatattgcgccaaccgtgcttgataaacgcggtgtagattttgaatacgaaggcgaaatgaccgtagatgtcgccctcaacgccaaggcgcaggagcattatccgttccagcgcctgtctggtccggccaatatcctggtggttccggcgcgtcactcggcatcgatctcggtgaagctgatgcaggagatgggtggtgccacggttgtgggtccgatcctttcgggtgtcgacaaaccgatccagatctgctccaccacctcgaccgcaaatgacgtgctgaacatggccgttcttgcggcctgcaacatcggttga

SEQ ID NO: 5792 - protein, 751 aa, Silicibacter sp. TM1040
MPKAKITDEEALAFHLEPSPGKWEVTATVPMTTQRDLSLAYSPGVAVPCEAIAENPETAYDYTNKGNLVAVISNGTAVLGLGNLGALGSKPVMEGKSVLFKRFADVNSIDIELDTEDPDEFIKAVRLMGPTFGGINLEDIKAPECFIIEQKLKEEMDIPVFHDDQHGTAVICAAGLINALHLSGKKIEDVRIVLNGAGAAGIACIELLKSMGARHENCIVCDTKGVIYQGRTEGMNQWKSAHAVKTELRSLEEAMNGADVFLGVSVKGAVTQDMVKSMADNPVIFAMANPDPEITPEEAHEVRVDAIVATGRSDYPNQVNNVLGFPYLFRGALDIHARAINDEMKIACAHALARLAREDVPDEVALAYGKSLSFGRDYIIPTPFDPRLIHRIPPAVAKAGMDTGVARRPIIDMDAYEHGLRGRMDPTQSILRGLNARARAAQSRMIFAEGDDPRVLRAAVTYQRSGFGKALVVGRQDDVKAKLEEAGLGDAVRELEVVNAANTHHFETYKDFLYERLNRKGFDRKDIHRLVGRDRHVFSALMLAHGHGDGLVSGATRKSAHVLDRINHVFDADAEHGAAGVTALLHKGRIVLIGDTLVHEWPDENDLATIAERAAGVARHMGLDPRVAFVSFSTFGYPVSERAEKMHIAPTVLDKRGVDFEYEGEMTVDVALNAKAQEHYPFQRLSGPANILVVPARHSASISVKLMQEMGGATVVGPILSGVDKPIQICSTTSTANDVLNMAVLAACNIG

SEQ ID NO: 5793 - DNA, 1176 bp, Mycobacterium sp. MCS
  CDS (1)..(1176): transl_table=11
gtggctgaaactgttgttggttcctcacaggtcgtcatcagtgacgacgagatcttcgccgctcacgagggcggcaagctcgcggtgcaactgaacgaaccgctggacacgcagcgcgccctgtcgatcgcctacaccccgggtgtcgcccaggtcagccgcgccatcgccaaagacccggccctggccgccaggtacacgtgggccaaccggctcgtcgcggtggtcagcgacggcagtgcggtgctcgggctcggcgatatcggcgcggccgcgtcgctgccggtgatggagggtaagagcgcgctgttcaagacattcggcggcctcgactcgatcccgatcgtgctcgacaccaaggaccccgacgagatcgtcgagacgctggtgcggctgcgcccgacgttcggggcggtcaacctcgaggacatctcggcgccgcgctgcttcgagatcgaacgccgcgtcatcgaggccctcgactgcccggtcatgcacgacgatcagcacggcaccgcgatcgtcgtactcgccgcgctgatgggtgcggcccgggtcctcggccgggacgcggccacgctgcgggtcgtgatctccggtgcgggcgcggcgggcgtcgcgtgtgccaacatcctgctggccgccggcatcagcgacgtcaccgtgctcgacagcaagggcatcgtccacagcggccgtgacgacctcaactccttcaaggccgaactcgccgaacgcaccaacccggccggccgcaccggcggtgtggccgaggccctcgacggcgccgacatgttcctcggactctcggccggtgtcgtcgcggaggagttgatcgcgacgatggcgccgggcggcatcgtgttcgcgctgtccaaccccgatccggagatccacccggacctcgcgcgtaagtacgccgccgtcgtggcgaccgggcgcagcgacttcccgaaccagatcaacaacgtgctggcgttccccggcgtgttccgcggtgcgctcgacgccggggcgcgccggatcaccgagcggatgaaggtggccgcggccgaggcgatcttctcggtggtcggcgacgacctggccgtcgaccacatcgtgccgagcgcgctcgatccgcgggtggcccctgcggtcgccgccgcggtcggtgcggcctcgcaggtcggctga

SEQ ID NO: 5794 - protein, 391 aa, Mycobacterium sp. MCS
MAETVVGSSQVVISDDEIFAAHEGGKLAVQLNEPLDTQRALSIAYTPGVAQVSRAIAKDPALAARYTWANRLVAVVSDGSAVLGLGDIGAAASLPVMEGKSALFKTFGGLDSIPIVLDTKDPDEIVETLVRLRPTFGAVNLEDISAPRCFEIERRVIEALDCPVMHDDQHGTAIVVLAALMGAARVLGRDAATLRVVISGAGAAGVACANILLAAGISDVTVLDSKGIVHSGRDDLNSFKAELAERTNPAGRTGGVAEALDGADMFLGLSAGVVAEELIATMAPGGIVFALSNPDPEIHPDLARKYAAVVATGRSDFPNQINNVLAFPGVFRGALDAGARRITERMKVAAAEAIFSVVGDDLAVDHIVPSALDPRVAPAVAAAVGAASQVG

SEQ ID NO: 5795 - DNA, 1446 bp, Rubrobacter xylanophilus DSM 9941
  CDS (1)..(1446): transl_table=11
atggaggccataccgagcgccagctacagcatgaccctcagggtggagttcccccaccgggcgggggctctgggcaggatcctgacgaccatcggcgacgcgggcgggatggtcggggccatagacatcgtcaggatggggcaggagcgctccatccgggacatcacggtcaacgcccgcgactccgagcacggccagcggatagtgcgggcggtgggcgcgctgcccgaggtgcgggtggtgaacgtctcggaccgcacctttctgctgcacctcgggggcaagatagaggtccactccaagatacccgtccgcacccgggacgacctctccatggcctacacgccgggggtggcccgggtttgccgcgccatagcccaggagccggagcgggccttcaacctgacgatcaagcgcaactcggtggcggtggtcaccgacgggacggcggtcttggggcttggggacatcgggccgtacgccgcgatgccggtgatggagggcaaggcgatgctcttcaaggagttcgccggggtggacgccttccccgtgtgcctggacaccaaggacccggaggagatcgtgcgcaccgtgaagtacgtggcgccggccttcggggggataaacctggaggacatctcggccccgcgctgcttcgagatagaggagcgcctcaagcaggagctggacatcccggtcttccacgacgaccagcacggcacggcggtggtggtgctcgccgcgctcatcaacgcgctgaggatcgtgggcaagcggatggaggagctgaaggtcgtggtgtgcggggtgggggccgcgggggtggcctgcgccaagatccttctcgccgcgggggtgaaaaacatcgtcggctgcgaccgctacggggtcgtctaccgggggaggggggacgcggacacctcgcggggctggttcgcggagaacacgaacccggagaacatcaggggcaccctggccgacgcgatccggggcgccgacgtgtttatcggggtctcggcgccggacgtgctcacggtggagcacatagagagcatggccgacgagcccatagtcttcgccatggccaacccggacccggagatccggccggagatcgcctacggtcacgcccggatcatcgccaccggccgcagcgactacccgaaccagatcaacaacgtcctctgcttccccggcgtcttccggggggccctggacatccgggcccgggagataaacgaggagatgaagctcgccgcggcccgcgcgatagccggcgtgatcccggaggagagcctctcggaggactacatcatcccctcggtcttcgacgagcgggtggtcccggccgtggccggggcggtggcggaggccggggtggagtccggggtggcccggcgggtgcgggagcgctcggagacggacttctcggcggcctccttctga

SEQ ID NO: 5796 - protein, 481 aa, Rubrobacter xylanophilus DSM 9941
MEAIPSASYSMTLRVEFPHRAGALGRILTTIGDAGGMVGAIDIVRMGQERSIRDITVNARDSEHGQRIVRAVGALPEVRVVNVSDRTFLLHLGGKIEVHSKIPVRTRDDLSMAYTPGVARVCRAIAQEPERAFNLTIKRNSVAVVTDGTAVLGLGDIGPYAAMPVMEGKAMLFKEFAGVDAFPVCLDTKDPEEIVRTVKYVAPAFGGINLEDISAPRCFEIEERLKQELDIPVFHDDQHGTAVVVLAALINALRIVGKRMEELKVVVCGVGAAGVACAKILLAAGVKNIVGCDRYGVVYRGRGDADTSRGWFAENTNPENIRGTLADAIRGADVFIGVSAPDVLTVEHIESMADEPIVFAMANPDPEIRPEIAYGHARIIATGRSDYPNQINNVLCFPGVFRGALDIRAREINEEMKLAAARAIAGVIPEESLSEDYIIPSVFDERVVPAVAGAVAEAGVESGVARRVRERSETDFSAASF

SEQ ID NO: 5797 - DNA, 2286 bp, Mesorhizobium sp. BNC1
  CDS (1)..(2286): transl_table=11
atggccgaagctgaaaagaacgacagggtgggcccctcggtgagtgcgcaggaagcgcttgaattccacgccatggggcgacccggaaagctggaaatcactccgaccaagccgatggcgacgcagcgcgacctgtcgctcgcctattcccccggcgtggccgtgcctgtcaaggccatcgcggaggatccggctcgcgccttcgattacacgacacgcggcaatctcgtcgccgtcatttccaacggcacagccattctcggcctcggcaatctgggcgcattggcctccaagccggtcatggaaggcaaggctgtgctcttcaagcgcttcgccgacgtggattcaatcgaccttgaggtggagacggaggacgcagacgagttcgtcaattgcgtcaagctgctcggtccctcctttgggggcatcaacctcgaggacatcaaggcgccggaatgcttcatcatcgagacgcgcctgcgcgagctcatggacatcccggtcttccacgacgaccagcacggcacggccatcatagccgtcgccggcctcatcaacgccctggatctcaccggccgtgacatgaagacgacgaagctcgtctgcaacggcgcgggagcagccggcattgcctgcatcgagcttgccaaggcgatcggctttgcgccggggaacatcctcctctgcgacacgaagggcgtggtctacaagggccgcacggagggcatgaaccagtggaagtcggcccacgccgtggaaaccgacaagcgcacgctggccgaggcacttgacggggcggatgtctttttcggcctttcggccaagggggcgctcacgcccgccatggttcaatccctggccaaaaaccccatcattttcgccatggccaatcccgacccggagatcactccggaggaggtggccgagattcgcacggacgccatcatggcgacgggccggtcggactacccgaaccaggtcaacaatgtgcttggttttccctatattttccgcggcgctctcgatgtgcgcgccacgaccatcaacgacgcgatgaaggtggcggcagccgaggcgctcgcggctctcgcacggcaggacgtgccggatgatgtggccgccgcctatcagggaaaccggccgaaatacgggccgaactacatcattcccgtgcccttcgacccgcggctcatcacggcggtcccggtggccgtcgcaaaggcggcgatggattcgggcgttgcgcggcggcctatcctcaacctggagcgctacgagcaggagctttccgcccgcagggacccgatcgcctcgacgctgcagcgcatctatgaccgcgtgcgccgccaacccaaacgcatcgtctttgccgaaggggaggaggagcaggtgatgcgcgcggcggtctcctatgtgaaccagcggctcggcacggcgatcctgctggggcgcgaggagcgcatccgcgagacggcagtaaatgcgggagtcgatctcgcccgatccggaatcgagatcatcaatgccaggctctcccgccgcaacggcatttacgcagactatctttatgagcgcctgcaacggaaaggctatcttttccgcgactgccagcggctcattaacaacgaccgcaaccactttgctgcctgcatggtggcgcttggcgatgccgacggcatggtgacgggcgtgacgcgaaactattccacggcattggacgacgtgcgccgcgtcattgatgcaaaacccggccaccgggtgatcggtgcttccatcgtgctggcgcgcggacgcaccgtcatcgtcgcggataccgccgtgcacgacatgccggatgcacaacagatcgccgacattgccgaggaatcggcaaattttgcccgtcgcatgggttacgagccgcgcgtggcgatgctcgcctattccaccttcgggcatcccgccggcgaacgatccgaacgcatccaggaaacggtgaagattctcgacaagcggcgcgtggatttcgagtatgacggcgagatggccgccgatgtggcgcttaatccgcagatcatgcagcaatatccgttctgccgcctttccgggcccgcgaatgtactggtgatgccggcattccactccgcgtcgatctcgaccaagatgctgcaggagctgggtggttccacggtgataggtccgctgctggtgggcctcaacaagccggtgcagatcgtttcgctcaatgcgaaggactcagacatcgtgaacatggccgcggttgcggcctacacagcgggcggatga

SEQ ID NO: 5798 - protein, 761 aa, Mesorhizobium sp. BNC1
MAEAEKNDRVGPSVSAQEALEFHAMGRPGKLEITPTKPMATQRDLSLAYSPGVAVPVKAIAEDPARAFDYTTRGNLVAVISNGTAILGLGNLGALASKPVMEGKAVLFKRFADVDSIDLEVETEDADEFVNCVKLLGPSFGGINLEDIKAPECFIIETRLRELMDIPVFHDDQHGTAIIAVAGLINALDLTGRDMKTTKLVCNGAGAAGIACIELAKAIGFAPGNILLCDTKGVVYKGRTEGMNQWKSAHAVETDKRTLAEALDGADVFFGLSAKGALTPAMVQSLAKNPIIFAMANPDPEITPEEVAEIRTDAIMATGRSDYPNQVNNVLGFPYIFRGALDVRATTINDAMKVAAAEALAALARQDVPDDVAAAYQGNRPKYGPNYIIPVPFDPRLITAVPVAVAKAAMDSGVARRPILNLERYEQELSARRDPIASTLQRIYDRVRRQPKRIVFAEGEEEQVMRAAVSYVNQRLGTAILLGREERIRETAVNAGVDLARSGIEIINARLSRRNGIYADYLYERLQRKGYLFRDCQRLINNDRNHFAACMVALGDADGMVTGVTRNYSTALDDVRRVIDAKPGHRVIGASIVLARGRTVIVADTAVHDMPDAQQIADIAEESANFARRMGYEPRVAMLAYSTFGHPAGERSERIQETVKILDKRRVDFEYDGEMAADVALNPQIMQQYPFCRLSGPANVLVMPAFHSASISTKMLQELGGSTVIGPLLVGLNKPVQIVSLNAKDSDIVNMAAVAAYTAGG

SEQ ID NO: 5799 - DNA, 2274 bp, Cytophaga hutchinsonii ATCC 33406
  CDS (1)..(2274): transl_table=11
atgtcaataagtaaggaagacgctttaaactatcatacacagggtaaacctggtaaaatagaagttgtgcccacaaaggcattaagcacacaacttgatttagctctggcatattctcccggcgtagcagaaccctgtaaagagattgctgcaaataaagaagatgcatacaaatatacagccaagggtaatctggttgcagtaatatcaaatggtacagctgtactgggcttgggcaacatcggcccggatgcttctaagcctgtaatggaaggtaaaggcgtattgtttaagaaatttgccggtatagatgtttttgatctggaagtaaattgcgaagatccggaacagttcattaaaattgttgaatcgctggagcccacgtttggcggagtaaatctggaagacataaaagctcctgagtgttttattattgaacaggaactgcggaagcgcatgaacattccggtaatgcacgatgatcagcatggcacagctattatttcttcagccgctttattaaatgcacttgaagtagtaggtaaaaaggcagaagacgttaacgttgttgtaagcggtgcaggggctgcagctatttcctgcacgcgtttgtataaacatcttggtgtgcgttcagagaatattgtaatgtgcgacattaatggtgtgttgcggaaagatcgcacagatctggatgtgtcacagcttgaatttgctaccggccgtgatttgtatacgcttgcagatgccatgcccggagcggatgtatttattggactgtctgccggcaacatattaaagccggaagtgttagcaaccatggcaaaggatccgattgtttttgcattggctaatcctacccctgaaatagattatcatttagcactgaatacaaggcctgacgtgatcatggcgacaggcagatcggattatccgaaccaggtaaataacgtacttgggttcccgtatattttcagaggagcgctggatgtacgtgcaacggaaataaacgaagcaatgaaactggcagccgtatatgctatcgcaaaacttgcaaaggaagttgttccggatacggtaaacaaatcttatggagacaataagattacgtttgggaaaaattatttaattccaaagccattagatccgaggttaataaccacaatatctccggctgtagccagagctgccatggaaagcggagttgcaaaaaaggatattgaagactggggggcatatgaagttgaattattacaacggataggtattgaccagcgcctgatgtcacgcattatcacacaagcaaaacaggaacctaaacgggttgtgtttgcagaagcggataatctgaaaatcttaaaagcagcgcaaattatttccgatgaaggtatcgcatttcctattttattaggcaatgcagaaaagataaaagaattgctgattgaaaatgcacttgtaattaaagactttttaatcgttgatccttttgaagaaaaagaaaaacgttccctttacggaaacctgctacacaataaaagaaagcgtaaaggtataacggctgaaattggcagaaaattaatgcgtaaccgtaattactacggcgcgatgatggttgagaccggtgaagcagatgcgtttatttcaggattgacgcaggagtatggcgaaaccataaaaccggcactccaggtaatcggtgtagaagaaggcattaagcgggttgccggaatgtatattctgagcaacagaaaaggggtttattttttctccgataccacggttaacatggacccaaccgccgaagagcttgtagatattattggtgtaacagccagaggtgtaaaattctttaattttgagccaagaattgccatgctgtcgtattccaattttggatccaatgaaggggctgtaccaaccaaagttgcattggcaacacggctggcaaaagaaaaatatccggacctgatcatagacggtgacatccaggcaaacgtcgcagttgatacagcgttgcaggaagaaatgtatccgtttagtgcattggcaaaagacggtgcaaacacatttatatttcctgcattaacatccggaaatattgcgtataaattattgcaggaaattggcggaatggaagccattggtccgttattgatgggcatggccaagcctgtacatatattgcaattaggttcatcggtcagagagattgtaaacatggtagctattgctgttgtagatgcgcaatcacaaaacagtaaaattaatttatga

SEQ ID NO: 5800 - protein, 757 aa, Cytophaga hutchinsonii ATCC 33406
MSISKEDALNYHTQGKPGKIEVVPTKALSTQLDLALAYSPGVAEPCKEIAANKEDAYKYTAKGNLVAVISNGTAVLGLGNIGPDASKPVMEGKGVLFKKFAGIDVFDLEVNCEDPEQFIKIVESLEPTFGGVNLEDIKAPECFIIEQELRKRMNIPVMHDDQHGTAIISSAALLNALEVVGKKAEDVNVVVSGAGAAAISCTRLYKHLGVRSENIVMCDINGVLRKDRTDLDVSQLEFATGRDLYTLADAMPGADVFIGLSAGNILKPEVLATMAKDPIVFALANPTPEIDYHLALNTRPDVIMATGRSDYPNQVNNVLGFPYIFRGALDVRATEINEAMKLAAVYAIAKLAKEVVPDTVNKSYGDNKITFGKNYLIPKPLDPRLITTISPAVARAAMESGVAKKDIEDWGAYEVELLQRIGIDQRLMSRIITQAKQEPKRVVFAEADNLKILKAAQIISDEGIAFPILLGNAEKIKELLIENALVIKDFLIVDPFEEKEKRSLYGNLLHNKRKRKGITAEIGRKLMRNRNYYGAMMVETGEADAFISGLTQEYGETIKPALQVIGVEEGIKRVAGMYILSNRKGVYFFSDTTVNMDPTAEELVDIIGVTARGVKFFNFEPRIAMLSYSNFGSNEGAVPTKVALATRLAKEKYPDLIIDGDIQANVAVDTALQEEMYPFSALAKDGANTFIFPALTSGNIAYKLLQEIGGMEAIGPLLMGMAKPVHILQLGSSVREIVNMVAIAVVDAQSQNSKINL

SEQ ID NO: 5801 - DNA, 2268 bp, Haemophilus somnus 129PT
  CDS (1)..(2268): transl_table=11
atggatgcacaattacgtcaagctgctttagattttcatgaattcccaaaaccaggaaaaattgaagttacaccaacaaagtcattgggaacacaacgagatttagccttagcctattctccaggtgtggctgtaccttgtttagaaatccaagcagatcctgcctctgcttatagatatacttccagaggcaatttagtcgcagtaatatcaaatggaacagcagtattgggactaggcaatattggtgcgttagccggtaagcctgttatggaaggtaaaggggttttatttaagaagtttgccggtgttgatgtatttgatattgagatagatgaacaaaatcccgataagttagtagaagttatcgctgctttagaaccgactttcggcggtataaatcttgaagatattaaagcacctgaatgcttttatattgaacaaaaattacgtgagcgtctgaaaattcctgtttttcatgatgatcagcatggaacagccattatttcagccgctgcaataattaacggattgcgtattgttaataaaaaaattgaagatgttcgtttagttgcttccggtgcaggtgcagcatcgattgcgtgcttaaatttattggtttcattaggcatgaaacgtgaaaatatcacggtttgtgactctaaaggggtcatttataaaggtcgtgatgaaaaaatggatgataccaaaaagttatatgccattgatgataacggtcaacgctctttagctgatgccattccagattcagatattttcttaggttgttctgccgctggagcacttactcaagaaatggtaaaaacaatggggcctaatcctttaattttagccttagcaaatcctgagcctgaaattttaccgccgttagcaaaagctgttcgacctgatgcgattgtttgtaccggtcgttccgactatccgaatcaagtgaataatgtgttatgcttcccgttcattttccgtggtgcattagatgtcagtgcaacgactatcaatgaagaaatgaaacttgcggcagtttatgcaattgctgatttagccttagcagaacaaagcgaggttgtcagttccgcctatggtgagagcggcgtttctttcggaccggattatattattccaaaaccgtttgatcctcgattaattgtaaaaatagcacccgccgtagctaaagcggcaatggatagcggtgttgctactcgtccaattgaagattttgaagcgtacattgagaaattaactcagtttgtttataaaaccaacttattcatgaaacctgtttttgcacaagccaaagaagataaaaaacgtgttattttaactgatggcgaagaaaaacgtgtgttacatgcaatccaagaaattgcaaccttaggcatagcctatcctgtcctattaggtcgtactcatattattgaggaaagtattaaaaaattgggtttgcaattacagctcggacgtgattttgagattattgacattgaaaataatccatactacgaggaatgttgtgatacctattacaacaaattaaaacgccaaggtatgacacctaccggagcgaaacgcaaaatgcttcataatccgaccgcacttggtgcagttttattggagcttggtaaagtcgatgcgatgatttgcggattagttggaccatttgcggcacacttggctactgttaaagaggttgttggtgaaaaagaacatgaaattccagctacggtaaacggactggttttgcctaccggtaatttatttattgcagatacttttgtgaactcaagcccaacagccgaggaacttgcagaaatcacgattatgtcagccaaagaagttcgtcgttttggtatagagccacaggttgctcttgtttcacattcaaattatggctcaattaatgacccaagtgcggttaaaatgcggcaggttttagagcttgtgcgtgaaaaagcaccggatttgattattgatggtgaaatgcactgtgatattgctttatcggagaatttacgtaaggaagtgatgcctgacagtcctattaaaggggcggcaaacttattgattatgcccaacatggaaactgcccgtattagcttgaatttattacaaggtacagcaacaccaattacaattggaccaattttaatgggtgtggaaaaaccggcacatattcttacttctgcttcatcagtacgccgtattattaatatggtagccgttgcagcggtaaaagcacagaatcgttga

SEQ ID NO: 5802 - protein, 755 aa, Haemophilus somnus 129PT
MDAQLRQAALDFHEFPKPGKIEVTPTKSLGTQRDLALAYSPGVAVPCLEIQADPASAYRYTSRGNLVAVISNGTAVLGLGNIGALAGKPVMEGKGVLFKKFAGVDVFDIEIDEQNPDKLVEVIAALEPTFGGINLEDIKAPECFYIEQKLRERLKIPVFHDDQHGTAIISAAAIINGLRIVNKKIEDVRLVASGAGAASIACLNLLVSLGMKRENITVCDSKGVIYKGRDEKMDDTKKLYAIDDNGQRSLADAIPDSDIFLGCSAAGALTQEMVKTMGPNPLILALANPEPEILPPLAKAVRPDAIVCTGRSDYPNQVNNVLCFPFIFRGALDVSATTINEEMKLAAVYAIADLALAEQSEVVSSAYGESGVSFGPDYIIPKPFDPRLIVKIAPAVAKAAMDSGVATRPIEDFEAYIEKLTQFVYKTNLFMKPVFAQAKEDKKRVILTDGEEKRVLHAIQEIATLGIAYPVLLGRTHIIEESIKKLGLQLQLGRDFEIIDIENNPYYEECCDTYYNKLKRQGMTPTGAKRKMLHNPTALGAVLLELGKVDAMICGLVGPFAAHLATVKEVVGEKEHEIPATVNGLVLPTGNLFIADTFVNSSPTAEELAEITIMSAKEVRRFGIEPQVALVSHSNYGSINDPSAVKMRQVLELVREKAPDLIIDGEMHCDIALSENLRKEVMPDSPIKGAANLLIMPNMETARISLNLLQGTATPITIGPILMGVEKPAHILTSASSVRRIINMVAVAAVKAQNR

SEQ ID NO: 5803 - DNA, 1389 bp, Trichodesmium erythraeum IMS101
  CDS (1)..(1389): transl_table=11
atggtaaaactaacaccaaatccctcatttagtttaacaattagcctcgaaactcctaaccgtactggaatgttggccaaggttacccaagccatcgcatcagaaggaggcaatataggtaacgttgacctaataaaacaaagtcgccaaatcataattagagaaattacagtcgatgcctacagtacagagcatattgaaaaaattgttcaagctgtcaaaaccctgccagaaataaaactcgtcaatgtgtatgaccgaaccttcgatatacataaaggtggtaaaatcacagttcaaggcaaaatacctctcaaatcccaagccgatctatcaatggcttatactccaggagtaggaagaatttctaaagcaattgcagaagaccctcaacaaatctataatttcaccatcaaaaaaaatacagttgctattgtgacagatggcagtgcagttttaggactaggaaatcttggccccggaggagctttaccagtaatggaaggtaaggctatgttatttaaagaatttgctggaatcgacgctttccctatttgtctggctactcaagatactgatgctattgtcgagacagttaaaaatattgctcctgtttttggtggagttaacttagaagatattgctgctcctcgttgttttgaaatagaagtcaagctaagagagatattagatattccagtatttcacgatgaccagcatggcacagcaatagttagtttagctgcgttaatcaatgctttaaaattggtcaaaaaatctatagaagatattcggatcgttattaatggtgctggtgctgctggaatagctatcactcgtctattacaaaaagcaggagctaatcaaatttgcttatgtgactctaaaggtatagtctccaaaagtcgtactggtcttaactcagaaaaacaagcatttgccgttgagtcttcaggaaccctcgcagatgctttaatgggagctgatgtatttttaggtgttagtgtcccgggagttcttactccagaaatggtccgttctatggccaaagaccctatagtctttgcaatggctaatcctattccggaaatacagccagaattagttgcagaagaagtagcagtgatggccacaggtcggagtgattatccgaatcaaattaataatgttttggcatttccaggcatatttaggggcgctctagattgtcgggctactactctcacctctacaatgtatttagaagctgctagagcgatcgcttcattagtcaaaacttcagaccttgaccaagaacatattattccttcagtatttgacactagggtagctactgcggttgcaggtgcagtagcttcagcagctcgtactgaaggtgtaactgtttaa

SEQ ID NO: 5804 - protein, 462 aa, Trichodesmium erythraeum IMS101
MVKLTPNPSFSLTISLETPNRTGMLAKVTQAIASEGGNIGNVDLIKQSRQIIIREITVDAYSTEHIEKIVQAVKTLPEIKLVNVYDRTFDIHKGGKITVQGKIPLKSQADLSMAYTPGVGRISKAIAEDPQQIYNFTIKKNTVAIVTDGSAVLGLGNLGPGGALPVMEGKAMLFKEFAGIDAFPICLATQDTDAIVETVKNIAPVFGGVNLEDIAAPRCFEIEVKLREILDIPVFHDDQHGTAIVSLAALINALKLVKKSIEDIRIVINGAGAAGIAITRLLQKAGANQICLCDSKGIVSKSRTGLNSEKQAFAVESSGTLADALMGADVFLGVSVPGVLTPEMVRSMAKDPIVFAMANPIPEIQPELVAEEVAVMATGRSDYPNQINNVLAFPGIFRGALDCRATTLTSTMYLEAARAIASLVKTSDLDQEHIIPSVFDTRVATAVAGAVASAARTEGVTV

SEQ ID NO: 5805 - DNA, 1245 bp, Shewanella sp. MR-4
  CDS (1)..(1245): transl_table=11
atgtcagatattcgtcaacaagcactcgattatcatgaattccccgttcccggtaaaaccgcagtctgcctcactaaacctgctgaaacgagccatgacctcgcgctagcctatagtccaggtgtagctgaaccggtacgtgaaattgctgctaatcctgacaatgcatatcgttataccaacaaaggtaatactgtggctgttatcactaacggcactgcgattctgggtttaggtaacttaggcccgttggcgtctaagccagtaatggaaggtaaggctctgttgtttaaacattttgcgaatatcgactcgaccgatatcgaagtgactcacaacaccgctgaagagtttattaacacagttgcggctattgctggcacctttggtggtattaacctcgaagacatcaaggcgcctgagtgctttgttatcgaacgcgaattaattgaacgttgcaatgttcccgtgttccacgatgaccagcatggtaccgccatcgtgaccgctgcaggcatgatcaacgccttagaaatccaaggcaaactgatcagcgatgcgacctttgtgtgtatgggtgctggcgcagctgcgatcgcctgtatgaccatgttagtaaagtgtggtgcaaaccgcgccaacatctatatgttagataccaaaggcgttatccacacgggtcgtaccgatctgaatgaatacaaagccttatttgcaaacgataccgacaaacgtacgttacaagatgtgattaaaggtgccgacgtattcttaggtttatctggcccgaacgtgattggcgccgaagaagtggccatgatggcggataagccggtgatttttgcctgctcaaacccagatcctgagatcaaaccagagctggctcatgcaacgcgtagcgatttaattatgggtactggccgcagcgattatccaaaccaagtgaacaacgtattgtgtttccctttcattttccgtggtgccttggatgttcgtgcatcgtgcattaacgacgagatgaaagtcgcagctgttcacgcgattgcaggcctagcgaaagaagaagttccagcgagcgtgcttaaggcctatccaaaggtgaattcattaagctttggtcctgaatatgtgctgccaaagcctatggacccacgtttattaccccgtgttgcccgtgcggtagcacaggcggcgattgattccggcgttgcagctatcactacgctgccacaatatgcggattaa

SEQ ID NO: 5806 - protein, 414 aa, Shewanella sp. MR-4
MSDIRQQALDYHEFPVPGKTAVCLTKPAETSHDLALAYSPGVAEPVREIAANPDNAYRYTNKGNTVAVITNGTAILGLGNLGPLASKPVMEGKALLFKHFANIDSTDIEVTHNTAEEFINTVAAIAGTFGGINLEDIKAPECFVIERELIERCNVPVFHDDQHGTAIVTAAGMINALEIQGKLISDATFVCMGAGAAAIACMTMLVKCGANRANIYMLDTKGVIHTGRTDLNEYKALFANDTDKRTLQDVIKGADVFLGLSGPNVIGAEEVAMMADKPVIFACSNPDPEIKPELAHATRSDLIMGTGRSDYPNQVNNVLCFPFIFRGALDVRASCINDEMKVAAVHAIAGLAKEEVPASVLKAYPKVNSLSFGPEYVLPKPMDPRLLPRVARAVAQAAIDSGVAAITTLPQYAD

SEQ ID NO: 5807 - DNA, 1245 bp, Shewanella sp. MR-7
  CDS (1)..(1245): transl_table=11
atgtcagatattcgtcaacaagcactcgattatcatgaattccccgttcccggtaaaaccgcagtctgcctcactaaacctgctgaaacgagccatgacctcgcgctagcctacagcccaggtgttgctgaaccggtacgtgaaattgctgctaatcctgacaatgcctatcgttacaccaacaaaggtaacactgtcgctgttatcactaacggcacggcgattctggggttaggtaatttaggcccattagcgtcaaaaccggtgatggaaggtaaggctctgttgtttaaacactttgcgaatatcgactcgaccgatatcgaagtgacccacaacaccactgaagagtttattaacactgtagcggctattgctggcacctttggtggtattaacctcgaagacatcaaggcgccagagtgctttgttatcgagcgcgaattaattgagcgttgtaatgtgcctgtgttccacgatgaccagcacggcactgcgattgtgacggctgcgggtatgatcaacgccttagaaatccaaggtaaattgatcagcgatgcgacctttgtgtgtatgggtgctggcgctgctgcgatcgcctgtatgaccatgctggtaaaatgtggtgcaaaccgcgccaacatctacatgttagataccaaaggcgttatccatacgggtcgtaccgatctgaatgaatacaaagctctgtttgcaaacgataccgacaagcgcactttgcaagatgtgattaaaggtgccgacgtattcttaggtttatctggcccgaacgtgattggcgctgaagaagtggccatgatggcggataaaccagtgatttttgcctgctcaaacccagatcctgaaatcaaaccagagcttgcccacgcgacgcgcagcgatttaatcatgggtactggtcgcagtgattatccaaaccaagtgaacaacgtactatgtttcccattcattttccgtggtgccttggatgtgcgtgcatcgtgcattaacgatgaaatgaaagtggctgcagtacatgcgattgctggcttagccaaagaagaagttccagcgagcgtgcttaaggcttatccaaaggtgagttcattaagttttggtcctgaatatgtgctaccaaaacctatggacccacgtttattacctcgcgttgcccgcgctgtcgcgcaggctgcgattgattcgggtgttgcggcaatcaccacgctgccacactacgccgattaa

SEQ ID NO: 5808 - protein, 414 aa, Shewanella sp. MR-7
MSDIRQQALDYHEFPVPGKTAVCLTKPAETSHDLALAYSPGVAEPVREIAANPDNAYRYTNKGNTVAVITNGTAILGLGNLGPLASKPVMEGKALLFKHFANIDSTDIEVTHNTTEEFINTVAAIAGTFGGINLEDIKAPECFVIERELIERCNVPVFHDDQHGTAIVTAAGMINALEIQGKLISDATFVCMGAGAAAIACMTMLVKCGANRANIYMLDTKGVIHTGRTDLNEYKALFANDTDKRTLQDVIKGADVFLGLSGPNVIGAEEVAMMADKPVIFACSNPDPEIKPELAHATRSDLIMGTGRSDYPNQVNNVLCFPFIFRGALDVRASCINDEMKVAAVHAIAGLAKEEVPASVLKAYPKVSSLSFGPEYVLPKPMDPRLLPRVARAVAQAAIDSGVAAITTLPHYAD

SEQ ID NO: 5809 - DNA, 2331 bp, Alkalilimnicola ehrlichei MLHE-1
  CDS (1)..(2331): transl_table=11
atgtccgacaacttccgcgacaacgccctcgaataccacgaattcccccgccccggtaagctgcaggtcgtgcccaccaagccgctggccaaccagcgtgacctggcgctggcctactcgccgggcgtggcggcggcctgcgaggagatcgtcaacgatccgcaggcggcttcaaagtacaccgcgcggggcaatatggtggcggtgatcaccaacggcaccgccgtgctcggcctgggcaatatcggcccgctggcctccaagccggtgatggagggcaagggcgtcctgttcaagaagttcgccggcattgatgtcttcgacatcgagatcaatgagcaggacccggacaagctcaccgagatcatcgccagcctggagcccaccttcggcggcatcaacctggaggacatcaaggccccggagtgcttccaggtggagtccgcgctgcgcaagcggatgaacatcccggtcttccacgacgaccagcacggcaccgccattatcaccgccgcggcggtgctcaacggcctgcgggtggtggacaagaagatcgaggacgtgaagctttgttgctccggtgccggcgcggcggccatcgcctgcctggacatcctggtgtccatgggcatgaacaaggagaacatcttcgtcgccgactccaaaggcatcgtctacaagggccgcaaggagtacatggacgagcgcaaggagggctacgcccgcgagacctccgcccgcaccatgaaggaggtcatcgagggtgccgacatcttcctcgggctgtccgcacccggggtgctcagccaggcgatggtcaagcagatggccgacagtcccatcatcatggcgctggccaacccggtgccggagatcctgccggagctggccaaggaggcgcgcccggacgccatcatcgccaccggtcggtcggactaccccaaccaggtcaacaacgtgctctgcttccccttcatcttccggggggcgctggacgtgggtgccaccaccatcaacgaggagatgaagctggccgccgtctatgccattgccgatctggccatggccgaatcctccgacgtggtcaccgccgcctatggcggcaagtcattgcggttcggcccggagtacctcatcccccggccctttgacccgcgcttgatcctgaagatcgccccggcggtggccagggcggccacggagagcggcgtggccacccggcccatcgaggacttcgacgcctaccacatggagctgtcgcagttcgtcttccaatcgggcctggtgatgaagcccatcttcgagcgggcgcgcaccaaccccaagcgggtggtctacaccgatggcgaggaggaacgggtactgcgtgccgtacaggtggtggtggacgacggcctggccaagcccatcctggtcggccggcgcaaagtggtggagatgcgcatcaagcgcctgggcctgcgcctggagatcggcaagaacgtggatctggccgacccggaggacgatccccgctaccgcgagtactggcagctctaccactccatcatggagcggcgcggtgtcaccccggcccgggcccgcaccatcgtgcgcacccggaccacggtgatcggcgcactgatggtccggcgcggcgaggcggacgcgctcgtcggcggcagtgtgggccgttaccatcggcaaatagggcacatcgaaaatgtgatcgggcgccgggcgggggtgcgcaacatggcggcgatgaacgtgctcatcctgcccaagggcacgttctttatcgtggacacctacgtcaaccacgaccccaacgcccatcagatcgccgagatgaccaccctggccgccgacgaggtccgacgcttcggcattacccccaaggtggccctgctatcgcactccagctttggcacctccaacgccgagagcgcccggaagatgcgggacgccctgcagctgatccgcgacgccgaccccggcctggacgtggagggcgagatgcacggcgatgccgcggtctcggaggagatccgcaagcgcatcttccccaacaatgagctcaaggggcaggccaacctgctggtcatgcccaccctggacgcggccaatatcgccttcaacctgctgaaggtgaccaccgacggcgtctcggtggggcccatcctgctcggctcggcgcgaccggcgcacatcctgacgccctcctccaccgtgcgggcgatcgtcaacatgagcgccctggcggccgtggaggcgacgatggccgaaccggaggccacccacgacgaggagcgggactactccggctacgaggacgaggaagacgtgtag

SEQ ID NO: 5810 - protein, 776 aa, Alkalilimnicola ehrlichei MLHE-1
MSDNFRDNALEYHEFPRPGKLQVVPTKPLANQRDLALAYSPGVAAACEEIVNDPQAASKYTARGNMVAVITNGTAVLGLGNIGPLASKPVMEGKGVLFKKFAGIDVFDIEINEQDPDKLTEIIASLEPTFGGINLEDIKAPECFQVESALRKRMNIPVFHDDQHGTAIITAAAVLNGLRVVDKKIEDVKLCCSGAGAAAIACLDILVSMGMNKENIFVADSKGIVYKGRKEYMDERKEGYARETSARTMKEVIEGADIFLGLSAPGVLSQAMVKQMADSPIIMALANPVPEILPELAKEARPDAIIATGRSDYPNQVNNVLCFPFIFRGALDVGATTINEEMKLAAVYAIADLAMAESSDVVTAAYGGKSLRFGPEYLIPRPFDPRLILKIAPAVARAATESGVATRPIEDFDAYHMELSQFVFQSGLVMKPIFERARTNPKRVVYTDGEEERVLRAVQVVVDDGLAKPILVGRRKVVEMRIKRLGLRLEIGKNVDLADPEDDPRYREYWQLYHSIMERRGVTPARARTIVRTRTTVIGALMVRRGEADALVGGSVGRYHRQIGHIENVIGRRAGVRNMAAMNVLILPKGTFFIVDTYVNHDPNAHQIAEMTTLAADEVRRFGITPKVALLSHSSFGTSNAESARKMRDALQLIRDADPGLDVEGEMHGDAAVSEEIRKRIFPNNELKGQANLLVMPTLDAANIAFNLLKVTTDGVSVGPILLGSARPAHILTPSSTVRAIVNMSALAAVEATMAEPEATHDEERDYSGYEDEEDV

SEQ ID NO: 5811 - DNA, 2268 bp, Hyphomonas neptunium ATCC 15444
  CDS (1)..(2268): transl_table=11
atgaccacgcagcgtccgagcttcaccgatcaggaagcccttgatttccactcccacccgaccgccgggaaaatctccatggtgcccacaaagcccatgggcacgcagcgcgacctgtcgctggcctacagccccggtgttgctatcccggtgctggcgatcgcggaaaacccggacaaggcgtatgactatacctccaagggcaaccttgtggcggtcatctccaacggcaccgccatcctggggctcggcaatctggggccgatggcctccaagccggtgatggaaggaaagtcggttcttttcaaacgcttcgcggacatcgacagcttcgatgtggaagttgacacgaccgatgtcgaagacttcatccgcaccgtgcgcaatatcggcgcgacctggggcggcatcaatctggaggacatctcctcccctgcctgcttcatcatcgagagccgcctgcgcgacgaactcgacattccggtcttccatgacgaccagcatggcaccgcgatcatcgccgctgccggcctgatcaatgcctgccacatcaccgggcgccaattgaaagacaccaaggtcgccatttcgggcgccggggctgccggtctctcggtggctggcctcatccgccatctgggcgtgaaggcagagaatatcctgatctgcgacaccgccggcgtggtctatgaaggccgcaccgagaagatggaccagttcaagtccgccttcgctgtcaagacggccaagcgcacgctgacagaagcgatggacggggccgacgtgttcctcggactttcggtcaagggcgcggtgaccaaagagatggtcaagtcgatggccaagaacccgatcatctttgcgatggcaaacccggacccggaaatcacccccgaagagatcaaatcggtccgcagcgatgcgatcatcgccacgggccggtctgactatccaaaccaggtgaacaatgttctgggctttccttacatcttccgcggcgcgctcgacgtgcgcgcccgcggtatcaatgaggaaatgaaggttgcctgcgcccgcgcgctggccgaacttgcccgcgaagatgtgcccgatgaagtggccgccgcctatcacggcgcccggccgagctttggccgggaatatatcattccaagtccgtttgacccgcgcctgatcagcttcgttccaccctttgtcgcgcaggcggccatggataccggcgtggcccgcaagccgattgcggatatggacaactaccgccgctcgctgatccgccgggcggacccgtcggccgccttccttcaaggcttgcaggcacgggcccgcgagacccagcgccgcatcgtgtttgctgaaggtgaagaacccgccgtcgtgcgcgccgcctacagcttcaagaaccaaggccttggccatccgatcctgattggccgcgaggcccaggtggagcgcgcgatggagcagatgggcattccgctcggctcgctcgatatcatcaatgcgcgcctttccgacaagaacccggtctatgtcgacttcctgtatgagcgcctgcagcgccgcggctatctcaagcgcgacgttcagcgcctggtgaatcaggacaggaacatcttcggcagctgtatgcttaagaatggcgacgcggacggcatggtcacgggcgtcacacgcaattacgacgccgccctgaaagacgcgatgctggtgctcgacccgattgcgggccaggccctgatcggcatgtcgatggtgatcaatctcggcaagacgatcttcattgccgataccagcgtacatgaactgcccgacgggccgaccctggcaaacatcgccctggaagcggcccgcgcggtgcgcgcccttggcttcaccccgcgcgtggctttcctgtcctactccaccttcggcaatccgatgggcgagcggggcgaccgggtgcgcgaagctgtggcgatccttgatcagcgcacggacattgatttcgagtatgaaggcgacatcaatgctgatgtggcgatgaacccgaaccaccggatggtgtatccgttctcgcgcctcagcggcccggcgaacgtgttggtcatgccggcgatccattcggcctcgattgcgaccaatctgttggaagcgatgagccgggcaaccgtcatcggaccgatgctgtttggcctggaaaagccggtgcagatttcttcactcggcgccactgtgggcgacatcgtggaccttgccacgattgcagcctacgacaccgacaacgtctaa

SEQ ID NO: 5812 - protein, 755 aa, Hyphomonas neptunium ATCC 15444
MTTQRPSFTDQEALDFHSHPTAGKISMVPTKPMGTQRDLSLAYSPGVAIPVLAIAENPDKAYDYTSKGNLVAVISNGTAILGLGNLGPMASKPVMEGKSVLFKRFADIDSFDVEVDTTDVEDFIRTVRNIGATWGGINLEDISSPACFIIESRLRDELDIPVFHDDQHGTAIIAAAGLINACHITGRQLKDTKVAISGAGAAGLSVAGLIRHLGVKAENILICDTAGVVYEGRTEKMDQFKSAFAVKTAKRTLTEAMDGADVFLGLSVKGAVTKEMVKSMAKNPIIFAMANPDPEITPEEIKSVRSDAIIATGRSDYPNQVNNVLGFPYIFRGALDVRARGINEEMKVACARALAELAREDVPDEVAAAYHGARPSFGREYIIPSPFDPRLISFVPPFVAQAAMDTGVARKPIADMDNYRRSLIRRADPSAAFLQGLQARARETQRRIVFAEGEEPAVVRAAYSFKNQGLGHPILIGREAQVERAMEQMGIPLGSLDIINARLSDKNPVYVDFLYERLQRRGYLKRDVQRLVNQDRNIFGSCMLKNGDADGMVTGVTRNYDAALKDAMLVLDPIAGQALIGMSMVINLGKTIFIADTSVHELPDGPTLANIALEAARAVRALGFTPRVAFLSYSTFGNPMGERGDRVREAVAILDQRTDIDFEYEGDINADVAMNPNHRMVYPFSRLSGPANVLVMPAIHSASIATNLLEAMSRATVIGPMLFGLEKPVQISSLGATVGDIVDLATIAAYDTDNV

SEQ ID NO: 5813 - DNA, 2286 bp, Rhizobium leguminosarum bv. viciae 3841
  CDS (1)..(2286): transl_table=11
atgcccgatatcgataagaaggaccggccggtgacctcggttaccgaccaggaggcgctcgattttcacgcaatgggtcggcccggcaagctggagatcaacccgaccaagccgatggcgacgcagcgcgacctttcgcttgcctattcgccgggcgttgccgtgcctgtcaaggcgatcgccgccgatccgcagacggcctatgactacacggcccgcggcaacatggttgcggtcatttccaacggcacggcgatcctcggcctcggcaatctcggcgcgctggcttcgaagcccgtcatggaaggcaaggcggtgctgttcaagcgctttgctgacgtcgattccatcgatctcgagatcgatacggaaaatgtcgacgagttcatcaactgcgtgcgtttcctcggtccctccttcggtggcatcaacctcgaggatatcaaggcgccggattgtttcgtcatcgaaagccggctgcgcgagctgatggacattcccgtcttccatgacgaccagcatggaacggcgatcattgccgctgccggcctgatcaatgcgctggagctgaccggccgcgacctgaagacgacgaagctcgtctgcaacggtgcgggtgctgcggcgatcgcctgcgtcgaactcatcaaggcgatgggttttgcgccagagaacgtcatcctctgcgataccaagggcgtcatctaccagggccgcaccgagggcatgaaccagtggaaatcggcgcatgcggcaaagaccgacacgcgcacgctggaagaggcgatgaaaggtgcggacgtcgttttcggcctgtcgcagaagggcgcgttttcggccaagatgatccgctcgatggcggagcggccgatcatcttcgccatggccaatcccgatcccgagatcaccccggaagaggtggcccgcatccgcgacgacgccatcatggcgaccggccgttcggactatccgaaccaggtcaacaacgtcctcggctttccctatatcttccgaggcgctctagatgtgcgcgcctccacaatcaacgacgcgatgaagattgccgccgtcaacgcgctggcaaacctggcccgcgaggacgtgcccgatgacgtcgttgccgcctatcagggcaaccggccgcgtttcggctcgcaatacattatccccgttcccttcgatccgcgcctgatctcggcgatcccggtggcggtcgcgcaagccgcgatcgaaagcggcgtcgcccgcaaggtcatcaccgacatggccggttatgcccgcgagctttcggcgcgccgcgatccgatcgcctcgacgctcgccagcctttacgagcgcgtccgccgccgtccgaagcgcatcgtctttgccgaggccgaggaagaacaggtcctgcgtgcggcgatgtcctacgccaaccagcagctcggcaccgccatcctgctcggccgcgaggacctgatccgggcgacggccgaacgcgccggcatcgatctcaaccggccgggcctcgaaatcgtcaatgcccggctttcgacccgggtcgaggcctatatcgactatctctacgcccggctgcagcggcacggttatctccaccgcgacgcccagcggctgatccataacgaccgcaaccacttcgccgccaccatggtggcgctcggcgatgccgacggcatggtgacgggcatcacccgaaactattcgacggcgctcgaagatgtgcgccgctgcatcgacgagaagccgggccaccgcgtcatcggtgtgtcgctggcgctctgccgcggccgcacggttttcgttgccgatacggcggtgcacgacatgccgacggccgaagagcttgccgatatcgccgaagaggccgccggtctggcgcggcgcatgggttatccgccgcgtgtcgccatgctggcctattccaccttcggccatccctcgggcgaacgctccgagcgggtgcgcgaggcggtgaaaatcctcgacaagcgccgcgtcgatttcgaatatgacggcgagatggccgccgacgtcgctctgaaccgcaaagtgatggagcaatatcccttctgccgcctctccgggccggccaacgttctcgtcatgccggctttccactcggcctcgatctcgaccaagatgctgcaggagctcggcggctccacggtgatcggcccgattctcgtcggcctcgacaagccggtgcagatcacctcgatgggcgccaaggacagcgacatcgtcaacatggcggcgatcgccgcctacggggcgggttcgtaa

SEQ ID NO: 5814 - protein, 761 aa, Rhizobium leguminosarum bv. viciae 3841
MPDIDKKDRPVTSVTDQEALDFHAMGRPGKLEINPTKPMATQRDLSLAYSPGVAVPVKAIAADPQTAYDYTARGNMVAVISNGTAILGLGNLGALASKPVMEGKAVLFKRFADVDSIDLEIDTENVDEFINCVRFLGPSFGGINLEDIKAPDCFVIESRLRELMDIPVFHDDQHGTAIIAAAGLINALELTGRDLKTTKLVCNGAGAAAIACVELIKAMGFAPENVILCDTKGVIYQGRTEGMNQWKSAHAAKTDTRTLEEAMKGADVVFGLSQKGAFSAKMIRSMAERPIIFAMANPDPEITPEEVARIRDDAIMATGRSDYPNQVNNVLGFPYIFRGALDVRASTINDAMKIAAVNALANLAREDVPDDVVAAYQGNRPRFGSQYIIPVPFDPRLISAIPVAVAQAAIESGVARKVITDMAGYARELSARRDPIASTLASLYERVRRRPKRIVFAEAEEEQVLRAAMSYANQQLGTAILLGREDLIRATAERAGIDLNRPGLEIVNARLSTRVEAYIDYLYARLQRHGYLHRDAQRLIHNDRNHFAATMVALGDADGMVTGITRNYSTALEDVRRCIDEKPGHRVIGVSLALCRGRTVFVADTAVHDMPTAEELADIAEEAAGLARRMGYPPRVAMLAYSTFGHPSGERSERVREAVKILDKRRVDFEYDGEMAADVALNRKVMEQYPFCRLSGPANVLVMPAFHSASISTKMLQELGGSTVIGPILVGLDKPVQITSMGAKDSDIVNMAAIAAYGAGS

SEQ ID NO: 5815 - DNA, 1269 bp, Pseudomonas aeruginosa UCBPP-PA14
  CDS (1)..(1269): transl_table=11
atgtccgatcttaaaaccgctgccctcgaatatcacgcacaaccccgtccgggaaaactgagtgtcgagctgaccaaacccaccgctaccgcccgggacctgtccctggcctacagcccgggtgtcgccgagccggtgcgtgaaatcgcccgcgatgccgagctggcctatcagtacaccggcaagggcaacctggtggcagtgatttccgacggcaccgcgattctcggcctgggtaacctcggcccgctggcctccaagccggtgatggaaggcaagggtgtgctgttcaagcgcttcgccggcatcgacgtgttcgacatcgaggtcgacgccgagagcccgcaggctttcatcgataccgtcaagcgtatttccatcaccttcggcggtatcaacctcgaggacatcaaggctcccgagtgtttcgagatcgagcgcgcgctgatcgaacagtgcgacatcccggtgttccacgatgaccagcacggcaccgccattgtgaccgcggcgggcatgctcaacgcgctggaactggccggcaagaagctggaagaagcgaagatcgtctgcctcggcgccggcgctgccgccatctcctgcatgaagctgctggtgagcatgggcgccaaggtcgagaacatctacatgatcgaccgcaagggcgtgatccacgccggtcgcgacgatctgaaccagtacaagtcggtgttcgccaccgagaccgacaagcgtaccctggccgacgccctggagggcgccgacgtgttcgtcggcctgtccggcgccaacctgctggagccggaagacctcaagcgcatggcgccgaacccgatcgtgttcgcctgctcgaacccggacccggagatcaagccggaactggcccatgccacccgcaacgacgtgatcatggctaccggacgttccgactatccgaaccaggtcaacaacgtgctcggtttccccttcatcttccgcggtgccctggacgtacgtgccacgcgcatcaacgaagagatgaagatcgccgccgccctggccctgcgcgacctggccaagcagccggtcccggaggacgtctgcgccgcctatggcgtggacaagctggaattcggccgcgagtacatcattccgaagccgatggacaagcgcctgatcaccgtggtttccgatgccgtggccaaggctgccatcgagaccggcgtggctaccctgccgtatccgaagaactatccgctgaaatcggtggacgaagtcttcaacggctga

SEQ ID NO: 5816 - protein, 422 aa, Pseudomonas aeruginosa UCBPP-PA14
MSDLKTAALEYHAQPRPGKLSVELTKPTATARDLSLAYSPGVAEPVREIARDAELAYQYTGKGNLVAVISDGTAILGLGNLGPLASKPVMEGKGVLFKRFAGIDVFDIEVDAESPQAFIDTVKRISITFGGINLEDIKAPECFEIERALIEQCDIPVFHDDQHGTAIVTAAGMLNALELAGKKLEEAKIVCLGAGAAAISCMKLLVSMGAKVENIYMIDRKGVIHAGRDDLNQYKSVFATETDKRTLADALEGADVFVGLSGANLLEPEDLKRMAPNPIVFACSNPDPEIKPELAHATRNDVIMATGRSDYPNQVNNVLGFPFIFRGALDVRATRINEEMKIAAALALRDLAKQPVPEDVCAAYGVDKLEFGREYIIPKPMDKRLITVVSDAVAKAAIETGVATLPYPKNYPLKSVDEVFNG

SEQ ID NO: 5817 - DNA, 2292 bp, Solibacter usitatus Ellin6076
  CDS (1)..(2292): transl_table=11
atgaagattcgtcccgaagacgctctggagtaccattcctcagctcccgccggaaaactggcggtaaatcctaccaaaccctgccgtacgcagcgcgatctcagtctcgcctatacgccgggcgtcgctgtaccctgcctggaaatcgagcgcgatcccagcctcgcctacaaatacaccgccaagggcaacctggtgggggtcgtctccaatggaaccgcggtcctcggactcggcaacatcggcccgctcgccggcaagccggtgatggagggcaaggccgttttgtttaaacgcttcgccgatatcgacgtcttcgatatcgagctggacaccgccaacgcggacgaggtcatccgcacctgccagattctggagcctaccttcggcggcatcaacctcgaggacatcaaagcgccggagtgtttctacatcgaagagaccctgcgcaacaccatgaagatccccgtcttccacgacgaccagcacggcactgcaatcatcagcggcgccggactgctgaatgccctggagatcggcggcaagaagatcgaagatatcaaagtcgtgttcaacggcgcgggcgcggcggccatcagctgcgcggcccactatgtgcgtttgggcgtgcgcctggaaaatatcgtgatgtgcgacaccaagggcgtgatctacgagggccgcaccgagcacatgaactcctacaaggcgcgctacgccagcaagactaaggcgcggactttggaagaagcgctggtcggcgccgatgtgtttttcgggctgagcagcgggggcgccgtcacccaggatatggtgcgcggcatggcgccgagcccggtgatcttcgcgatggccaatcccgacccggaaatcagctatgacgatgcgatcgcggcccgtcccgatgcgatcgtcgccaccggccgcagcgactatcccaaccaggtgaacaacgtcctgggcttcccgttcattttccgcggggcgctggacgtgcgggccaccaccatcaacgacgaaatgaaactggcggcgacgcgggcattggctgcgctggccaaggaagatgtcccggacagcgtgctgcgggcctactcgatcgaccgcatcgaattcgggcgtgagtacatcatcccaaaacccttcgatccccgcgtcctgatctgggaggcgtcggccgtggcgcaggcggccatggagaccggcgtcgcacagcagccggtggacctgaagcaataccgcgaggagctcgaaaagcgcttgggccgcgccaacgaggtcatgcgcgccatgatcaacaaagcgcgccgccagcccaagcggatcgtcttcacggagggcgaggagggcaagatcctgcgcgcctgccagattctgctggacgagcagatcgccgagccgatcctgctgggcagcgcggaaaagatcaacgcgaagatcgaggaattgcacctgcacctgaacggcgcccagatcgtggaaccggccaaattcgcacgacttcacgagtacaccgaggaattctacagcctgcgccagcgcaagggcatcacccggacggaggcggagcagacgctgctgaatccgaccacgttcggcagcatgatgctgcgtctgaacgatgccgacgcgctgatcggcgggttgaccacccattacccggacacgatccgtccggctctgcaggtgatcgacatccgtccggaactgcggcgcgtggccggggtctacgtgctgatcacggccaagggagacatttacttcctggccgacgccacggtaaacatcgaaccgaccgccgaagatctggcggagatcgcgatcatggccgcggaaaaggcgcggcgcttcagtgtggagccgcgcgtggcgatgctcagcttctcgaatttcgggagcacgcggcatccgctggccgataaggtacggcgcgccgtggacctggtgcgacagcgcgcgcccggcctgatgatcgatggcgagatgcaggccgacaccgcggtggtgccgcacatcatcgaggagacctatccgttcagcaccctcaagggcggggcgaatgtgctggtcttccccaacctggaatcggggaacatcgcgtacaagctgctgcagcgcatcggggactgcgaactgatcggaccgctgcttacgggcctgagccgtcccgttcacgtgctgcagcgcggcagcgaagtcaacgacatcgtgcacgtcgcggcggtggccgtggtggacgcgcaggaagtcggcaaaccgtaccgcaccctcagccaggagccggtagcgtag

SEQ ID NO: 5818 - protein, 763 aa, Solibacter usitatus Ellin6076
MKIRPEDALEYHSSAPAGKLAVNPTKPCRTQRDLSLAYTPGVAVPCLEIERDPSLAYKYTAKGNLVGVVSNGTAVLGLGNIGPLAGKPVMEGKAVLFKRFADIDVFDIELDTANADEVIRTCQILEPTFGGINLEDIKAPECFYIEETLRNTMKIPVFHDDQHGTAIISGAGLLNALEIGGKKIEDIKVVFNGAGAAAISCAAHYVRLGVRLENIVMCDTKGVIYEGRTEHMNSYKARYASKTKARTLEEALVGADVFFGLSSGGAVTQDMVRGMAPSPVIFAMANPDPEISYDDAIAARPDAIVATGRSDYPNQVNNVLGFPFIFRGALDVRATTINDEMKLAATRALAALAKEDVPDSVLRAYSIDRIEFGREYIIPKPFDPRVLIWEASAVAQAAMETGVAQQPVDLKQYREELEKRLGRANEVMRAMINKARRQPKRIVFTEGEEGKILRACQILLDEQIAEPILLGSAEKINAKIEELHLHLNGAQIVEPAKFARLHEYTEEFYSLRQRKGITRTEAEQTLLNPTTFGSMMLRLNDADALIGGLTTHYPDTIRPALQVIDIRPELRRVAGVYVLITAKGDIYFLADATVNIEPTAEDLAEIAIMAAEKARRFSVEPRVAMLSFSNFGSTRHPLADKVRRAVDLVRQRAPGLMIDGEMQADTAVVPHIIEETYPFSTLKGGANVLVFPNLESGNIAYKLLQRIGDCELIGPLLTGLSRPVHVLQRGSEVNDIVHVAAVAVVDAQEVGKPYRTLSQEPVA

SEQ ID NO: 5819 - DNA, 1245 bp, Shewanella sp. ANA-3
  CDS (1)..(1245): transl_table=11
atgtcagatattcgtcaacaagcactcgattatcatgaattccccgttcccggtaaaaccgcagtctgcctcactaaacctgctgaaaccagccatgacctcgcactagcctatagccctggtgttgctgaaccggtacgtgaaattgctgctaatcctgacaatgcatatcgttacaccaacaaaggtaacacagtcgctgttatcaccaacggcacagcgattctgggtttaggtaacttaggcccattggcatcaaaaccggtgatggaaggtaaggctctgttgtttaaacactttgcaaatatcgactcgaccgatatcgaagtgacccacaacacccctgaagaatttattaacacagttgcggcgatcgctggcacctttggtgggattaacctcgaagacatcaaggcgccagagtgctttgttatcgagcgcgaattaattgagcgttgtaatgtgcctgtgttccatgatgaccagcacggcactgcgattgtgacggctgcgggtatgatcaacgccttagaaatccaaggcaaactgatcagcgatgcgacctttgtgtgtatgggtgctggcgctgctgcgatcgcctgtatgaccatgctggtaaaatgtggtgcaaaccgcgccaacatctacatgttagataccaaaggcgttatccatacgggtcgtaccgatctgaatgaatacaaagctctgtttgcaaacgataccgacaagcgcactttgcaagatgtgattaaaggtgccgacgtattcttaggtttatctggcccgaacgtgattggcgctgaagaagtggccatgatggcggataaaccagtgatttttgcctgctcaaacccagatcctgaaatcaaacctgagcttgctcacgcgacgcgcagcgatttaatcatgggtactggtcgcagtgattatccaaaccaagtgaacaacgttctgtgtttcccattcattttccggggtgccttggatgtgcgtgcatcgtgcattaacgatgaaatgaaagtggctgcagtacatgcgattgctggcctagccaaagaagaagtcccagcgagcgtgcttaaggcttatccaaaggtgagttcattaagttttggccctgaatatgtgctaccaaaacctatggacccacgtttattacctcgcgttgcccgcgctgtcgcgcaggctgcgattgattcgggtgttgcggcaatcactgcgctgccacactacgccgattaa

SEQ ID NO: 5820 - protein, 414 aa, Shewanella sp. ANA-3
MSDIRQQALDYHEFPVPGKTAVCLTKPAETSHDLALAYSPGVAEPVREIAANPDNAYRYTNKGNTVAVITNGTAILGLGNLGPLASKPVMEGKALLFKHFANIDSTDIEVTHNTPEEFINTVAAIAGTFGGINLEDIKAPECFVIERELIERCNVPVFHDDQHGTAIVTAAGMINALEIQGKLISDATFVCMGAGAAAIACMTMLVKCGANRANIYMLDTKGVIHTGRTDLNEYKALFANDTDKRTLQDVIKGADVFLGLSGPNVIGAEEVAMMADKPVIFACSNPDPEIKPELAHATRSDLIMGTGRSDYPNQVNNVLCFPFIFRGALDVRASCINDEMKVAAVHAIAGLAKEEVPASVLKAYPKVSSLSFGPEYVLPKPMDPRLLPRVARAVAQAAIDSGVAAITALPHYAD

SEQ ID NO: 5821 - DNA, 1191 bp, Nocardioides sp. JS614
  CDS (1)..(1191): transl_table=11
atggccgaagcagagtccgcgagcccccatccgtacgccggagacccggtcttcgacctccatgtgggcggcaagatggcggtcaggtcctccgtcgcgctcgacgggccggacgacctgtcgaaggcctacaccccgggtgtggcccgggtgtgcgaggcgatcgcggaggacccgtcgctgacccagcactacacctgggtgcccaacaccgtcgcggtcgtcaccgacggcaccgccgtcctcgggctcggtgacatcgggccggccgcggcgatgcccgtcatggagggcaaggcggtgctgttcaagcagttcgccggcgtcgacgccgtgccgatctgcctggacaccaccgacgccgaggagatcatcgagaccgtcgcccggctggcgccgagcttcggtgggatcaacctcgaggacatctcggcgccgcgctgcttcgagatcgaggaccggctcaaggagcggctcgacatcccggtcttccacgacgaccagcacggcacggccgtcgtcacgctcgccgcgctcaccaacgccctcaagctgaccggccgcaacccggagtcgacccgggtggtgatctccggggccggcgccgccggcgtcgccgtcgccaagatcctgctcgaggccggcatcaaggacctcgccgtcaccgaccgcaagggcgtcctcaactccgagcgcggcgacctcaccccggtgaagcgctcgctcgcggtgctgaccgccgaccgcagcgggcgcaccggaagcctggccgacgtgctggccggagccgacgtctacatcggcgtgtccggcgggaccgtgcccgaggagtgggtggccgccatggcccccgacgcgatcatcttcgggctcgcgaacccgacgcccgaggtgcaccccgaagtggcccaccggcacgcgcgggtggtggcgaccggacgctcggacttcccgaaccagatcaacaacgtgctcgccttccccggcatcttccggggcgccttcgacgtccacgccacggccatcaccgagggcatgaaggtcgccgcggcccaggcgctggccgacctggtcggcgacgcgctcgccgaggacatggtcatcccgtcgccgttcgacccccgggtcgggccggcggtggcggcggctgtggcggacgccgcacggcgcgacggggtggcccgccggtag

SEQ ID NO: 5822 - protein, 396 aa, Nocardioides sp. JS614
MAEAESASPHPYAGDPVFDLHVGGKMAVRSSVALDGPDDLSKAYTPGVARVCEAIAEDPSLTQHYTWVPNTVAVVTDGTAVLGLGDIGPAAAMPVMEGKAVLFKQFAGVDAVPICLDTTDAEEIIETVARLAPSFGGINLEDISAPRCFEIEDRLKERLDIPVFHDDQHGTAVVTLAALTNALKLTGRNPESTRVVISGAGAAGVAVAKILLEAGIKDLAVTDRKGVLNSERGDLTPVKRSLAVLTADRSGRTGSLADVLAGADVYIGVSGGTVPEEWVAAMAPDAIIFGLANPTPEVHPEVAHRHARVVATGRSDFPNQINNVLAFPGIFRGAFDVHATAITEGMKVAAAQALADLVGDALAEDMVIPSPFDPRVGPAVAAAVADAARRDGVARR

SEQ ID NO: 5823 - DNA, 1281 bp, Neisseria meningitidis FAM18
  CDS (1)..(1281): transl_table=11
atggaaaactcattgaaagaagccgccctcaagttccacgaattacccgttccgggcaaaatttccgttaccccgaccaaatctttggcgaccgacaaagatttggcgttggcgtactctccgggcgtagccgctccttgtatggaaatccatgccgatccgcaaaatgcctacaaatacaccgccaaaggcaacttggtcgccgtcatttccaacggtacggccgttttgggcttgggcgacatcggcgcgctggcgggcaaacccgtgatggaaggtaaaggcgtattgttcaaaaaattcgccggtgtggacgtgttcgacatcgaaatcgatgaaaaagacccgcaaaaactcgtggacatcatcgccgctttagagccgaccttcggcggcatcaacctcgaagacatcaaagcacccgagtgtttctacatcgaacgcgaattacgcaaacgctgcaaaatccccgtattccacgacgaccagcacggcacggccatcattaccgccgctgccgtattgaacgccctgcgttttaccggccgtaaaatcgaagaagcgaccttggtttgctctggtgcgggtgcggccgcgattgcctgcttgaaccaattgctggatttgggcttgaaacgcgaaaacgtgaccgtttgcgactcaaaaggcgtgatttacaaaacccgcgaagacaaagatcgcatggatgagtctaaacagttctacgccattgaagacaacggccagcgcgtattggccgatgcggttaaaggcaaagacatcttcttgggtctgtccggcgcgaacctgctgacccccgaaatgttgaacacgatgaacgaaaaacccatcgtgttcgctatggccaacccgaatccggaaatcctgccgccgctggcgaaagaaacccgtccggacgtggttatcggtaccggccgctccgacttcccgaaccaagtgaacaatgtattgtgcttcccgttcatcttccgtggcgcgttggatgtcggcgcgacgaccatcaacgaagaaatgaaacgcgcctgcgtgtatgctttggcggatttggcgatggaagaagtaaccgaagaagtggttgccgcttacggtaagaaatttgaattcggcgcggaatacctgattccgactccgttcgattcccgcctgctgccgcgcgttgctacggctgccgccaaagcagcgatggaaagcggcgtggcaacccgtccgattgcagatttggaagcttacgctgccaagctgagcgaatggaagctgtaa

SEQ ID NO: 5824 - protein, 426 aa, Neisseria meningitidis FAM18
MENSLKEAALKFHELPVPGKISVTPTKSLATDKDLALAYSPGVAAPCMEIHADPQNAYKYTAKGNLVAVISNGTAVLGLGDIGALAGKPVMEGKGVLFKKFAGVDVFDIEIDEKDPQKLVDIIAALEPTFGGINLEDIKAPECFYIERELRKRCKIPVFHDDQHGTAIITAAAVLNALRFTGRKIEEATLVCSGAGAAAIACLNQLLDLGLKRENVTVCDSKGVIYKTREDKDRMDESKQFYAIEDNGQRVLADAVKGKDIFLGLSGANLLTPEMLNTMNEKPIVFAMANPNPEILPPLAKETRPDVVIGTGRSDFPNQVNNVLCFPFIFRGALDVGATTINEEMKRACVYALADLAMEEVTEEVVAAYGKKFEFGAEYLIPTPFDSRLLPRVATAAAKAAMESGVATRPIADLEAYAAKLSEWKL

SEQ ID NO: 5825 - DNA, 2310 bp, Acidovorax sp. JS42
  CDS (1)..(2310): transl_table=11
atgacccagcccctgtctgccgctgaagcggcactgcgcgaagccgcgctcgaataccaccgcaacatgacgcgcggcaagatcgccgtcacgcccaccaagcccctgtccaaccagcgcgacctgtcgctggcctactcgcctggcgtggcctatccctgcctggacatccaggccgacccgaccaaggcgttcgactacacctcgcgcggcaacctggtcggtgtgatcaccaacggcacggccgtgctgggcctgggcgacatcggcccgctggccggcaagccggtgatggagggcaaggggtgcctgttcaagaagttcgccggcgtggacgtgttcgacatcgaactggacgcacgcgaccccgacaagatcatcgagatcgtggcagcgctcgagcccaccttgggcggcatcaacctcgaagacatcaaggcgcccgagtgcttctacatcgagcgcgagctgtccaagcgcatgaacattccggtgttccacgacgatcagcacggcacggccatcatctccagcgccgcgctgctcaatggcctggaactggtgggcaagcagatcgaccaggtcaaggtcgccgtctcgggcgcgggtgccgccgccattgcctgcgtgggcgtgatggtgggcctgggcgtgaaggtggagaacatcttcatgtgcgactccaagggcgtgatctacgaaggtcgccccggcggcttcgatgaatccaaggcccgctacgcacagaagaccgacgcgcgcacgctggccgatgcggtcaacggcgccgacgtattcttgggctgctcggcccccggcgtgctcacggccgagatggtcaagaccatggcggacaagcccatcatcctggcgctggccaaccccgagcccgagatccgccccgaactggccaaggccgtgcgcccggactgcatcatcgccaccggccgctcggactaccccaaccaggtcaacaacgtcctgtgcttcccctacatcttccgcggcgcgctggactgcggcgccaccaagatcaccgaggccatgaagctcgcctgcgtgcgccagatcgccgcgctggccaaggaaaacatcagcgaggaagtggctgccgcctatgccggccaggagctgaccttcggccccgactacctgatccccacgccgttcgattcgcgcctgatcctcaagatcgcccccgccgtggcgcaggcagcgctggagtcgggtgtggccagccgtcccatcgaggacatggaggcatacaaggagagcctgtcgcgcttcgtgtaccagaccggcatcctgatgcgcccggtgatcaacgccgccaagacgctgcccgacgcgcaaaaacgcgtggcctatgccgacggcgaggacgagcgtgcgctacgcgccgcgcagtttgcgatcgacgaccgtatcgcccacccgatcctcatcggacgcccggcggtgatcgccgcacgcatcgccaaggccggcctgcgcatgcagccgggcaaggacgtggagatctgcgacccctcggacgacccgcggttccgccagtactgggaggcctaccaccagctcatgaagcgtgacggcgccacgcccgaggtggccaaggcagccgtgcgccgctccaacaccatcatcgccgcgctgatggtgaagctgggcgatgccgacgcaatgatctgcggcctggtgggcacctacgagacgcacctggaacgcatccacagcatcctgggccatgcacccggcgtgcagcaatacgcggcgctgaacgcgctgatgacgaccaacaacggcacgctgttcatcgctgacacctacgtcaacgaagaccccacggcagagcaactggccgacatcgcctggtcctcggtgcaggaagtgcagcgctttggcattccgccgaaggtggcgttcctgtcgcactccagcttcggctcgtccaagcgcgcctcggcgcgcaagatgcgcgccgcccgcgacctgttcgtggcccgccatcccgagatcgaatgcgatggcgagctgcatggcgacgccgcgctggagcccaagatccgcaacaactacctgccggactccacgctcaccggctcggccaacctgctgatctgcccgaacatcgactcggccaacatcctctacaacgtgctcaagaccacgaccagcggcggtgtcaccgtcggtccgatcctcatgggtacctcggccacggcgtacatcctcacgcccgcagccaccgtgcgccgggtgttgaacatgaccgcactggccgtcgccagcagcgccgcgcgccgcaagtaa

SEQ ID NO: 5826 - protein, 769 aa, Acidovorax sp. JS42
MTQPLSAAEAALREAALEYHRNMTRGKIAVTPTKPLSNQRDLSLAYSPGVAYPCLDIQADPTKAFDYTSRGNLVGVITNGTAVLGLGDIGPLAGKPVMEGKGCLFKKFAGVDVFDIELDARDPDKIIEIVAALEPTLGGINLEDIKAPECFYIERELSKRMNIPVFHDDQHGTAIISSAALLNGLELVGKQIDQVKVAVSGAGAAAIACVGVMVGLGVKVENIFMCDSKGVIYEGRPGGFDESKARYAQKTDARTLADAVNGADVFLGCSAPGVLTAEMVKTMADKPIILALANPEPEIRPELAKAVRPDCIIATGRSDYPNQVNNVLCFPYIFRGALDCGATKITEAMKLACVRQIAALAKENISEEVAAAYAGQELTFGPDYLIPTPFDSRLILKIAPAVAQAALESGVASRPIEDMEAYKESLSRFVYQTGILMRPVINAAKTLPDAQKRVAYADGEDERALRAAQFAIDDRIAHPILIGRPAVIAARIAKAGLRMQPGKDVEICDPSDDPRFRQYWEAYHQLMKRDGATPEVAKAAVRRSNTIIAALMVKLGDADAMICGLVGTYETHLERIHSILGHAPGVQQYAALNALMTTNNGTLFIADTYVNEDPTAEQLADIAWSSVQEVQRFGIPPKVAFLSHSSFGSSKRASARKMRAARDLFVARHPEIECDGELHGDAALEPKIRNNYLPDSTLTGSANLLICPNIDSANILYNVLKTTTSGGVTVGPILMGTSATAYILTPAATVRRVLNMTALAVASSAARRK

SEQ ID NO: 5827 - DNA, 2301 bp, Magnetospirillum magnetotacticum MS-1
  CDS (1)..(2301): transl_table=11
atggccagcaatttccactccgaggtatcgcgcaacgccgattccaagggtaccgatgccctggaacgcgacacccttctgatgcattcctcgggccgccccggcaagatcgaggtggtccccaccaagccgctggccacccagcgcgacctgtccctggcctattcgccgggcgtcgcctttccctgtctgcatatcgcccgcgatccctcgctggcctatgactataccgccaagggcaatctggtggcggtgatctccaatggcaccgccgtgctgggtcttggtgatctcggcgccctggcgtccaagccggtgatggaaggcaaggcggtgctgttcaagcgcttcgccgatgtggattccatcgatcttgaagtcgatacacgcgacgtggaggaattcatcgccgccgtgcgctatctcggccccagcttcggcggcatcaatctggaagacatcaaggcgccggaatgcttcatcatcgagcagcgcctgcgcgagctgatgcccattccggtgttccatgacgaccagcacggtacggcgatcatttcggcggccggtctgatcaacgcgctggaccttacgggccgtgacatctccacggtcaaggtggtggtcaatggcgcgggcgcagcgggcatcgcctgtatcgaactggccaaggccatgggcgtgcgccacgagaatgtcaccttgtgcgacaccaagggcaccatctatcagggccggaccgagggcatgaaccagtggaaatcggcccatgcggttcccaccaaggctcgcaccctggccgaggccttagagggcgccgacgtgttctacggcctgtcggtcaagggagcggtaacgcccgagatggtcgcctccatggcgccccggcccatcatcttcgccatggccaatcccgatcccgagatcacgccggaagaggtgaagtcggtgcggtccgacgccatcgtcgccaccgggcgctcggactatcccaatcagatcaacaatgtcttgggctttccctatatcttccggggcgcgctggacgtgcgggccagcaccatcaacgattccatgaagatcgccgccgcccgggccatcgccgccctggcccgcgaggatgttcccgacgaggtggatgccgcctattccggacgccgcctgcgctatggccccgactacatcatcccggtgcccttcgatccgcgcctgatcgcctccatcccgcccgccgtggccaaggcggccatggattcgggcgtggcgcgaaagcccatcatcgacatgggcgcctataagcgggaattgtccgcccgcctggatccggccagcgctgggatgcagaccatcaccgaggcggtcaaggcaaacccgaagcgggtggtcttcgccgagggcgaggaggaaaagcagatccgcgccgccgtggccttcgccaatgcgggcctgggtcaccccatcttgctggggcgcgaggaccgcatccgcgagaccatgaagaatatcggcctgccagcggccgaatcgctggacatcatcaattcgcgcatctcgccgcgcaccaaggcctatacggatatgctctatgcgcggctgcagcgccggggggcgctgtatcgcgacgtccagcgtctggtcaaccaggagcgcaacattttcggctcgctgatggtgcagtcgggcgacgccgacgccatggtgactggcctcacccgcaattactggcaggccttcgaggagatcaagaaggtcatcgaccccaccccgggcgaattgctgttcggcatgacggtcttcgtggtcaagggcaagctggtcttcatggccgataccacggtgatggaaacgcccacgccgcagcaactggccgatatcgcggtgcagaccgcccacaaggcgcgtcagatgggccacgaaccccgcgtcgccatgatcagctattccaatttcggaaatcccagcaacgagcgcgccgaccgggtgcgcgaggcggtgggcattctggacagccgcaaggtggacttcgtctatgacggcgaaatggccgccgatgtggcgcttgacccggatctgctcagccatttcccgttctgccgcctgaaggaaccggccaatgtgctggtgatgccgggtctttactccgccaccatcgcctccaagctgctgcagaagctgggcggggtcagcgtcatcggccccattctggtgggcctgtccaagccggtgcagatcacctccatggatgccaccgccaatgacatcgtcaacatggccgtcctggccagctatgatgccgtccgctga

SEQ ID NO: 5828 - protein, 766 aa, Magnetospirillum magnetotacticum MS-1
MASNFHSEVSRNADSKGTDALERDTLLMHSSGRPGKIEVVPTKPLATQRDLSLAYSPGVAFPCLHIARDPSLAYDYTAKGNLVAVISNGTAVLGLGDLGALASKPVMEGKAVLFKRFADVDSIDLEVDTRDVEEFIAAVRYLGPSFGGINLEDIKAPECFIIEQRLRELMPIPVFHDDQHGTAIISAAGLINALDLTGRDISTVKVVVNGAGAAGIACIELAKAMGVRHENVTLCDTKGTIYQGRTEGMNQWKSAHAVPTKARTLAEALEGADVFYGLSVKGAVTPEMVASMAPRPIIFAMANPDPEITPEEVKSVRSDAIVATGRSDYPNQINNVLGFPYIFRGALDVRASTINDSMKIAAARAIAALAREDVPDEVDAAYSGRRLRYGPDYIIPVPFDPRLIASIPPAVAKAAMDSGVARKPIIDMGAYKRELSARLDPASAGMQTITEAVKANPKRVVFAEGEEEKQIRAAVAFANAGLGHPILLGREDRIRETMKNIGLPAAESLDIINSRISPRTKAYTDMLYARLQRRGALYRDVQRLVNQERNIFGSLMVQSGDADAMVTGLTRNYWQAFEEIKKVIDPTPGELLFGMTVFVVKGKLVFMADTTVMETPTPQQLADIAVQTAHKARQMGHEPRVAMISYSNFGNPSNERADRVREAVGILDSRKVDFVYDGEMAADVALDPDLLSHFPFCRLKEPANVLVMPGLYSATIASKLLQKLGGVSVIGPILVGLSKPVQITSMDATANDIVNMAVLASYDAVR

SEQ ID NO: 5829 - DNA, 2268 bp, Haemophilus somnus 2336
  CDS (1)..(2268): transl_table=11
atggatgcacaattacgtcaagccgctttagattttcatgagtttccaaaaccgggaaaaattgaagttacaccaacaaaatcattgggaacacaacgagatttagccttagcctattctccaggtgtggctgtaccttgtttagaaatccaagcagatcctgcctctgcttatagatatacttccaaaggcaatttagtcgcagtgatatcaaatggaaccgcagtattaggtttaggaaatattggagcgttagccggtaagcctgttatggagggtaaaggggttttatttaagaagtttgctggtgttgatgtctttgatattgaagtagatgaacaagatcctgataaattagtagaaattatcgctgctttagaaccgactttcggcggtataaatcttgaagatattaaagcaccagaatgcttttatattgaacaaaaattacgtgagcgtctgaaaattcctgtttttcacgatgatcagcatggtacagccattatttcagccgctgcaataattaacggattgcgtattgttaataaaaaaattgaagatgttcgtttagttacttccggtgcaggtgcggcttctattgcatgcttaaatttactggtttcattaggcatgaaacgtgaaaatatcacggtttgtgactctaaaggggtcatttataaaggtcgtgacgaaaaaatggatgacaccaaaaagttatatgctattgatgataacggtcaacgctctttagctgatgccattccagattcagatattttcttaggttgttctgccgctggagcacttactcaagaaatggtaaaaacaatggggcctaatcctttaattttagccttagcaaatcctgagcctgaaattttaccaccgttagccaaagctgttcgacctgatgcgattgtttgtaccggtcgttccgactatccgaaccaagtaaataatgtattatgcttcccgttcattttccgtggtgcattagatgtcagtgcaacgactatcaatgaagaaatgaaacttgcggcagtttatgcaattgctgatttagccttagcagaacaaagcgaggttgtcagttccgcctatggtgagagcggcgtttctttcggaccggattatattattccaaaaccgtttgatcctcgattaattgtaaaaatagcacccgccgtagctaaagcggcaatggatagcggtgttgctactcgtccgattgaagattttgaggcatatattgagaaattaacccagtttgtttataaaaccaacttattcatgaaacctgtttttgcacaggccaaagaagataaaaagcgagttattttaactgatggcgaagaaaaacgtgtattacatgcaatccaagaaattgcaaccttaggcatagcgtatcctgttctgttagggcgtactcatattattgaagaaagcatcaaaaaattagggctgcaattacaggttggacgtgattttgagattattgacattgaaaataacccatactacgaggaatgctgtgatacttattacaacaaattaaaacgccaaggtatgacgcctaccggagccaaacgaaaaatgctccataatccgaccgcacttggtgcagttttattggaacttggtaaagtcgatgcgatgatttgcggattagttggaccatttgcggcacacttggctactgttaaagaggttgttggtgaaaaagaacatgaaattccagctacggtaaacggactggttttgcctaccggtaatttatttattgcagatacttttgtgaactcaagcccaacagccgaggaacttgcagaaatcacgattatgtcagccaaagaagttcgtcgttttggtatagagccacaggttgcacttgtttcacattcaaattacggttcaattaatgacccaagtgcggttaaaatgcggcaggttttagaacttgtgcgtgaaaaagcaccggacttgattattgatggtgaaatgcactgtgatattgctttatcggagaatttacgtaaggaagtgatgcctgacagtcctattaaaggggcggcaaacttattgattatgcccaacatggaaactgcccgtattagcttgaatttattacaaggtacagcaacaccaattacaattggaccaattttaatgggtgtggaaaaaccggcacatattcttacttctgcttcatcagtacgccgtattattaatatggtagccgttgcagcggtaaaagcacagaatcgttga

SEQ ID NO: 5830 - protein, 755 aa, Haemophilus somnus 2336
MDAQLRQAALDFHEFPKPGKIEVTPTKSLGTQRDLALAYSPGVAVPCLEIQADPASAYRYTSKGNLVAVISNGTAVLGLGNIGALAGKPVMEGKGVLFKKFAGVDVFDIEVDEQDPDKLVEIIAALEPTFGGINLEDIKAPECFYIEQKLRERLKIPVFHDDQHGTAIISAAAIINGLRIVNKKIEDVRLVTSGAGAASIACLNLLVSLGMKRENITVCDSKGVIYKGRDEKMDDTKKLYAIDDNGQRSLADAIPDSDIFLGCSAAGALTQEMVKTMGPNPLILALANPEPEILPPLAKAVRPDAIVCTGRSDYPNQVNNVLCFPFIFRGALDVSATTINEEMKLAAVYAIADLALAEQSEVVSSAYGESGVSFGPDYIIPKPFDPRLIVKIAPAVAKAAMDSGVATRPIEDFEAYIEKLTQFVYKTNLFMKPVFAQAKEDKKRVILTDGEEKRVLHAIQEIATLGIAYPVLLGRTHIIEESIKKLGLQLQVGRDFEIIDIENNPYYEECCDTYYNKLKRQGMTPTGAKRKMLHNPTALGAVLLELGKVDAMICGLVGPFAAHLATVKEVVGEKEHEIPATVNGLVLPTGNLFIADTFVNSSPTAEELAEITIMSAKEVRRFGIEPQVALVSHSNYGSINDPSAVKMRQVLELVREKAPDLIIDGEMHCDIALSENLRKEVMPDSPIKGAANLLIMPNMETARISLNLLQGTATPITIGPILMGVEKPAHILTSASSVRRIINMVAVAAVKAQNR

SEQ ID NO: 5831 - DNA, 2394 bp, Rickettsia sibirica 246
  CDS (1)..(2394): transl_table=11
atgttgcctgagattgcttcgtcgatgcctattgcatctgctcgcaatgacgaaaaactaaaacaaacaaataaaacaggaatttctaaaatggatgaaatgaataaaataaattatgctgaggcccttgaatatcatgaaaaagataagcctggtaagatcgctatttctgcaacaaagtctttagttactcagcaagatttatcacttgcttattccccaggggttgcggctccttgccttgaaattgctaaaaatttagaggatgtatataaatatactgctcgcggtaatttagttgccgtaatctctaacggtactgccgtacttgggcttggtaatttaggagctgccgcttcaaaaccggtgatggaaggtaaagcggtactattcaaaaaatttgctgatattgatgcaattgacttggaagtgaatacggaagatcctgaagaatttattaatgccgtgaagtatctcagttatagttttgggggtattaatcttgaagatattaaagctccggaatgttttattatagaagaaaaattaaaatctttaatggatataccggtctttcatgacgatcagcatggaacagcgattattaccgccgcagggctaataaatgctgcgtatcttactaatcgcaagcttgaagatttaaaaatcgtagtgaacggagcaggtgcagcagctattgcttgtattgatttattaattgctcttggagctgataaatcaaagattattgtatgtgatactaaaggcgttgtttacaaaggacgcctagaaggtatgaataaatggaaagagctatatgcaagtgataccaagtttagaactttagcgcaaagcttaaataacgctgatgtatttatagggttatcggtaaaaggcgcagtaactaaagatatggtgagtagaatggcaagtaatccgattatttttgctatggctaaccctgatccggaaattactccggaagatatacaacttgtacgcgatgatgcgattatagcaacagggcgatctgattataataatcagattaataatgttatgggatttccttatatttttagaggagcattagatataagagctaagactattaatacggaaatgaaaatagctgcagcaaaagccattgcagatttagcccgtagacctgtaccggaagaggtgtataaagcttattcagggcgtaagatggtttttggtaaggaatatatcattcctgtaccgtttgatcctcgtttaattaccgtagtagcagcggcggttgccgttgctgcaatagaaagcggcgttgctagggttaaagattttagtataggtaaatataagaaagaattaggtagcagattaaatcctactgctaactatatgaatttcttagctgaaaaaattcataatgcaccgcttaaacggattgtttttgctgaaggtgaagaagaagaagtaatttctgccgctcttatgatgcgagacaagaaatacggtcatccgattataattggtcgtgttgaacgaattgaggctatgttaaaaaagataggtcaagatattagcttagacggaattcaaataatgaatgcggccttaagcgatagtttagagaaatatactgattatttatataaaagacttcagagaaaaggttatttataccgtgattgtgcaaagcttgttaaaactgataagaatattttcgctgcttgtatgttagcatgcggtgacggtgatgctcttctaaccggtgttacaaaaagttatatcgatagtttagaagatatcatgaaagtcattgcaccaaaaactaatcgtagcatccttggctattcaattatgattgctaaagataataatattattattgccgataattgtattacagaatatccaaacagttgggaacttgcacaaatagcaacccaaactgcagaaattgctaaaaatatgggaatcacgcctcgtgttgcacttctttctttttcaacattcggtaattcttctaaggcaaaaacagctcgtattcgtgaagcagtaaatatactagataattttagcaaggacaaagaagagctgagcggcatgaaggtagattttgaatatgacggagagatgtcggttaaagtggctttagatggtgatttacgtaaattatataaattttgtagattatcaggatctgcaaatgtattaattatgcctggtttaaattcagctgctatttctactgagttgttacaagaattttcgtcaaacagctttataggtcctataacaaacggttttgaaaaacccgttcaaatacttcaagctgcagcaacagctaatgaaatactaaaaatagcaacttttgcttgcgttgaagctataaacgaggtttaa

SEQ ID NO: 5832 - protein, 797 aa, Rickettsia sibirica 246
MLPEIASSMPIASARNDEKLKQTNKTGISKMDEMNKINYAEALEYHEKDKPGKIAISATKSLVTQQDLSLAYSPGVAAPCLEIAKNLEDVYKYTARGNLVAVISNGTAVLGLGNLGAAASKPVMEGKAVLFKKFADIDAIDLEVNTEDPEEFINAVKYLSYSFGGINLEDIKAPECFIIEEKLKSLMDIPVFHDDQHGTAIITAAGLINAAYLTNRKLEDLKIVVNGAGAAAIACIDLLIALGADKSKIIVCDTKGVVYKGRLEGMNKWKELYASDTKFRTLAQSLNNADVFIGLSVKGAVTKDMVSRMASNPIIFAMANPDPEITPEDIQLVRDDAIIATGRSDYNNQINNVMGFPYIFRGALDIRAKTINTEMKIAAAKAIADLARRPVPEEVYKAYSGRKMVFGKEYIIPVPFDPRLITVVAAAVAVAAIESGVARVKDFSIGKYKKELGSRLNPTANYMNFLAEKIHNAPLKRIVFAEGEEEEVISAALMMRDKKYGHPIIIGRVERIEAMLKKIGQDISLDGIQIMNAALSDSLEKYTDYLYKRLQRKGYLYRDCAKLVKTDKNIFAACMLACGDGDALLTGVTKSYIDSLEDIMKVIAPKTNRSILGYSIMIAKDNNIIIADNCITEYPNSWELAQIATQTAEIAKNMGITPRVALLSFSTFGNSSKAKTARIREAVNILDNFSKDKEELSGMKVDFEYDGEMSVKVALDGDLRKLYKFCRLSGSANVLIMPGLNSAAISTELLQEFSSNSFIGPITNGFEKPVQILQAAATANEILKIATFACVEAINEV

SEQ ID NO: 5833 - DNA, 1209 bp, Bacillus cereus G9241
  CDS (1)..(1209): transl_table=11
atgcataaagtgcatcaaggaaaattagaaactgtatcaaaagtaaaagtagaaaatgcaaaagatttaagtcttgcatattctccaggggttgcagaaccttgtaaggaaatttatgacgataaaagtaaggtatatgaatatacaatgaagggaaatatggtagcagttgtgacagatggaacggctgtacttggtcttggtaacatcggccctgaagcatctcttccagtaatggaaggtaaagctgtattattcaagagctttgctggtgtagatgcattcccaattgccttaaatacaaacgatgtagataaaattgttgaaactgtaaaattaatggagccaacttttggcggcgttaacttagaggatatcgcagcaccaaactgcttcattattgaagaacgtttgaaaaaagaaacaaatattcctatcttccatgatgatcaacacggaacagctatcgtaacagtagcgggtcttgtgaacgcgctaaaactagttggaaagaaaatgtctgacattaaagttgtcgcaaatggcgcaggtgcagcaggtattgcaattattaaacttttatatcgctatggcgtacgcgacattattatgtgtgaccgtaaaggggcaatctatgatggtcgtcctacaggtatgaatccggtgaaggatgaagttgcaaaatatacaaataagaatcgtatcgaaggttctttagctgatgttgtacaaggtgcggacgtattcattggtgtatctgcagaaggtgcattaacagaagaaatggttcgtacaatgaatgacgatgcaattatttttgcaatggcgaatccagttccagaaattatgccagaattggcaaaagcagcgggcgcagctgttgttggaacgggtcgttctgacttcgcaaaccaagtaaataatgtactagcgttccctggtattttccgcggtgcacttgacgtacatgcgacacaaattaatgaagaaatgaagatggcagctgtacaggctattgctgagcttgtagcagaagatgagttaaatgcagactatatcattccagcaccgtttgacgcgcgtgtagcgcctcaagtagcagcttacgttgcgaaagctgcaatggagacaggagtagctcgccgtcaagtagatccaaatgaagttgctgagaaaacaaaacaattagcgctgattggtaaagaataa

SEQ ID NO: 5834 - protein, 402 aa, Bacillus cereus G9241
MHKVHQGKLETVSKVKVENAKDLSLAYSPGVAEPCKEIYDDKSKVYEYTMKGNMVAVVTDGTAVLGLGNIGPEASLPVMEGKAVLFKSFAGVDAFPIALNTNDVDKIVETVKLMEPTFGGVNLEDIAAPNCFIIEERLKKETNIPIFHDDQHGTAIVTVAGLVNALKLVGKKMSDIKVVANGAGAAGIAIIKLLYRYGVRDIIMCDRKGAIYDGRPTGMNPVKDEVAKYTNKNRIEGSLADVVQGADVFIGVSAEGALTEEMVRTMNDDAIIFAMANPVPEIMPELAKAAGAAVVGTGRSDFANQVNNVLAFPGIFRGALDVHATQINEEMKMAAVQAIAELVAEDELNADYIIPAPFDARVAPQVAAYVAKAAMETGVARRQVDPNEVAEKTKQLALIGKE

SEQ ID NO: 5835 - DNA, 2304 bp, Rickettsia akari str. Hartford
  CDS (1)..(2304): transl_table=11
atggatgaaatgaatagaataaattatgctgaggcccttgaatatcatgaaaaagataagcctggtaaaattgctattactgctacaaagtctttagttactcagcaagatttatcgcttgcttattcgccaggtgttgcagctccttgccttgaaattgctaaaaatttagaggatgtatataaatataccgctcgtggtaatttagttgccgtaatctctaacggtactgcagtacttgggcttggtaatttaggagcggctgcttcaaaaccggtaatggaaggtaaagccgtactattcaaaaaatttgccgatattgatgcaattgacttggaagtgaatacggaagaccctgaagaatttattaatgctgtaaaatatcttagttatagcttcggcggtattaacctcgaagatattaaagctcctgaatgttttattatagaagaaaaattaaaatctttaatggatataccagtctttcatgacgatcagcatggaacggcgattattaccgctgcagggctaataaatgcagcatatcttactaatcgcaagcttgaagatctaaaaatagtagtaaatggagcaggggccgctgctattgcttgcattgatttattaattgctcttggagccgataaatcaaagattattttatgtgatactaaaggtgtggtgtacaaaggacgcctagaaggtatgaataaatggaaagagctatatgcaagcgataccaagtttagaactttagcggaaagcttaaataatgcggatgtatttatagggttatcggtaaaaggggtggtaactaaagagatggtgaaaaggatggcaaataatccgattatttttgctatggctaaccctgatcctgaaattactcctgaagatataaagtttgtacgagatgatgcaattatagcaacagggcgatctgattataataatcagattaataatgttatgggatttccttatatttttagaggagcattagacgtaagagccacgaccattaatatggaaatgaaaatagctgcagcaaaagctattgcagatttagcacgtagacctgtaccggaagaggtatctaaagcttactcagggcgtaagatggttttttgtaaggaatatattattcccgtaccgtttgatcctcgtttaattaccgtagtagcagcggcagttgctgttgctgcaatagaaagcggtgttgctaaggttaaagatttgagtataggtaaatataggaaagaattgggtagtagattaaaccctactgctaactatatgaatttcttagctgaaaaaattcataatgcaccgcttaagcggattgtttttgctgaaggtgaagaagaagaagtcatttctgccgcccttatgatgcgagacgagaaatatggtcatccgattataatcggtcgtgttgagcggattgaggctacgttaaaaaagataggtcaatatgttagcttagacggaattcaaataatgaatgcatctttaactgatagtttagagaaatatattgattatttatataaaagacttcagagaaaaggctatttatatcgtgattgtgctaaacttgttgaaacagataaggatatttttgctgcttgtattgtagcgtgcggtgacggtgatgctcttttaaccggtgttactaaaagctatatagatagtttagagaatatcatgaaagtaatttcgccaaaacataatcgtagaatccttggctattcaattatgattgctaaagacaataatattattatttctgataattgtattactgcatatccaaacagcttagagcttgctcaaatcgcaacacaaactgcagaaattgctaaaaatatgggtattaccccaagagttgcatttctttcttgttccagcttcggtaatgcttctaaggcaacaacagctcgtatttgtgaagcagtaaatatactagataattttagtaaagacaaaaaagagctgagcggcatgaaagtagattttgaatatgatggagaaatgtcggttaaggtagctttagacggtgatttacgtaaattatataaattttgtagattatcaggatctgcaaatatattaattatgcctggtttaaattcagcgtctatttctactgaattattacaagaattttcatccaatagcttcataggtcctataacaaacggttttgaaaaacccgttcaaatacttcaagctacagccacagctaatgaaatactaaaaatagcaacttttgcttgcgttgaggctataaaagaggtttag

SEQ ID NO: 5836 - protein, 767 aa, Rickettsia akari str. Hartford
MDEMNRINYAEALEYHEKDKPGKIAITATKSLVTQQDLSLAYSPGVAAPCLEIAKNLEDVYKYTARGNLVAVISNGTAVLGLGNLGAAASKPVMEGKAVLFKKFADIDAIDLEVNTEDPEEFINAVKYLSYSFGGINLEDIKAPECFIIEEKLKSLMDIPVFHDDQHGTAIITAAGLINAAYLTNRKLEDLKIVVNGAGAAAIACIDLLIALGADKSKIILCDTKGVVYKGRLEGMNKWKELYASDTKFRTLAESLNNADVFIGLSVKGVVTKEMVKRMANNPIIFAMANPDPEITPEDIKFVRDDAIIATGRSDYNNQINNVMGFPYIFRGALDVRATTINMEMKIAAAKAIADLARRPVPEEVSKAYSGRKMVFCKEYIIPVPFDPRLITVVAAAVAVAAIESGVAKVKDLSIGKYRKELGSRLNPTANYMNFLAEKIHNAPLKRIVFAEGEEEEVISAALMMRDEKYGHPIIIGRVERIEATLKKIGQYVSLDGIQIMNASLTDSLEKYIDYLYKRLQRKGYLYRDCAKLVETDKDIFAACIVACGDGDALLTGVTKSYIDSLENIMKVISPKHNRRILGYSIMIAKDNNIIISDNCITAYPNSLELAQIATQTAEIAKNMGITPRVAFLSCSSFGNASKATTARICEAVNILDNFSKDKKELSGMKVDFEYDGEMSVKVALDGDLRKLYKFCRLSGSANILIMPGLNSASISTELLQEFSSNSFIGPITNGFEKPVQILQATATANEILKIATFACVEAIKEV

SEQ ID NO: 5837 - DNA, 1392 bp, Crocosphaera watsonii WH 8501
  CDS (1)..(1392): transl_table=11
atggcaaacctcaacccaaccgcaagttatagccttgcattgaccatcgaattacccaatattgcaggaaccctcgccaacgttacccaggctattgcaggggcccaagggagttttggacagatttccttaattgagcataacctaaaaatcacgcaacgagaaattacagtagaagcatcaagcgaggaacacgccgaacaaatagtttctgctgtcagagaaattcccaacgttaaaatattaaaagtttccgatcgcacctttgaactacatcgtaagggtaaaattaccatagaaagtcgcctacctcttcattcccaaggagacttggctatggcctataccccaggggttggtcgcatctgtaaggcgatcgccactgatccctctgaagtgtataacctcaccatcaaaaataacacagtggcagtggtcaccgatggtagtgcggtgttaggcttaggaaacctcggtcctgaggccgctttacccgtgatggagggaaaagccatgttatttaaggaatttgccaaagtagatgcctttcccatctgtttagccacccaagacacagaagaaattatcgaaaccgttaaacgcatcgccccggtgtttggaggcattaatttagaagatattgctgccccccgttgctttgaaattgaaaaacgattgcgtcaagaattggatattcctgtgtttcacgacgatcaacacgggacagccatcgtcaccctagcagccttatttaatgctctgaaattagtccataagaccttagaaggggtacgaatcgttataaatggggccggggctgctggtgttgcgatcgcctccctattgcgggctgccggagctaccactatttggttatgcgactccaagggtttaatttcccacaatagagaggatctcaacccccaaaaaaaagcttatgctgtcagtgccagtggtaccctagcggatgctatgcaaggagccgatgtctttttaggagtgagtgcgccgggggtggtaacgccggaaatggtgcgatcgatgaataaagatcccattgtttttgctatggctaaccctattcctgaaattcaaccagagttagttactaatgatgtagcagtcatggccacgggacggagcgactatcctaaccaaattaacaacgttttggcctttcctggggtgttccgaggggccttagactgtcgtgccaaaaatatcaccgagcgtatgtatctagaagcagctaaggccatcgcttctttggttcattccaatcagttaaatgcagaacatattgtcccttcggtgtttgatgagcgtgtctctcatgctgtggccagtgctgtagaattagctgctcgtcaagatggtgtcgctaatcagtaa

SEQ ID NO: 5838 - protein, 463 aa, Crocosphaera watsonii WH 8501
MANLNPTASYSLALTIELPNIAGTLANVTQAIAGAQGSFGQISLIEHNLKITQREITVEASSEEHAEQIVSAVREIPNVKILKVSDRTFELHRKGKITIESRLPLHSQGDLAMAYTPGVGRICKAIATDPSEVYNLTIKNNTVAVVTDGSAVLGLGNLGPEAALPVMEGKAMLFKEFAKVDAFPICLATQDTEEIIETVKRIAPVFGGINLEDIAAPRCFEIEKRLRQELDIPVFHDDQHGTAIVTLAALFNALKLVHKTLEGVRIVINGAGAAGVAIASLLRAAGATTIWLCDSKGLISHNREDLNPQKKAYAVSASGTLADAMQGADVFLGVSAPGVVTPEMVRSMNKDPIVFAMANPIPEIQPELVTNDVAVMATGRSDYPNQINNVLAFPGVFRGALDCRAKNITERMYLEAAKAIASLVHSNQLNAEHIVPSVFDERVSHAVASAVELAARQDGVANQ

SEQ ID NO: 5839 - DNA, 2295 bp, Xylella fastidiosa Ann-1
  CDS (1)..(2295): transl_table=11
atgtcaaacgatacatttaaacaggcggcgattgattatcatcgcacgcagccagccggtaagatcaaggtggtcgcaaccaagccaatgctgacgcagcgtgatttgtcgttggcgtattccccaggtgtggcgtttgcttgccaagcgattgtcgaaaatcctcagcaggcaagtgagctcacggcgcgcggtaacttggtggcggtgatttccaacggcactgcggtgttgggtttggggaacattggtccactggcgggtaagccggtgatggaaggcaagggcgtgctgtttcagaagttcgctggcattgatgtgtttgatatcgagattgacgagtctgacccggataagttggtagacattattgccagtctggagccgactttcggtggtgtgaacttagaggacatcaaagcgccggaatgtttcatcgtcgagcgtaagttgcgtgagcggatgagtattccggtctttcacgatgatcagcacggtactgcgatcattgtcggtgcggctgtgcttaacgcgatggtcatcactggaaagaagatcggagaggtgaagttggcaaccaccggcatgggagcggcgggtgtctcctgcgtcaatatgctggtttcgctggggttgaacccggataacattctggcttacgaccgggagggggtgatccatactggccgtaccgatttggatccggagaagcagcgttatgcacgggatacggataagcgcactttggcggagattgtggagggtgcggatatttttcttgggctttctgctgctggcatcttgacgccagagatggtggtgacgatggcgcctgacccagtgatctttgccttggccaatcccattccggagatcatgcctgaggcggtatgtgcggtgcgtacggatgccattattggaactgggcgttcggattatccaaatcaaatcaacaatgttttgtgttttccctacttgttccgtggtgcgttggatgtgggtgcgaccacgatcaatgaggagatgaagattgcttgcgttaaggcgattgctgcgttagcacggtgtgaggcttccgatctgggcgctgcttacggtggtgagacgccaagttttggccgggagtatttgattccgcgtccgcttgacccacgtttattagtggaactgtcttcggcggtggcgcaggcggcgatggattctggggtggcgacccgcccgattacggatatgagcgcctaccatgacaagttgagccaatttgtttaccgcaccagcttgatgatgaagccagtttacgatcgtgcgcgtgctgataagcagcgggtggtgtatgccgagggtgaggaagaggtgattctgcgtgcggtgcagaatgtgattgacgaagggttggcgttcccgattctgattggtcgtccggatgtgatcgaaagcaggattcagcgcatggggctgcgcatgaaggttggtgtcgatttcgaggtgaccaatatccacgatgatccgcgcttcaacgattattggcagtactaccatggtgtgacggagcgtcgtggggtgacggtcagtgcggcgaaggagttaatgcgttcgcgtcctactctgattgcctcggtgatggttgcacgtggtgaggccgatgcgttgttgactggagccgtcggtcgtttccataagaggctcggttatgcgcgcagtgtgatccctctggaacctcgggtgagttcaacggcggcgatgacaggtgtgattaaccaacatggcgcgtttttctttgtggatacccatgtgcaggaggatccgagcgccgagcagattgccgaggccacgttgcaggcgtgttaccgtttgaagttgtttggcattgagccgagtgtggcgttactgtcgcacagtaattttggtagtcacgattcgcgtgatgcattgaagatgcgccaggtgcgtgagctgctgctcaagcgtagccccaggttgaatattgatggggagatgcaggcggatacagcgtgggatgaggtgctgcgcgagcgcattatgcccaataccacgttgaagggccgggctaatctgtttgtgtttccaaatttggaggcggccaatattgcttacaacttggtgcgtgtgtttaccgatggtgtggcgattggcccgattttgatgggtatttccaaggcagtgcatattttgacgagtagcaccacgtcacggcgcgtgatgaatatgacggcaatcgctgcggtggatgcgcagattcgcaagcagtttgaaggtggaaagcgcggcggataa

SEQ ID NO: 5840 - protein, 764 aa, Xylella fastidiosa Ann-1
MSNDTFKQAAIDYHRTQPAGKIKVVATKPMLTQRDLSLAYSPGVAFACQAIVENPQQASELTARGNLVAVISNGTAVLGLGNIGPLAGKPVMEGKGVLFQKFAGIDVFDIEIDESDPDKLVDIIASLEPTFGGVNLEDIKAPECFIVERKLRERMSIPVFHDDQHGTAIIVGAAVLNAMVITGKKIGEVKLATTGMGAAGVSCVNMLVSLGLNPDNILAYDREGVIHTGRTDLDPEKQRYARDTDKRTLAEIVEGADIFLGLSAAGILTPEMVVTMAPDPVIFALANPIPEIMPEAVCAVRTDAIIGTGRSDYPNQINNVLCFPYLFRGALDVGATTINEEMKIACVKAIAALARCEASDLGAAYGGETPSFGREYLIPRPLDPRLLVELSSAVAQAAMDSGVATRPITDMSAYHDKLSQFVYRTSLMMKPVYDRARADKQRVVYAEGEEEVILRAVQNVIDEGLAFPILIGRPDVIESRIQRMGLRMKVGVDFEVTNIHDDPRFNDYWQYYHGVTERRGVTVSAAKELMRSRPTLIASVMVARGEADALLTGAVGRFHKRLGYARSVIPLEPRVSSTAAMTGVINQHGAFFFVDTHVQEDPSAEQIAEATLQACYRLKLFGIEPSVALLSHSNFGSHDSRDALKMRQVRELLLKRSPRLNIDGEMQADTAWDEVLRERIMPNTTLKGRANLFVFPNLEAANIAYNLVRVFTDGVAIGPILMGISKAVHILTSSTTSRRVMNMTAIAAVDAQIRKQFEGGKRGG

SEQ ID NO: 5841 - DNA, 2301 bp, Croceibacter atlanticus HTCC2559
  CDS (1)..(2301): transl_table=11
atgtctaaagaaagcaaacgaagagaagccttagtatatcacgccaaaccaacacctggtaagataaaggttgtccctacaaaaaaatattcatctcaacgagaccttgccttggcatattcgcctggagttgcagagccttgtttagagatagaaaaagataaggaaaacgtatacagatataccaccaaaggtaatcttgtagctgtaatttctaatggtacagcagtacttggtttaggtgatataggtccagaagcttctaaaccagtaatggaaggtaaagggctattgtttaaaatttttgcagacatagatgtttttgacatagaggtagacactaaagatgtcgatgcttttgttgaaacagtaaagaatatagcgccaacatttggtggtattaatctagaagacataaaagcaccagaggcttttgagatagaacgaagacttaaggaagagctggatattcctgtgatgcatgacgatcaacacggtacagcaattatatctgcagcagctctaattaatgcactagagttagcagacaagaagattgaagatgtaaagtttgtggtatcaggtgctggatcagctgcaattgcatgccttaatttatacttgttattaggggcaaaaccagaaaacatgtctgtatttgactctaatggattactccactctgaaagaggcgatataacaatacagcaagaaaaattctgttctaaaaaaatgtacggttctttagccgaagcatttgttaatgcagatgtctttttggggctttcagtaggaaatatagtatctccagagatgataaaatctatggctaatgatcctattgtatttgctatggctaatccaaatccagaaatagattatgatctggctataagtgcacgcaaagatatcattatggctacaggacgtagtgatcatcctaatcaggttaataatgtattaggcttcccatttatatttcgtggcgctttagatgttagggctactaaaattaatgaggaaatgaaaatggcagcggtaaagtctttggctaaattagctaaggagccagttccggagcaagttaatatagcctacggagaaacgcgtctaaactttgggagagattatataataccaaaaccatttgacccaagacttattgcacaagttccgccagcagtagcaaaagcagctattaaaagtggagtagccagaaaagaaattttagattggcagaaatatgaagacgaactttatgatcgtatgggtaacgataataaggttacaaggttgcttcataaccgtgctaaaatgaatcctaaacgcattgtttttgcagaagcagatcatctagatgtacttaaggctgcacagattgttcatgatgaaggaatgggtattcctattcttctgggacgccgagaagttattaaggaattaatgatcgagttagattttgattctgaagaggttaccattatagacccaaagtcagatgaagagaaaggtcacctagaaaattatgccaaccaattctggaaggctagacaaagaaaaggggttacactctacgacgctcaaaagctattgagagaacgaaattattttgctgccatgatggttcagttaggagatgcagatgctatgctttctggatactctagagcgtatcctactgtggtgaagccaattttagaaataattggtaagcttaaaggagtaaccaaagttgccacgtgtaacttaatgaacacctctaaaggcccaatttttattagtgacacatcaataaatatagatcctacagctaaagatttagctaaaatagctcaaatgacaaaccatactgtaaaaatgtttgggatggaagctattatagcaatggtttcatatgccaattttggctcttcaaaagatgcacacgctaccaaagttagagaagctgttgatttgcttcataaagtagctcccgatgtaattgtagatggagaattgcaagtagattttgctcttaatagaaaaatgagagaggaaaagtttccattctctaaattatccaataggaaagtaaacacattaatttatccaacgctggactcagcaaacggaacctataagttaataaaggagcttactggtgaagattcaataggcccaattatgatggggttagaaaaacctgcacacgttattcaacttggagcaagtgtagaggaaatggtaaatatggctgctgttgcaattgttgatgctcaggataagcaaaaacgccaacaaatgaaattagaaatccaataa

SEQ ID NO: 5842 - protein, 766 aa, Croceibacter atlanticus HTCC2559
MSKESKRREALVYHAKPTPGKIKVVPTKKYSSQRDLALAYSPGVAEPCLEIEKDKENVYRYTTKGNLVAVISNGTAVLGLGDIGPEASKPVMEGKGLLFKIFADIDVFDIEVDTKDVDAFVETVKNIAPTFGGINLEDIKAPEAFEIERRLKEELDIPVMHDDQHGTAIISAAALINALELADKKIEDVKFVVSGAGSAAIACLNLYLLLGAKPENMSVFDSNGLLHSERGDITIQQEKFCSKKMYGSLAEAFVNADVFLGLSVGNIVSPEMIKSMANDPIVFAMANPNPEIDYDLAISARKDIIMATGRSDHPNQVNNVLGFPFIFRGALDVRATKINEEMKMAAVKSLAKLAKEPVPEQVNIAYGETRLNFGRDYIIPKPFDPRLIAQVPPAVAKAAIKSGVARKEILDWQKYEDELYDRMGNDNKVTRLLHNRAKMNPKRIVFAEADHLDVLKAAQIVHDEGMGIPILLGRREVIKELMIELDFDSEEVTIIDPKSDEEKGHLENYANQFWKARQRKGVTLYDAQKLLRERNYFAAMMVQLGDADAMLSGYSRAYPTVVKPILEIIGKLKGVTKVATCNLMNTSKGPIFISDTSINIDPTAKDLAKIAQMTNHTVKMFGMEAIIAMVSYANFGSSKDAHATKVREAVDLLHKVAPDVIVDGELQVDFALNRKMREEKFPFSKLSNRKVNTLIYPTLDSANGTYKLIKELTGEDSIGPIMMGLEKPAHVIQLGASVEEMVNMAAVAIVDAQDKQKRQQMKLEIQ

SEQ ID NO: 5843 - DNA, 2259 bp, Sulfitobacter sp. EE-36
  CDS (1)..(2259): transl_table=11
gtgaccaaaaaccgcatcacgtccgaagaggcgctcgcctttcaccttgaacccacgccgggcaagttcgaaatcaccgcaaccgtcccgatgacgacccagcgggatctgagcctcgcctattcccccggtgttgccgttccctgtgaggcgatcgctgaaaatcccgagctggcatatgactataccaacaagggcaatatggttgcggtgatttccaacggcactgctgttttgggcttgggcaaccttggtgcgctggcgtcgaaaccggtgatggagggtaagtcggtgctgttcaaacggttcgccgacgtgaattcgatcgacgtcgaactggacaccgaagaccccgaggcgttcatcaacgcggtcaagctgatggggccgacgttcggcgggatcaaccttgaggatatcaaggcgccagaatgtttcatcatcgaacagcgtctgaaagaagagatggatattcccgtctttcacgacgaccagcacggcaccgcggtgatctgtgctgccggtctgctgaacgccttgcgcatttcaggcaagaagatcgaagatgtgcagatcgtgttgaacggtgcgggggcggcggggatcgcctgtcttgaactgctcaaggcgatgggggccaagcacaacaactgtatcatgtgcgatacaaaaggtgtgatctatcagggccgtaccgagggtatgaaccagtggaagtcggcccatgccgcgcagaccgagctgcgcacgctggaagaggcgatgaagaacgcggatgtgttcctgggtgtgtcggtcaaaggggcggtaacgcctgcgatggtcgccagcatggcggataatccggtgatcttcgcgatggcgaaccccgatcctgaaatcacgccggaggaagcgcacgaggtgcgccccgatgcgattgtcgccacaggccgcagcgattaccccaatcaggtaaacaacgttttgggctttccttacctgttccgcggggcgctggatatccacgcccgcgccatcaacgacgagatgaagatcgcctgcgcccacgctttggccgatctggcacgcgaagatgtgccggacgaagtggcgctggcctatggcaagaacctgagctttggccgggattacatcatcccgacgccgttcgatccgcgtctgatccatcgtattccgcctgctgttgcacgtgcaggtatggacaccggcgccgcgcggcgcccgatcatcgatatggacgcctacgagctgagcctgaagtcgcggatggacccgacggcgaatatcctgcgcgggatcaacgcccgtgcgcgggccaatcaggcgcggatgatctttgccgaaggggatgaccccaaggttctgcgggcggcggtgatgtatcaacgctccggtctgggcaaggcgctggtggtcggacgtgctgacgacgtaaaggccaagctgacggcggcggggatggaggatgcctaccgcgagcttgaggtcgtgaatgcggccaatacccaacacctagagacgtataagtcattcctttacaatcgcttgcagcgcaaggggtcggacagcaaggatatccaccgtctggccgcccgtgaccgccacgtctttgccgcgctgatgttggcgcacgggcatggcgatggtctggtgaccggtgcaacccgcaaatccgcccatgttcttgaacggctgaaccacgtattcgatgcaaatgcaaaacacggcgccgtcgggatcactgcgctgctgcacaaggggcggatcgtgttcatcggcgatacgctggtgcatgaatggccgaacgaagaagaccttgcgaatattgctgaaaaaggggccaaggtcgcccgccacatggggcttgagccgcgggttgccttcgtcagcttctctacctttggctatccggtttccgagcgggcagaaaagatgcagcgcgcccccgatgtgctggatgcacgaggggttgatttcgaatacgaaggcgaaatgaccgtggatgtggcgctgaatgccgaaagccagaagaactatccgttctcgcggctgactgggcctgcgaatatcctcgtcgtgccggcgcggcattcggccagtatctcggtcaaattgatgcaggaaatggcgggcgccacagtaatcggcccgatcctgacggggttggacaagtcgatccagatctgttcgaccacatccaccgcgaatgacatcctgaacatggctattctggcggcctgcaaggttggcgaatga

SEQ ID NO: 5844 - protein, 752 aa, Sulfitobacter sp. EE-36
MTKNRITSEEALAFHLEPTPGKFEITATVPMTTQRDLSLAYSPGVAVPCEAIAENPELAYDYTNKGNMVAVISNGTAVLGLGNLGALASKPVMEGKSVLFKRFADVNSIDVELDTEDPEAFINAVKLMGPTFGGINLEDIKAPECFIIEQRLKEEMDIPVFHDDQHGTAVICAAGLLNALRISGKKIEDVQIVLNGAGAAGIACLELLKAMGAKHNNCIMCDTKGVIYQGRTEGMNQWKSAHAAQTELRTLEEAMKNADVFLGVSVKGAVTPAMVASMADNPVIFAMANPDPEITPEEAHEVRPDAIVATGRSDYPNQVNNVLGFPYLFRGALDIHARAINDEMKIACAHALADLAREDVPDEVALAYGKNLSFGRDYIIPTPFDPRLIHRIPPAVARAGMDTGAARRPIIDMDAYELSLKSRMDPTANILRGINARARANQARMIFAEGDDPKVLRAAVMYQRSGLGKALVVGRADDVKAKLTAAGMEDAYRELEVVNAANTQHLETYKSFLYNRLQRKGSDSKDIHRLAARDRHVFAALMLAHGHGDGLVTGATRKSAHVLERLNHVFDANAKHGAVGITALLHKGRIVFIGDTLVHEWPNEEDLANIAEKGAKVARHMGLEPRVAFVSFSTFGYPVSERAEKMQRAPDVLDARGVDFEYEGEMTVDVALNAESQKNYPFSRLTGPANILVVPARHSASISVKLMQEMAGATVIGPILTGLDKSIQICSTTSTANDILNMAILAACKVGE

SEQ ID NO: 5845 - DNA, 2319 bp, Roseovarius nubinhibens ISM
  CDS (1)..(2319): transl_table=11
ttgtcgtgggggcggggcgcggataaggattgggaaaccgaccttctggaacaagcgaacgacatgtcgaaacccaagtttacccgcgaagaggcgctggcctttcaccttgagccgacgcccggcaagttcgagatcaccgccacggtcccgatgaccacgcagcgcgatctcagcctggcctattcgcccggcgtggcggtgccctgcgaggcgatcgcggcggcgcccgagacggcctatgattataccaacaagggcaatctcgttgcggtgatttccaacggcacggcggttctgggtcttggcaatctcggggcgctcgggtccaagccggtgatggagggcaaggcggttctgttcaagcgcttcgcggatgtgaacagcatcgatatcgagctcgacaccgaggatccggagaagttcatcgaggcggtgcggttgatgggaccgacgttcggggggatcaacctcgaagatatcaaggcgccggaatgtttcatcatcgagcagcggctcaaggaggtgatggatattccggtgttccatgacgatcagcatgggacggcggtgatctgtgccgcgggtctgatcaatgcgctgcatctgtcgggcaagaagatcgaggatgtgaagatcgtgctcaacggggcgggggccgcggggattgcctgtatcgagctgctcaagagcatgggggcgcggcatgagaattgcatcgtctgtgacacgcgcggggtgatctatcagggtcgcaccgatggcatgaaccagtggaaatcggcccatgcggtgaagaccgagctgcgcagtctcgaagaggcgatggtgggggcggatgtgttcctcggggtgagtgccaagggcgcggtgacgcaggagatggtcaagagcatggccaaggatccggtgatctttgccatggcgaaccccgatcccgagatcacgccggaagaggcgcatgaggtgcgcagcgatgccatcgtggccaccgggcggagcgattatccgaaccaggtgaacaacgttctgggctttccctatctgtttcgcggggcgctcgacgtgcatgcgcgggcgatcaatgacgagatgaagatcgcctgtgccgaggcgctggcgcggctggcgcgggaggatgtgcccgatgaggtcgacatggcctatgggcgcaagatgagtttcgggcgcgattacatcattccggcaccgttcgatccgcggcttattcatacgattccgccggcggtggcgcgggcctgtatggacacgggtgcggcgcggcggccgattgtcgatatggaggcctatgagctgacgctcaaatcgcggatggacccgacggcgagcatgctgcggtcgatcaatgcgcgggcgcgggcggcgcaggcgcggatgatctttgccgagggcgacgatcccaaggtgctgcgcgcggcggtgcaatatcagcgggccgggttcggcgaggcgctggttgtggggcgcgaggcggatgtgaaggccaagctcgaggcgagcgggcttggcgatgcggtgagcgaattgcagatcgtcaacgccgccaataccgagcatttggcggaatataaggcgtttctctacaagcggctgcagcgcaagggccatgatcggcatgatgtgcaccggctggcggcgcgggatcggcatgtgtttgcctcgctcatgctggcgcatgggcatggcgacgggcttgtcaccggggcgacgcgcaagagttcgcatgtgctcgacctgatcaaccatgtgtttgacgcggatgcggaacatggcgcggtcggcgtcacggcggtgatgcataaagggcgggtcgtgctgattgccgatacgctggtgcatgaatggccggatgagaccgatctcgccaatatcgccgagcggtcggccggggtggcgcggcatctcgggctcgagcctcgggtggcgttcgtcagcttttcgacctttggctatccccggtcggagcggtcggagaagatgcatctggcgcccaatgtgctcgaggcgcggggggtcgatttcgaatttgaaggcgagatgaccgtcgatgtggcgctcaatctgcaggcgcagaagagctatccgttccagcggctcaccgggcctgcgaatatcctcgtggtgccggcgcggcattcggcgtcgatctcagtcaagctcatgcaggagatggcgggggcgacggtgatcgggccgatcctggccggggtcgacaagtcgatccagatctgttcctcgacctcgacggccaatgacatcctcaacatggcggttctggccgcctgcaaggtgggctaa

SEQ ID NO: 5846 - protein, 772 aa, Roseovarius nubinhibens ISM
MSWGRGADKDWETDLLEQANDMSKPKFTREEALAFHLEPTPGKFEITATVPMTTQRDLSLAYSPGVAVPCEAIAAAPETAYDYTNKGNLVAVISNGTAVLGLGNLGALGSKPVMEGKAVLFKRFADVNSIDIELDTEDPEKFIEAVRLMGPTFGGINLEDIKAPECFIIEQRLKEVMDIPVFHDDQHGTAVICAAGLINALHLSGKKIEDVKIVLNGAGAAGIACIELLKSMGARHENCIVCDTRGVIYQGRTDGMNQWKSAHAVKTELRSLEEAMVGADVFLGVSAKGAVTQEMVKSMAKDPVIFAMANPDPEITPEEAHEVRSDAIVATGRSDYPNQVNNVLGFPYLFRGALDVHARAINDEMKIACAEALARLAREDVPDEVDMAYGRKMSFGRDYIIPAPFDPRLIHTIPPAVARACMDTGAARRPIVDMEAYELTLKSRMDPTASMLRSINARARAAQARMIFAEGDDPKVLRAAVQYQRAGFGEALVVGREADVKAKLEASGLGDAVSELQIVNAANTEHLAEYKAFLYKRLQRKGHDRHDVHRLAARDRHVFASLMLAHGHGDGLVTGATRKSSHVLDLINHVFDADAEHGAVGVTAVMHKGRVVLIADTLVHEWPDETDLANIAERSAGVARHLGLEPRVAFVSFSTFGYPRSERSEKMHLAPNVLEARGVDFEFEGEMTVDVALNLQAQKSYPFQRLTGPANILVVPARHSASISVKLMQEMAGATVIGPILAGVDKSIQICSSTSTANDILNMAVLAACKVG

SEQ ID NO: 5847 - DNA, 2262 bp, Oceanicola batsensis HTCC2597
  CDS (1)..(2262): transl_table=11
atgtccaagccgaaatcccggatcacgccggaggacgcgctcgcgttccacctcgaaccgttccccgggaagtgggaggtcacggcgaccgttccgatgacgacgcagcgggatctgtcgctggcctattcgcccggcgtggcggtgccctgcgaggcgatccacgccaacccggagacggcctatgactacaccaacaagggcaacctcgtcgcggtgatctcgaacgggacagcggttctggggctgggcaatctcggcgcgctggcctcgaagccggtgatggagggcaagtcggtcctgttcaagcggttcgcggacgtgaactcgatcgatctcgaactggacaccgaggataccgaggccttcatcaatgcggtcaaactgatggggccgtccttcgggggcatcaacctcgaggacatcaaggcgccggagtgtttcatcatcgagcaacggctcaaggaagagatggacatcccggtctttcatgacgatcagcacggaacggcggtgatctgcgcggcgggcctgatcaacgcgctcaagctgtcgggcaagaacatcgcggagtgcaagatcgtgctgaacggggcaggtgcggcgggcatcgcctgtatcgagctgctcaagcggatgggcgcgacccatgacaactgcatcgtctgcgataccaagggcgtgatctaccaggggcgcaccgaggggatgaaccagtggaagtcggcccatgcggtcaagacggacctccgcacgctcgaggatgcgatggagggggccgacgttttcctgggggtctcggtcaagggcgcggtgacccgcgaaatggtcgagagcatggccaaagatccggtgatcttcgccatggcgaaccccgatcccgagatcacgccggaagaagcacacgaggtgcgcgaggatgccatcgtcgcgacgggtcggtcggactatccgaaccaggtgaacaacgtgctggggttcccctatctcttccgcggggcgctggacatcaatgcccgcgcgatcaacgacgagatgaagatcgcctgcgccgaggcgctggccgaactggcgcgcgaggacgtgccggacgaggttgcgatggcgtacggccggacgctgaccttcgggcgcgactacatcattccgacgcccttcgatccgcgcctgatctatcgcgtgccacccgccgtggcgcgggccggcatggacaccggcgcggcgcggcgcccgatcgtcgacatggaggcctatgaactgagcctcaagtcgcggatggatcccacggcgaacatcctgcgcagcatcaacacccgggcgcgcaacgcgcaggcgcggatgatcttcgccgaaggcgacgatccgcgcgtgctgcgcgcggcggtgatgtaccagcggtccgggctgggcgaggccatcgtggtgggccgggattccgacgtgaaggccaagctggaggccgccgggctgggcgacgccttcgacgagcttcgcgtggtgaacgccgccaagaccgagcatctcgaggaatacaagaccttcctctacgaccggttgcagcgcaagggtcacgatcagatcgacatccaccggctggcggcccgagaccggcacgtcttctcggcgctgatgctggcgcatgggcatggcgacggtctggtcaccggcgcgacgcggaagtcggcgcatgtgctggagctgatcaaccacgtcttcgatgcggacgcggcgcacggggcggccggggtgactgccctgatccacaaggggcggatcgtgctgatctcggatacgctggtgcatgaatggccggacgaggaagacctggccaatatcgcggagcgctgcgccgaggtcgcccgcgacctcgggctggaaccgcgggtggccttcgtcagcttctcgaccttcggctatccggtctcggaacgggccgaaaagatgcatatcgcgccgaaagtgctggaagcgcgcggagtcgatttcgagttcgagggcgaaatgaccgtcgacgtggcgctgaacgcgcgtgcgcgcgagcatttcccttttgcccggctcaccagtaacgccaacgtcctcgtcgtgccggcgcggcattccgccagcatcagcgtcaagctgatgcaggagatggcgggggccacggtcatcgggccgatcctttcgggcgtcgacaagccgatccagatctgctcgaccggatcgaccgtgaacgacatcctcaacatggcgctgctggcggcgagcaaggtgaactga

SEQ ID NO: 5848 - protein, 753 aa, Oceanicola batsensis HTCC2597
MSKPKSRITPEDALAFHLEPFPGKWEVTATVPMTTQRDLSLAYSPGVAVPCEAIHANPETAYDYTNKGNLVAVISNGTAVLGLGNLGALASKPVMEGKSVLFKRFADVNSIDLELDTEDTEAFINAVKLMGPSFGGINLEDIKAPECFIIEQRLKEEMDIPVFHDDQHGTAVICAAGLINALKLSGKNIAECKIVLNGAGAAGIACIELLKRMGATHDNCIVCDTKGVIYQGRTEGMNQWKSAHAVKTDLRTLEDAMEGADVFLGVSVKGAVTREMVESMAKDPVIFAMANPDPEITPEEAHEVREDAIVATGRSDYPNQVNNVLGFPYLFRGALDINARAINDEMKIACAEALAELAREDVPDEVAMAYGRTLTFGRDYIIPTPFDPRLIYRVPPAVARAGMDTGAARRPIVDMEAYELSLKSRMDPTANILRSINTRARNAQARMIFAEGDDPRVLRAAVMYQRSGLGEAIVVGRDSDVKAKLEAAGLGDAFDELRVVNAAKTEHLEEYKTFLYDRLQRKGHDQIDIHRLAARDRHVFSALMLAHGHGDGLVTGATRKSAHVLELINHVFDADAAHGAAGVTALIHKGRIVLISDTLVHEWPDEEDLANIAERCAEVARDLGLEPRVAFVSFSTFGYPVSERAEKMHIAPKVLEARGVDFEFEGEMTVDVALNARAREHFPFARLTSNANVLVVPARHSASISVKLMQEMAGATVIGPILSGVDKPIQICSTGSTVNDILNMALLAASKVN

SEQ ID NO: 5849 - DNA, 2262 bp, Erythrobacter sp. NAP1
  CDS (1)..(2262): transl_table=11
atggctgatgcacccaagggcggctttaccagccgcgaggcgctgttttatcacgagaccggcaggcccggtaagatcgagatcgtcgcaacgaagccgatgacctcgcagcgcgacttgagccttgcctattcgccgggcgtcgcggttccggtcgaagcgatcgccgaagaccccaagcttgccgcacgatacaccgccaaggccaatctcgtcgccgtgatctcgaacgggtccgcgatccttggcctcggcaatctgggcgcgctcgcctccaagccggtgatggaaggcaaggcggtgctgttcaaacgcttcgccgacgtcgattcgatcgatatcgagctcgacaccgaagaccccgaagcctttatcaacgcggttgcgctgatggagccgagctttggcggcatcaaccttgaagacatcaaagcgcccgaatgcttcatcatcgagcaggcgctgcgtgagcggatgaatattccgatcatgcacgatgaccagcacggcactgcgattattaccgcagctggattgctcaacgcctgctatctcaccgaccgcaagatcgaggatgtgaaggtcgtcgtgaatggcgcgggcgcagcggctattgcgtgtaccgctctcgtcaaggcgatgggcgtgcgtcacgaaaacgtgatcatgtgcgatcgcaaaggcccgatcacaccgggccgcgaaggggtcgaccagtggaaaagcgcgcatgcagtccagaccgatgcgacgacactcgaagaagcgctaaaaggtgcggacattttcctcggcctgtcggcggcgggcgctctcaagcctgaatgggttgccgagatggcggacaagccgatcatcttcgcgatggccaacccggtcccggaaatcatgccggacgaagccaaagccgtgcgcgccgatgcgattattgcaaccgggcgcagcgacttcccgaaccaggtcaacaacgtcctcggcttcccgttcatcttccgcggcgcgctcgacgtgcaggcgacgacgatcaacgaggaaatgaaggttgccgccgcaacggcgattgccgaactcgcacgcgaacgcgtgcctgaggaagtggcgagcgcctatggcaagaaccagaagttcggcaccgactacatcatcccggcccccttcgatccgcgcctgatcgaggtggtttcgtctgctgtagccaaggctgcgatggattcgggcgttgcccagaccaccatcgacgatttcgaagcatacggcatttcgctgcgctcgcgcctcaatccgacaacctcggtgctcaccggcgtctacaacgaggccaaggcgaacccgaagcgcatggtctttgccgaagcggaggaggaagtggtgctgcgcgccgcgatccagttccgcgatttcggctacggcacgcccattctcgtgggccggaccaaggcggtgctcgacaagctgcatcagctgagcgtgtccgatcccggcggcttcgagatccagaactcggcagacagcgagcatgtgcccgcgatggtcgactttctctatcagcgtctgcagcgccgcggatacacgcagcgtgacgtgcgacggatggtcaatcaagagcgtaacgtctttgctgctctgctggtcgcgctcggccatggcgatggcatgatatcgggcgtcacgcgtacttatgcgcagaccatgcgcgaagtcagccttgtcctcgacaagaaggcggacgcgcttgcattcggcattcacatgatgattggcaagaaccacacgaccttccttgccgacacgaccatcaatgaacgtcccaccagcgaggaattggcctatatcgccaaggaaaccgctgcggtggcccggcgcatgggccacgagccgcgcgttgcgtttctttcctattcgaccttcggcaatccctcgggtcagtggctcggcaatattcgcgatgcggttgcgatcctcgaccgcgacgggtgcgatttcgaatatgagggcgaaatggctcccgatgccgcgctcaacgataaggtcatggggctttaccccttcagccgactgtcggggccagccaacgtgctgatcatgccggggctgcaatcggccaacctgtccgccaagctcctgcgcgagcttggcgcgaacacgacggtcggaccgatgctgatcggtatggaaaagccggtccagatcgttccgatgactgcagcggcgcccgatcttctcacgctctccgtcctgtcgagcgcagggatcgtcggctaa

SEQ ID NO: 5850 - protein, 753 aa, Erythrobacter sp. NAP1
MADAPKGGFTSREALFYHETGRPGKIEIVATKPMTSQRDLSLAYSPGVAVPVEAIAEDPKLAARYTAKANLVAVISNGSAILGLGNLGALASKPVMEGKAVLFKRFADVDSIDIELDTEDPEAFINAVALMEPSFGGINLEDIKAPECFIIEQALRERMNIPIMHDDQHGTAIITAAGLLNACYLTDRKIEDVKVVVNGAGAAAIACTALVKAMGVRHENVIMCDRKGPITPGREGVDQWKSAHAVQTDATTLEEALKGADIFLGLSAAGALKPEWVAEMADKPIIFAMANPVPEIMPDEAKAVRADAIIATGRSDFPNQVNNVLGFPFIFRGALDVQATTINEEMKVAAATAIAELARERVPEEVASAYGKNQKFGTDYIIPAPFDPRLIEVVSSAVAKAAMDSGVAQTTIDDFEAYGISLRSRLNPTTSVLTGVYNEAKANPKRMVFAEAEEEVVLRAAIQFRDFGYGTPILVGRTKAVLDKLHQLSVSDPGGFEIQNSADSEHVPAMVDFLYQRLQRRGYTQRDVRRMVNQERNVFAALLVALGHGDGMISGVTRTYAQTMREVSLVLDKKADALAFGIHMMIGKNHTTFLADTTINERPTSEELAYIAKETAAVARRMGHEPRVAFLSYSTFGNPSGQWLGNIRDAVAILDRDGCDFEYEGEMAPDAALNDKVMGLYPFSRLSGPANVLIMPGLQSANLSAKLLRELGANTTVGPMLIGMEKPVQIVPMTAAAPDLLTLSVLSSAGIVG

SEQ ID NO: 5851 - DNA, 1242 bp, Pseudoalteromonas tunicata D2
  CDS (1)..(1242): transl_table=11
atgtcagactttagagaacaagctttaaaataccacgccgaacccgttccaggtaaaatcagtattgaattgactaaaccagctgaaacagcaaaagatcttgcgctagcttatagccctggcgttgctgaacctgttcgtgaaatcgcagcaaatccagccgatgcttataaatataccgctaagggcaatttagttgctgttatctcaaatggaactgccattttaggattgggtaatttagggccattagcatctaagcccgtaatggaaggtaaagcactattatttaagcgttttgctggaattgattctatcgatattgaagtaaagcaccgtactaccgaagactttattaatacggttgaaaatattgctgatacatttggcggtattaatcttgaagatatcaaggcacctgaatgttttgaaattgaaaaagcactaattgagcgttgtgatatcccagtatttcatgatgatcagcacggtacagcgattgtgacggctgcaggtatgcttaatgcgttagaagttcaaggcaaaaatctgcacgatgcacaaattgtttgtttgggtgcgggcgctgctgcaattgcatgtatggagttgctaattaaatgtggtgctcagcgtgaacatatttatatgcttgatcgcaaaggtgttattcatacccgtcgtgatgatttaaatgagtataaagaactgtttgcaaataatactgataagcgtaccttgcaagatgtaattaccgatgccgatgtctttgttggtgtatctggccctaatttaatttctgctgatgacttaaagttgatggctgataaaccagtggtatttgcttgttcaaatccagatcctgaaattcatcctgatgaagctaatgctgcgcgtacagatttaattatggcaacaggtcgttctgattatccaaaccaagttaataatgttttgtgttttccgtttatttttcgtggtgcgctcgatgttagggcaaaaaggattaatgatgaaatgaaaattgctgctgtaaatgcaattcgtcaaattgctaaagagcctgtgcctgctgaagtattgcaagctgccggtgtcgattcgttagaatttggcgcacattatattattccaaaaccaatggatccgcgtttgttgccacgtgtagcattagcggtagcgcaagctgccgtagcttcaggtgttgcgcgaattcctttacctgaaaattacatgcagtaa

SEQ ID NO: 5852 - protein, 413 aa, Pseudoalteromonas tunicata D2
MSDFREQALKYHAEPVPGKISIELTKPAETAKDLALAYSPGVAEPVREIAANPADAYKYTAKGNLVAVISNGTAILGLGNLGPLASKPVMEGKALLFKRFAGIDSIDIEVKHRTTEDFINTVENIADTFGGINLEDIKAPECFEIEKALIERCDIPVFHDDQHGTAIVTAAGMLNALEVQGKNLHDAQIVCLGAGAAAIACMELLIKCGAQREHIYMLDRKGVIHTRRDDLNEYKELFANNTDKRTLQDVITDADVFVGVSGPNLISADDLKLMADKPVVFACSNPDPEIHPDEANAARTDLIMATGRSDYPNQVNNVLCFPFIFRGALDVRAKRINDEMKIAAVNAIRQIAKEPVPAEVLQAAGVDSLEFGAHYIIPKPMDPRLLPRVALAVAQAAVASGVARIPLPENYMQ

SEQ ID NO: 5853 - DNA, 1248 bp, Photobacterium sp. SKA34
  CDS (1)..(1248): transl_table=11
atgaccgaagattttcgtcaacaagctctagattaccattctcttcctactcctggaaaaatagccgttgcactgactaagtctgcaaatactgttgaagatcttgctttagcgtatagccctggtgttgctgagcccgttagggaaatcgctcaagatcctgataacgtttataaatataccgcgaaaggtaatatggttgcagtgatcaccaatggtaccgctattttaggtcttggtaatttaggtccgttagcttctaagcctgttatggaaggaaagtcattactttttaagaggtttgctggtattgattcaattgatattgaagtaaaacatcgcactattgatgagttcgttgatactgttgcaaatattgccgatacctttggtggcattaatttagaagatattaaagcgcctgattgctttgagatcgaacaacgcttaattgaacgttgtaatgttcctgtgtttcacgatgatcagcatggtacggcgattgttacagccgctggtatgatcaatgccttagagctacaaggtaaagaaattagtgaagcgatgattgtttgtttgggagcgggggctgctgctgttgcgtgtatggagctattgatcaaatgtggcgcgcaacgtgaaaaaatttatatgctcgatcgtaaaggcgttattcatactcgccgtgatgatataaatgaatataagcagctatttgctaataatacagataagcgcacattagaagatgtgattgcgggggccgatattttcgttggtgtatcaggtcctgatttattacaacctgatgcgctagcgttaatggctgaaaacccaattgtatttgcttgctctaaccctgatcctgaaataaaaccagaattagctcatcaagtcagagatgatttaattatgggaacggggcgatctgattaccctaaccaagtgaataatgttctgtgtttcccgtttattttccgcggtgcattggatgtgcgtgcaagtcaaattaatgatgaaatgaaattagcagccgttcatgcaattagagagttagcgaaagagcctgtaccacaaagtgtgcttgaggcttcgggtgcaccacaccttgaatttgggcgagattatattattccaaaaccgatggatccgcgtttattaccgcgtgttgcaaaagctgtcgcacaagcggctattgattcaggcgtcgcgcgtattgagatgccaatgggttatatggaagtttaa

SEQ ID NO: 5854 - protein, 415 aa, Photobacterium sp. SKA34
MTEDFRQQALDYHSLPTPGKIAVALTKSANTVEDLALAYSPGVAEPVREIAQDPDNVYKYTAKGNMVAVITNGTAILGLGNLGPLASKPVMEGKSLLFKRFAGIDSIDIEVKHRTIDEFVDTVANIADTFGGINLEDIKAPDCFEIEQRLIERCNVPVFHDDQHGTAIVTAAGMINALELQGKEISEAMIVCLGAGAAAVACMELLIKCGAQREKIYMLDRKGVIHTRRDDINEYKQLFANNTDKRTLEDVIAGADIFVGVSGPDLLQPDALALMAENPIVFACSNPDPEIKPELAHQVRDDLIMGTGRSDYPNQVNNVLCFPFIFRGALDVRASQINDEMKLAAVHAIRELAKEPVPQSVLEASGAPHLEFGRDYIIPKPMDPRLLPRVAKAVAQAAIDSGVARIEMPMGYMEV

SEQ ID NO: 5855 - DNA, 1248 bp, Oceanospirillum sp. MED92
  CDS (1)..(1248): transl_table=11
atgtctgaagatatgaaacaagccgctcttgattaccatgagtttccgcgcccgggtaaaatcagcgtggaactttctacagaggctgaatctcagcttgacctttctctggcgtacagcccgggtgtagcggagccggttcgtgagatcgcaaaggatcctgaaaatgcataccgttacacggcaaagggtaacctggtcgcagtaatttctaacggctctgcaattctgggtctgggcgacttaggtcctctggcatccaagcctgttatggaaggtaaggctctgttgttcaagcgttttgctggccttgattctattgatatcgaagttgatgctgagagtccgcaggcttttatcgacacagtagcacgcattgcagatacttttggtggtatcaacctagaagatattaaggcaccagagtgctttgagatcgagcgtgttctgattgagcgttgtaatattccagtattccatgatgatcagcacggtacagcgattgtaacggctgccggcatgatcaatgctctggaaattgcaggtaaaaaactggaagaggcatctatcgtatgtctgggcgcaggtgctgccgctcacgcatgtatgaagcttctggttaatatgggcgctaaagtagaaaatatctacatgattgatcgtacgggtgttatccactctggtcgtgaaaatctgacgcctgagaaagcggcgtttgcatctgaaactgataagcgtactctggacgatgcaattgatggcgctgacgtatttgttggcctgtctggtcctaacctgctatcaggtgagcagctttccaagatggccgctaacccggttgtatttgcgtgcgcaaaccctgacccagagattcgtcctgaacttgctcacgaaacgcgtgatgatgtaatcatggcaacaggtcgttcagacttccctaaccaggtgaacaatgttcttggcttcccattcatcttccgtggtgcgatggatgttcgcgcaacggcgatcaacgaagagatgaaagctgcggcggtgcgtgcattggctgagctggctaaagagcctgtaacgcaggaagtactggatgcttacggtctggattctctggaattcggtagtgactacatcattccaaaagcgactgattcccgtctgctaggcgcggtttcaactgcagttgctcaggcagctatcgatacaggtgttgctcgactgccactaccagacaattacccactgtcttaa

SEQ ID NO: 5856 - protein, 415 aa, Oceanospirillum sp. MED92
MSEDMKQAALDYHEFPRPGKISVELSTEAESQLDLSLAYSPGVAEPVREIAKDPENAYRYTAKGNLVAVISNGSAILGLGDLGPLASKPVMEGKALLFKRFAGLDSIDIEVDAESPQAFIDTVARIADTFGGINLEDIKAPECFEIERVLIERCNIPVFHDDQHGTAIVTAAGMINALEIAGKKLEEASIVCLGAGAAAHACMKLLVNMGAKVENIYMIDRTGVIHSGRENLTPEKAAFASETDKRTLDDAIDGADVFVGLSGPNLLSGEQLSKMAANPVVFACANPDPEIRPELAHETRDDVIMATGRSDFPNQVNNVLGFPFIFRGAMDVRATAINEEMKAAAVRALAELAKEPVTQEVLDAYGLDSLEFGSDYIIPKATDSRLLGAVSTAVAQAAIDTGVARLPLPDNYPLS

SEQ ID NO: 5857 - DNA, 2313 bp, Flavobacteria bacterium BBFL7
  CDS (1)..(2313): transl_table=11
atgagtaaagatagcaagagacgtgaagcacttgtgtaccacgcaaagcctacaccaggtaaaataaaagtagttcctactaagaagtatagtagccaaagggatctctcattggcctacagtccaggcgtggcagagccttgtcttgaaatagcaaaggataaagcaaatgtttataaatacaccacaaaagggaatctagtagctgttataactaatggtacagcagttctaggtctaggagatataggtccagaagcttctaaacctgttatggaaggtaaaggtcttctttttaagatttttgcagacatagactgttttgacattgagatcgatactaaaaatgttgatgagtttattcaaacggtaaaaaacattgcacctactttcggaggtattaatctggaagacattaaagcaccagaagcttttgaaattgaaaagagattaaaagaggaactggatattccagtaatgcacgatgatcaacatggtacagccattatatctagtgcagcattattgaatgctctagagattgctgacaagaaaattgaagatgtaaaaattgttattagtggtgctggtagtgccgcaatctcttgtacaaatctgtatgcaaaactaggtgctcgtaaagagaatatcctcatgtttgatgttgatgggttgattacaacctctcgaacagatttaggtcctgaacagatggagtttgctagagatatggatcctattacgttagtagatgcatttaaaggagcagatgtttttctgggactatctgtaggtaatattgtgtcgccagccatgttgctagatatgaatgaaaatcctatcgtatttgcaatggcaaatccgaatcctgagattgaatatgacacagcgatagccactcgcgaagatttaataatggcaacaggtcgtagcgatcatcctaatcaagtaaataacgttttaggttttccatttatttttagaggtgcattagacgtgcgcgcttctaagattaatgaagaaatgaagttagcagcttgtcatgccattgcacagctagcaaaagagccagtaccagagcaagttaatattgcttatggtgagacaaagctcaactttggtagagaatatataattcctaagccttttgatccacgattgatttctactattccaccagcggtggcgagagcggcaatggaaagcggtgtggctatggaacctatacaagactgggaaaaatatgaagatcagctgttgtctagaatgggatcagataataagcttatccgtttaatattaaaccgtgcgcgtactaatcctaagcgtattgtttttgctgaggctgacaatctagatgttataaaagcagcgcaaattgttcatgaagatggaatcgcaactcccattttgctaggaaggcgagatgtgatcgaagagttgatgacagaaattgattgggatgataaaattttaattatcgacccaaaatctgatgaagagaaaccacgtaaagatcgatatgcaaacgagctatggcaaatgcgcgctcgtaaaggtgtgacagaatttgatgctgggaaattaatgagacagcgtaattactttgctgcaatgatggtaaaactgggtgatgcagatgcagttatcacaggtgttgcgcaatcttttcctatatctgttaagcctatgatggaaattataggtaaatctcctggagtacaaaaagtcgctaccactaatttgatgattacagatcgcggacccatttttgtctctgacacttcgattaatatcaatccggatgctacagagttggctaagattgctcaaatgaccgcacgaacagctcgtatgtttggaatagatccagcggttgccatgataagttatgcaaactttggttcttcagatcatccacatgctcgtaaagtgacagaggctgttaattatcttcatagatactatccagatatcactgttgacggagagattcaagcagattttgctttaaatccagagctgcttaaaaagaagtttccattttctaagctggctggtaagaaagtgaatacgttggtgtttccaaatctagaaagtgctaactcaacttataagttaattaaagaactctacaatacagactctataggacctataatgatgggaatgcaaaaacctgttcacatcctgcaacttaatgcaagtgtagatgaaattgtgaatatggcagcagtggctgtaattgacgcgcagcaaaaggagaaacacgaacaaaagagggaacaagccactagaaacagtgcaaattaa

SEQ ID NO: 5858 - protein, 770 aa, Flavobacteria bacterium BBFL7
MSKDSKRREALVYHAKPTPGKIKVVPTKKYSSQRDLSLAYSPGVAEPCLEIAKDKANVYKYTTKGNLVAVITNGTAVLGLGDIGPEASKPVMEGKGLLFKIFADIDCFDIEIDTKNVDEFIQTVKNIAPTFGGINLEDIKAPEAFEIEKRLKEELDIPVMHDDQHGTAIISSAALLNALEIADKKIEDVKIVISGAGSAAISCTNLYAKLGARKENILMFDVDGLITTSRTDLGPEQMEFARDMDPITLVDAFKGADVFLGLSVGNIVSPAMLLDMNENPIVFAMANPNPEIEYDTAIATREDLIMATGRSDHPNQVNNVLGFPFIFRGALDVRASKINEEMKLAACHAIAQLAKEPVPEQVNIAYGETKLNFGREYIIPKPFDPRLISTIPPAVARAAMESGVAMEPIQDWEKYEDQLLSRMGSDNKLIRLILNRARTNPKRIVFAEADNLDVIKAAQIVHEDGIATPILLGRRDVIEELMTEIDWDDKILIIDPKSDEEKPRKDRYANELWQMRARKGVTEFDAGKLMRQRNYFAAMMVKLGDADAVITGVAQSFPISVKPMMEIIGKSPGVQKVATTNLMITDRGPIFVSDTSININPDATELAKIAQMTARTARMFGIDPAVAMISYANFGSSDHPHARKVTEAVNYLHRYYPDITVDGEIQADFALNPELLKKKFPFSKLAGKKVNTLVFPNLESANSTYKLIKELYNTDSIGPIMMGMQKPVHILQLNASVDEIVNMAAVAVIDAQQKEKHEQKREQATRNSAN

SEQ ID NO: 5859 - DNA, 1260 bp, Oceanobacter sp. RED65
  CDS (1)..(1260): transl_table=11
atgtcagattttaaacaagacgctcttgattaccacgcgaatcctaaaccagggaaaatcagcgttgaactcactactgcagctgactctgcacgcgatttgtctcttgcttacagcccaggtgtagcagagccggtcaaggccatcgctgaggatccagaaaacgcatacaagtatactgcgaagggcaaccttgtagcagtaatcaccgacggaagcgccattcttggtttgggtaacctaggccccttagcctctaagccggtgatggaaggtaaatctctattattcaaacgttttgcgggtattgactctattgacgttgaagttgaatctgaaagtccacaagccttcattgatactgttcgccgtatcgcgaacacttatggcggtatcaatttagaagatattaaagcgcctgagtgttttgaaattgaacgcactttgattgagcaatgtaatatcccagtattccatgatgaccaacacggtacagcgattgtaaccgtagcaggcatgttgaatgctctcgaaattcaaggtaagaaagtagacgaagccaaaatggttgtattaggcgcaggcgccgcggcaatctcttgtgccaaactattgattcttgctggcatgaaaccagaaaacatcttcatgtgtgaccgcaaaggtgttattcactctggtcgtgatgatctaaaccagtataaagcaatgttcgcagttgatacggacaagcgtacctttgaagaagcacttgaaggtgctgatatcttcctaggtctatccggtcctgacatggtaactggtgagcaaatcaagactatggcagaaaatcctgtggtatttgcttgcgctaacccagttcctgaaatcatgcctgagattgttgctgaagttcgtccagacgccattatggcaactggccgttcagacttcccgaaccaagtgaacaatgtattgggcttcccattcatcttccgcggtgcactggatgttcgttctcgtgctattaacgaagaaatgaagttggcagcagccaaggcattggcagacttagctcgtgagccagttacacaagaagtactagatgcatatgagctagatagtcttgagtttggtaaagattacatcattccaaaagccgtcgattcacgcttattgggtgcagtatctaccgcggtagcgcaggcagcgattgatactggtgttgctgatggtccattaccagctaactacccacttaaatcgatttctgatatctaa

SEQ ID NO: 5860 - protein, 419 aa, Oceanobacter sp. RED65
MSDFKQDALDYHANPKPGKISVELTTAADSARDLSLAYSPGVAEPVKAIAEDPENAYKYTAKGNLVAVITDGSAILGLGNLGPLASKPVMEGKSLLFKRFAGIDSIDVEVESESPQAFIDTVRRIANTYGGINLEDIKAPECFEIERTLIEQCNIPVFHDDQHGTAIVTVAGMLNALEIQGKKVDEAKMVVLGAGAAAISCAKLLILAGMKPENIFMCDRKGVIHSGRDDLNQYKAMFAVDTDKRTFEEALEGADIFLGLSGPDMVTGEQIKTMAENPVVFACANPVPEIMPEIVAEVRPDAIMATGRSDFPNQVNNVLGFPFIFRGALDVRSRAINEEMKLAAAKALADLAREPVTQEVLDAYELDSLEFGKDYIIPKAVDSRLLGAVSTAVAQAAIDTGVADGPLPANYPLKSISDI

SEQ ID NO: 5861 - DNA, 1236 bp, Desulfitobacterium hafniense DCB-2
  CDS (1)..(1236): transl_table=11
atgtctttaagggagaatgccctaaaacttcatgctgatcatcgcggtaaaatcaagattgcgcttaaagttccctgccgtgattataatgatttgagtttagcctattcaccgggggtagctgaaccttgtatggagattgcccaagatcctgaattggtgaatacctacacgaaccgggctaattgtgtggcagtcgtgtccaatgggacagcagtccttggtcttggcgatataggtgcacgtgcagccatgcctgttatggaagggaaatcccttttgttcaaaaattttgctggggtagactctttccccatttgcttagatacaaagaatattgacaagattgttgaagtggtcaaattactggagcctacctttggagggatcaatctggaggatattaaagctcctgagtgctttgagattgaggaaaagctgaaagcagtctatgatggcccggtattccatgatgatcagcatggtacagctgttgtgaccctggccgcgatgtttaatgccttgaaaatagtcaacaaggagctgaaagatgtcaagatcgtaaccagcggagccggtgcagccggcatggctattgttaagctgctgatggattgcggtcttcaaaatgtcatcatgtgtgataccaaggggacgatttataagggtcgtgccgaagggatgaataagtataaagaggaaatcgctttaaggaccaatcccgccatggttaaaggcagccttggggaagctttgaaaggcgccgacgtatttatcggcatctctgtaggcaatacggtgactcaggaaatgattcgcaccatggccaaagatgcgattgtctttgctcaggctaatccggttcctgaaatcatgcctgaagaagcaaaagaggcgggggcagctgtaataggaacaggccgttccgactaccccaaccaaattaacaatattctctctttccccggaattttccgtgggacctttgatgttgaagcgagagaaatcaatgggccaatgaaaattgccgctgcggaagcaattgcttccattgtcagccctgaggagctcagtgcagagtatatcattccgaaagccttcgacaagcgggtggcacctgctgtagccgcagctgtagccaaagcggccatggagagcggtgtggcaaaaaggaaggtcgatccagagcaggttgctctgaatttaaccagcttacttgcccaagagggcaaataa

SEQ ID NO: 5862 - protein, 411 aa, Desulfitobacterium hafniense DCB-2
MSLRENALKLHADHRGKIKIALKVPCRDYNDLSLAYSPGVAEPCMEIAQDPELVNTYTNRANCVAVVSNGTAVLGLGDIGARAAMPVMEGKSLLFKNFAGVDSFPICLDTKNIDKIVEVVKLLEPTFGGINLEDIKAPECFEIEEKLKAVYDGPVFHDDQHGTAVVTLAAMFNALKIVNKELKDVKIVTSGAGAAGMAIVKLLMDCGLQNVIMCDTKGTIYKGRAEGMNKYKEEIALRTNPAMVKGSLGEALKGADVFIGISVGNTVTQEMIRTMAKDAIVFAQANPVPEIMPEEAKEAGAAVIGTGRSDYPNQINNILSFPGIFRGTFDVEAREINGPMKIAAAEAIASIVSPEELSAEYIIPKAFDKRVAPAVAAAVAKAAMESGVAKRKVDPEQVALNLTSLLAQEGK

SEQ ID NO: 5863 - DNA, 1278 bp, Vibrio sp. Ex25
  CDS (1)..(1278): transl_table=11
atgtctgaagacaatcgccaagcagccactccagaagaagaacatcgccaaaaagcattggattaccatgcttatccaaccccagggaagattgctgtcgaattgacaaagcctgcggaaacggcgggtgatcttgcccttgcttacagccctggtgttgcagaaccagtgcgtgagatcgcacaaaaccctgataacgtgtacaagtacacagcgaaaggcaacatggttgctgttatttctaacggtaccgctattttaggtctaggtaacctaggtccacttgcatctaagccagtaatggaaggtaaagcgttactgtttaagcgttttgctggccttgactcgattgatattgaagttaagcaccgcacgatcgatgaatttgttgatactgtcgcaagcattgcagacacctttggtggtatcaaccttgaagatattaaagcaccagattgctttgagattgaaaagcgtttaattgagcgttgtgatgtaccagtattccacgatgatcagcacggtactgcgattgtaacggcggcaggcatgctgaacgcgatcgaacttcaaggtaagaagcttgaagactcaacgatcgtttgtcttggcgctggcgctgcagctgttgcgtgtatggagctgctgattaaatgtggtgcaatgcgcgaaaaaatttacatgctggatcgtaaaggtgtgatccacactcgtcgtgatgatcttaatgaatacaagcagctattcgcaaacaacacggacaaacgcacattagaagatgtgattgaaggcgcggatctgttcctaggtgtatctggtccaaacctattgccagcggaagcgttgaagctgatggcagataagccaatcgtatttgcatgttcgaatccagatcctgaaattaagcctgaacttgcccacgctgttcgtgatgatttgatcatgggtactggccgtagtgattacccgaaccaagtaaacaacgtattatgtttcccattcatcttccgtggtgctcttgatgtgcgcgcaagtgaaatcaatgatgaaatgaaacttgcagccgttgaggcgattcgtgagctagcaaaagagcctgtacctgaaactgtattgaaggccgcaggcgtcgataagcttgagtttggtgcagactacatcattccaaaaccaatggactcacgtttactaccacgtgttgcaaaagctgtggctcaggcggcagttgattcaggtgttgctcgtatcgagatgcctgaaaactacatggcagagtaa

SEQ ID NO: 5864 - protein, 425 aa, Vibrio sp. Ex25
MSEDNRQAATPEEEHRQKALDYHAYPTPGKIAVELTKPAETAGDLALAYSPGVAEPVREIAQNPDNVYKYTAKGNMVAVISNGTAILGLGNLGPLASKPVMEGKALLFKRFAGLDSIDIEVKHRTIDEFVDTVASIADTFGGINLEDIKAPDCFEIEKRLIERCDVPVFHDDQHGTAIVTAAGMLNAIELQGKKLEDSTIVCLGAGAAAVACMELLIKCGAMREKIYMLDRKGVIHTRRDDLNEYKQLFANNTDKRTLEDVIEGADLFLGVSGPNLLPAEALKLMADKPIVFACSNPDPEIKPELAHAVRDDLIMGTGRSDYPNQVNNVLCFPFIFRGALDVRASEINDEMKLAAVEAIRELAKEPVPETVLKAAGVDKLEFGADYIIPKPMDSRLLPRVAKAVAQAAVDSGVARIEMPENYMAE

SEQ ID NO: 5865 - DNA, 1242 bp, Alteromonadales bacterium TW-7
  CDS (1)..(1242): transl_table=11
atgtcagactttcgtgaacaagcactacactatcattcgcatcccgttccaggaaaaattagcattgaactaacaaagcctgctgaaacggtaaaagatctcgcattagcatatagcccaggagttgcagaacccgtacgtgaaatcgctgcagatcctgcaaacgcttataaatacacaggcaaagggaatatggttgcggttatcactaatggtactgcaattttaggcttaggtaatttaggcccacttgcttcaaaacctgtaatggaaggtaaggcgttactgtttaagcgatttgctggccttgattctattgatatcgaagtgaaacaccgcactactgaagactttattaatacagttgctaatattgccgacacgtttggcggaattaaccttgaagatattaaggcgccagagtgttttgaaatagaaaaagcattgattgagcgttgcagtattccgatatttcatgatgatcagcacggtacagccattgtaactgctgcgggtatgttgaacgcgcttgaggtgcaaggcaagtctatcgaaaatgcgactattgtgtgtttgggtgctggtgctgctgcggttgcttgtatggagctgttaattaagtgtggtgctttgcgcgagcacatttatatgcttgaccgtaaaggtgttattcatactcgtcgtgatgacttaaatgaatacaaaaaactttttgctaacaatacagacaagcgcacgttgcaagatgttattgaagatgcagatgtatttgttggtgtatcggggcctaatctattagctgccgatgatttaaaattaatggcagaaaaaccagttgtgtttgcttgttcaaacccagatccagaaattgatcctgcactggctcattctgctcgaaacgatctaattatggcaacgggtcgatcagattaccctaaccaagttaataatgtactgtgttttccgtttatattccgcggtgctcttgatgtacgcgccagtgcaataaatgatgaaatgaaaattgcagctgtagaagcgattagaagtattgccaaagagcctgtacctgctgaagtactgacggctgcgggtgttgataagctggagtttggtgataagtatattattccaaaaccaatggatcctcgtttattaccacgcattgcaaaagcggttgcaatagctgctgtagagtcaggtgttgcacaaattgatttaccagaaaactatatggaataa

SEQ ID NO: 5866 - protein, 413 aa, Alteromonadales bacterium TW-7
MSDFREQALHYHSHPVPGKISIELTKPAETVKDLALAYSPGVAEPVREIAADPANAYKYTGKGNMVAVITNGTAILGLGNLGPLASKPVMEGKALLFKRFAGLDSIDIEVKHRTTEDFINTVANIADTFGGINLEDIKAPECFEIEKALIERCSIPIFHDDQHGTAIVTAAGMLNALEVQGKSIENATIVCLGAGAAAVACMELLIKCGALREHIYMLDRKGVIHTRRDDLNEYKKLFANNTDKRTLQDVIEDADVFVGVSGPNLLAADDLKLMAEKPVVFACSNPDPEIDPALAHSARNDLIMATGRSDYPNQVNNVLCFPFIFRGALDVRASAINDEMKIAAVEAIRSIAKEPVPAEVLTAAGVDKLEFGDKYIIPKPMDPRLLPRIAKAVAIAAVESGVAQIDLPENYME

SEQ ID NO: 5867 - DNA, 1263 bp, marine gamma proteobacterium HTCC2143
  CDS (1)..(1263): transl_table=11
atgtctacagatttcaagcaagccgctctggattatcactcacaacctaagccggggaaaatttctgttgaattgagtacggcagctgctactcaaagcgatttggcgttggcctacagtccgggcgttgctgagccagtgctggcaattgccgagaatcccgagcgcgcttacgattataccgttaaaggtaatctggttgcggttatttctaatggcacagctattctcggtcttggtgatttaggagcattggcaagtaaaccggtgatggaaggcaaggccttgctattcaagcgctttgccggcataaattcaattgatattgaagtcgataccgcagatccgacggaatttattgataccgtggcgcgtattgccgatacttttggtggcattaatctagaagatattaaggctccagagtgctttggtattgaggctgcgttgattgagcgatgcaacgttccggtctttcacgatgaccagcacggtaccgcaattgtgacggcagcgggaatgctcaatgctctcgacattcaggggaaaaagctagaaaccgcaagaatagtttgtttgggcgctggctcagctgctgtcgcctgtatgcgtttgctgagaggcatgggtgcggcaaaagacaatatcactatgcttgaccggcgaggtgtcatctacaccggtcgagaggggcttaatgagttcaaagaagagtttgctcatagcactaaaaatcgtactctagcggacgctatgaaagacgctgatgtatttgtgggtttgtcaggggctaatttgttaagcccagatttgttgaaaacgatggctccaaacccggtggtttttgcctgctctaatcctgaccccgagattagccccgaaattgccaatgctactcgagatgatttgattatggcgaccggtcgctctgactatccgaatcaggtgaataatgtcttagggtttccctttatttttcgcggtgccctagacgtgcgagcgacgtgtattaatgaagccatgaaagtggctgcggtaaatgcgctgcgcgaactggccaaagagcctgtacctcaagtcgttttagatgcctgcggtgttgaatcgctggaatatggctcgggttacattatccctaaaccggtagacgagcgtctgttgggtaaagtatcggcggcggttgcaaaggctgcgattgattcgggcgtcgctaaattgggctatcccagcaactatccgctcaaaacacctgccgacgtataa

SEQ ID NO: 5868 - protein, 420 aa, marine gamma proteobacterium HTCC2143
MSTDFKQAALDYHSQPKPGKISVELSTAAATQSDLALAYSPGVAEPVLAIAENPERAYDYTVKGNLVAVISNGTAILGLGDLGALASKPVMEGKALLFKRFAGINSIDIEVDTADPTEFIDTVARIADTFGGINLEDIKAPECFGIEAALIERCNVPVFHDDQHGTAIVTAAGMLNALDIQGKKLETARIVCLGAGSAAVACMRLLRGMGAAKDNITMLDRRGVIYTGREGLNEFKEEFAHSTKNRTLADAMKDADVFVGLSGANLLSPDLLKTMAPNPVVFACSNPDPEISPEIANATRDDLIMATGRSDYPNQVNNVLGFPFIFRGALDVRATCINEAMKVAAVNALRELAKEPVPQVVLDACGVESLEYGSGYIIPKPVDERLLGKVSAAVAKAAIDSGVAKLGYPSNYPLKTPADV

SEQ ID NO: 5869 - DNA, 1290 bp, marine gamma proteobacterium HTCC2080
  CDS (1)..(1290): transl_table=11
atgtcaaagcaacttctgaaagatgcactcgattaccatgctttgccggtacccggaaaaatcagtgtcgagctgactaagcctgcagacaccatgcgccacttagccatggcttactcaccaggcgttgctgagccttgtagccagatcgctctagatcctcagctggcataccgttataccggaaaaggcaacagtgttgccgttatatcaaacggaagcgctgttttgggactgggcaacttgggtgctttggccagcaaaccagtgatggagggtaaggccttactgtttaagcgctttgccaacatcaatgctatcgatgttttggtcgacacccaggatgtagacacttttgtaagtaccgttagcgctattgcatgtacctatggcggcattaatcttgaagatattaaagcgcctgaatgttttgagattgagcgcaggctccaagccttgtgtgacatccctattttccacgacgatcaacacggcacggccattgttacggcggcggctttagtcaatgctcttgagatccagcaaaagacactggataacgtcaatgtggtttgcctaggcgcgggcgccgcggcggtcgcatgcatgaagcttttgttggaaatgggtgctgaccctggccgcatgctgatgctcgaccgacagggtgtcattcacgctgggcgcgagaacctcaatgaacaaaaagcgctgtttgctgtcaatacggacaagcggaccctcgacgacgcaatgaaagattgtgatgtatttgttggcctttctggctccgacttggtttctcaggacatggtgaagtccatggcgcctcgtcctattattttcgcttgctccaatcctgacccggaaattaagcgcgaacttgctatggcgactcgcagcgatattgtcatggcgacgggccggtctgatctgcctaatcaggtcaataacgttctggggtttccctttattttcaggggtgcgttagatgtacgggcgtccaccattaacgaggcaatgaaaatcgctacggttaatgcgctggcggaattggcgagagagccagtacccgaatctgttttagatgcttacagtctcatcgacttggagtatggcccgaactacatattgccaaaacctatggatcctaggttgatgcccattattgccccagcggtagcacgggcagcgcaggcttcaggcgttgctcgctgtgctattgatgatgattatgaagagcagctttggggcggcgttgggtttggcactgatcgcaactggcgctaa

SEQ ID NO: 5870 - protein, 429 aa, marine gamma proteobacterium HTCC2080
MSKQLLKDALDYHALPVPGKISVELTKPADTMRHLAMAYSPGVAEPCSQIALDPQLAYRYTGKGNSVAVISNGSAVLGLGNLGALASKPVMEGKALLFKRFANINAIDVLVDTQDVDTFVSTVSAIACTYGGINLEDIKAPECFEIERRLQALCDIPIFHDDQHGTAIVTAAALVNALEIQQKTLDNVNVVCLGAGAAAVACMKLLLEMGADPGRMLMLDRQGVIHAGRENLNEQKALFAVNTDKRTLDDAMKDCDVFVGLSGSDLVSQDMVKSMAPRPIIFACSNPDPEIKRELAMATRSDIVMATGRSDLPNQVNNVLGFPFIFRGALDVRASTINEAMKIATVNALAELAREPVPESVLDAYSLIDLEYGPNYILPKPMDPRLMPIIAPAVARAAQASGVARCAIDDDYEEQLWGGVGFGTDRNWR

SEQ ID NO: 5871 - DNA, 1278 bp, Pseudomonas putida GB-1
  CDS (1)..(1278): transl_table=11
atgcccaccatgtcagacctgaaaaccgccgctctcgaatatcacgctcaacctcgtccggggaaactgagcgtcgaactctccaagcccactgccaccgcccgtgacctcgccctggcctacagcccaggtgttgcagagccggtacgcgaaattggccgtgatccagagctggcttacaaatacaccggcaaaggcaacctggttgcggtgatttccgatggcaccgccatcctcggtctgggtgacctcggcccactggcttccaagccggtcatggaaggcaagggtgttctgttcaagcgtttcgctggtatcgatgtattcgacatcgaggtcgagtcggaaagcccgcaagcgttcatcgacaccgtccgccgcatttcgatcaccttcggtggcatcaaccttgaagacatcaaggcccctgagtgcttcgaaatcgagcgcaccttgatcgagcagtgcgacatcccggtgttccacgatgaccagcacggtaccgccatcgttaccgccgccggcatgatcaacgccctggaaatcgccggcaagaagctggaagacgccaagatcgtctgcctcggcgccggcgctgccgccatctcctgcatgaagctgctggtgagcatgggtgccaaggtcgagaacatctacatgatcgaccgtagcggcgtgatccacgctggccgtgacgacctgaaccagtacaaggcgcagttcgcccacgctactgacaagcgcactctggccgatgcccttgacggtgccgacgtgttcgtaggtctgtccggcccgaacctgctgagcccggaaggcctgaagtcgatggctgccaacccaatcgtgttcgcctgctcgaacccggatccggaaatctcgccagagctggcgcacgccactcgcagcgacgtgatcatggctaccggtcgttccgactacccgaaccaggtcaacaacgtactgggcttcccgttcatcttccgtggtgccctggacgttcgcgccaagcgcatcaacgaagaaatgaagatcgccgctgctatcgccctgaaagacctggccaagctgccagtgcctaaggaagtgtgcgaagcctacggtgtcgaaggcctggagttcggtcgtgagtacatcattccgaagccgctggacgcacgcctgatcaccgtcgtttccgacgccgtggccaaggccgccatcgaatccggtgtggctaccctgccgtatccgaagcactacccgctgaccagcgtggatgaagtgttcaacggctga

SEQ ID NO: 5872 - protein, 425 aa, Pseudomonas putida GB-1
MPTMSDLKTAALEYHAQPRPGKLSVELSKPTATARDLALAYSPGVAEPVREIGRDPELAYKYTGKGNLVAVISDGTAILGLGDLGPLASKPVMEGKGVLFKRFAGIDVFDIEVESESPQAFIDTVRRISITFGGINLEDIKAPECFEIERTLIEQCDIPVFHDDQHGTAIVTAAGMINALEIAGKKLEDAKIVCLGAGAAAISCMKLLVSMGAKVENIYMIDRSGVIHAGRDDLNQYKAQFAHATDKRTLADALDGADVFVGLSGPNLLSPEGLKSMAANPIVFACSNPDPEISPELAHATRSDVIMATGRSDYPNQVNNVLGFPFIFRGALDVRAKRINEEMKIAAAIALKDLAKLPVPKEVCEAYGVEGLEFGREYIIPKPLDARLITVVSDAVAKAAIESGVATLPYPKHYPLTSVDEVFNG

SEQ ID NO: 5873 - DNA, 1269 bp, Pseudomonas putida GB-1
  CDS (1)..(1269): transl_table=11
atgagtctcaaaaacgacgctctcgaataccacgcccagccacgaccaggaaaactcagcgtagagctttcgaagcctaccgccaccgcccgggacctatctttggcctacagcccaggtgttgcagagccagtacgtgaaattgctcgtgatgctgagttggcctacaggtacaccggcaagggcaatctggtcgcggtgatttccgatggcaccgccatcctcggtctgggtgacctcggcccactggcttccaagccggtcatggaaggcaagggtgttctgttcaagcgtttcgccggtatcgatgtgttcgacatcgaagtcgagtcggaaagcccacaagcgttcatcgacaccgttcgccgcatttcgatcacctttggtggcatcaaccttgaagacatcaaggcccctgagtgcttcgaaatcgagcgcaccttgatcgagcagtgcgacatcccggtgttccacgatgaccagcacggtaccgccatcgttaccgccgccggcatgatcaacgccctggaaatcgccggcaagaagctggaagacgccaagatcgtctgcctgggggctggcgctgcagccatctcttgcatgaagctgcttataagcatgggcgcgggcgctagcagtatcctcatggtcgaccgcagcggcgtgatccacgctggccgtgacgacctgaaccagtacaaggtgcagttcgcccacgctaccgacaagcgcaccctggctgacgcccttgacggtgccgacgtgttcgtaggcctgtccggcccgaacctgctgagcccggaaggcctgaagtcgatggcggccaacccgatcgtgttcgcctgctcgaacccggacccggaaatctcgccagagctggcgcacgccactcgcagcgacgtgatcatggctaccggtcgttccgactacccgaaccaggtcaacaacgtactgggcttcccgttcatcttccgtggtgccctggacgttcgcgccaagcgcatcaacgaagaaatgaagatcgccgctgctatcgccctgaaagacctggccaagctgccagtgcctaaggaagtgtgcgaagcctacggtgtcgaaggcctggagttcggtcgtgagtacatcattccgaagccgctggacgctcgcctgatcagcgccgtatccgatgcggtggcacgtgctgcgatcgagtcgggtgtcgcaacgctcccgtacccaacgcactatccgctctcgtctgtctctgaggttttcggcggcaattaa

SEQ ID NO: 5874 - protein, 422 aa, Pseudomonas putida GB-1
MSLKNDALEYHAQPRPGKLSVELSKPTATARDLSLAYSPGVAEPVREIARDAELAYRYTGKGNLVAVISDGTAILGLGDLGPLASKPVMEGKGVLFKRFAGIDVFDIEVESESPQAFIDTVRRISITFGGINLEDIKAPECFEIERTLIEQCDIPVFHDDQHGTAIVTAAGMINALEIAGKKLEDAKIVCLGAGAAAISCMKLLISMGAGASSILMVDRSGVIHAGRDDLNQYKVQFAHATDKRTLADALDGADVFVGLSGPNLLSPEGLKSMAANPIVFACSNPDPEISPELAHATRSDVIMATGRSDYPNQVNNVLGFPFIFRGALDVRAKRINEEMKIAAAIALKDLAKLPVPKEVCEAYGVEGLEFGREYIIPKPLDARLISAVSDAVARAAIESGVATLPYPTHYPLSSVSEVFGGN

SEQ ID NO: 5875 - DNA, 1245 bp, Marinobacter sp. ELB17
  CDS (1)..(1245): transl_table=11
atgactaaaaactttaagcaggccgcgctggactatcactcgaagcccgtccccgggaagatttccactggcctgaccaagcctgcaagtacggtgggcgacctctcacttgcctacagtccgggtgtcgcggagccagtgcgcgaaatcgcccgcgatccggataatgcttacctgtataccgggaaaggcaatctggtcgcggtgattaccaatggcaccgcgattctcgggctcggaaatctggggccgctggccagcaaaccagtaatggaaggcaaggccttgctatttaagcgtttcgcaggcattgactccgttgatatcgaggtcaaggcagataccgcccaggcgtttatcgataccgtcatttccatctcagatacctttggcggcattaacctcgaagacataaaggcacctgagtgtttcgaaattgagcgagttttgattgatcgctgcgatattccagtattccatgacgatcagcatggcaccgccattgtgacggcggcaggtatgctgaatgcattggaaatccagggtaagacgctgaacaccgcaagaattgtctgcttgggagcgggtgcggcggccgttgcctgcatgcgaatgctgttaagtctcggtgcgaaacgagaaaatctgtatatggttgatcgcagaggtgtgatccgctccggcagggaaggtttgaatagctttaaggaaaaatttattaatgatggcggagcaaagacactggacgatgccattgatagcgcagacgtttttgttggattatccgggccggatttgctcaatgctgaacagcttaaacaaatggcaccccggccgatagtttttgcgtgttcgaaccctgaccctgagatttcacccgaactggcaatgtcggttcgggacgacctgattatggctacaggtcgctcagattaccctaatcaggttaacaacgtacttggttttccgttcatttttaggggcgcgctggatgtacgcgctaaacgaattaacgaagccatgaaggttgcagctgtttatgcaattcgagatctggcgaaaaaggaaataccgcaagatgtcctagccgcccatcaactgagagaactgtcttttgggccccactacattattcctaaagccatggactatcggttactgacggaagtgtcagacgcagttgccaaagcggccatcgaatcgggtgttgcacgtttgccctatccttcacactatccgttatag

SEQ ID NO: 5876 - protein, 414 aa, Marinobacter sp. ELB17
MTKNFKQAALDYHSKPVPGKISTGLTKPASTVGDLSLAYSPGVAEPVREIARDPDNAYLYTGKGNLVAVITNGTAILGLGNLGPLASKPVMEGKALLFKRFAGIDSVDIEVKADTAQAFIDTVISISDTFGGINLEDIKAPECFEIERVLIDRCDIPVFHDDQHGTAIVTAAGMLNALEIQGKTLNTARIVCLGAGAAAVACMRMLLSLGAKRENLYMVDRRGVIRSGREGLNSFKEKFINDGGAKTLDDAIDSADVFVGLSGPDLLNAEQLKQMAPRPIVFACSNPDPEISPELAMSVRDDLIMATGRSDYPNQVNNVLGFPFIFRGALDVRAKRINEAMKVAAVYAIRDLAKKEIPQDVLAAHQLRELSFGPHYIIPKAMDYRLLTEVSDAVAKAAIESGVARLPYPSHYPL

SEQ ID NO: 5877 - DNA, 1266 bp, Marinobacter sp. ELB17
  CDS (1)..(1266): transl_table=11
atgtctcaagatctgaaagaagcagcccttgaatatcacgccaagccgcggcctggcaagctgagtgtagaaatcagcaagcccacaaaaacagcccgcgatcttgcactggcatacagtcccggagttgccgagccggtccgcgagatcgcccgtgaccccgaaaacgcctacaaatacaccatgaaaggcaatctggtggcggttatttctgacggctccgcgattttgggcctgggtaatctcggcccactggccagcaagccagtaatggaaggtaagggcgttcttttcaagcgctttgccggtattgatgtatttgatattgaagtcaattctgaaagccctcaggcttttattgaaaccgttgaacgcattgccgatacctttggcggcatcaacctcgaagatatcaaagcgcctgagtgttttgaaatcgagcgagcgctgattgaaaagtgcagcatacctgtattccacgacgatcagcacggtaccgccattgtaacggccgccggcatgcttaacgcgctggaactgcagggcaagaaaattgaagaagccaccattgtgtgcctgggtgccggcgctgccgccattgcctgcatgaagctgctgatcagttgtggtgtgcgttccgagaatatctgtatggtggaccgcaagggtgtgattcactctggccgcgacgatctgaaccagtataaggcgatgttcgccaacgataccgataaacgcactctggacgatgccatcgacggtgctgatgtgtttgtgggtctttccggcccggacttactgagcgctgaacagctcaagaaaatggcacctaacccggttgtattcgcctgttcaaatccggatccggaaattgatccggcgattgcgaacgcagtgcgcgatgacctgatcatggccacgggccgttcagattatcccaaccaagtgaacaacgtgctgggcttccccttcattttccgtggcgcactggatgttcgtgccacagtgattaacgaagagatgaagattgctgcggtaaacgctatccgcgaactggcgaaagagccggtgcctcaagaaatctgcgaagcctacggcgctgacagcttcgagttcggcaggaattacattattccgaagccgatggacgtgcgtttgctggaagtggttccggcggctgttgcccgtgcagcagttgataccggtgtggctcgtaacccatacccggcgcattacccgcttaaatccatggacgatattatttaa

SEQ ID NO: 5878 - protein, 421 aa, Marinobacter sp. ELB17
MSQDLKEAALEYHAKPRPGKLSVEISKPTKTARDLALAYSPGVAEPVREIARDPENAYKYTMKGNLVAVISDGSAILGLGNLGPLASKPVMEGKGVLFKRFAGIDVFDIEVNSESPQAFIETVERIADTFGGINLEDIKAPECFEIERALIEKCSIPVFHDDQHGTAIVTAAGMLNALELQGKKIEEATIVCLGAGAAAIACMKLLISCGVRSENICMVDRKGVIHSGRDDLNQYKAMFANDTDKRTLDDAIDGADVFVGLSGPDLLSAEQLKKMAPNPVVFACSNPDPEIDPAIANAVRDDLIMATGRSDYPNQVNNVLGFPFIFRGALDVRATVINEEMKIAAVNAIRELAKEPVPQEICEAYGADSFEFGRNYIIPKPMDVRLLEVVPAAVARAAVDTGVARNPYPAHYPLKSMDDII

SEQ ID NO: 5879 - DNA, 2265 bp, Erythrobacter sp. SD-21
  CDS (1)..(2265): transl_table=11
atggccgaagaaaagcagaccggtttcaacacgcgcgaagcgctcttttaccacgagacgatccgtcccggtaagatcgagatcatcgccagcaagccgatggcaacgcagcgcgatctcgcgcttgcctattcgcccggcgttgccgcaccggtcgaggcgattgccgcaaatccgcaggatgcggcacgctataccgcccgttccaacctcgtcgcggtgatttccaacggcacggccatcctcggcctcggcaatctcggcgcgctggcgtcgaagccggtgatggaaggcaaggcagtcctgttcaaacgcttcgccgatgtcgattcgatcgacctcgagctcgataccgaggacccggaagccttcatcaacgcggtcgccctgatggagccgagcttcggcggcataaacctcgaagacatcgccgcacccgaatgcttcatcatcgagcaggcgctgcgcgagaagatgaacatacccgtgatgcatgacgaccagcacggcaccgcgatcatttccgccgccggtctcatcaacgcctgccacctgacgggtcgcgatctcgacaccgtcaagatggtggtgaacggcgcaggcgcctcggcgctggcctgtaccgcgctgatcaaggcgatgggcgtccggcacgaaaacgtgatcgtctgcgaccgcgccgggccgatctacccgggccgcgacaatgtcgaccagtggaagagcgcccatgcggtggaaacgccgcaccgcagcctcgaagaagcgctcgagggggcggacgtcttcctcggcctgtccgcggccggtgccctgaagcccgagtgggtcgcgaagatggccgacaagccgatcatcttcgccatggccaatcccgtgcccgagatcatgccggaagacgccaaggcggtgcgccccgatgcgatcatcgccacgggccgttcggactatccgaaccaggtcaacaacgtgcttggcttccccttcattttccgcggcgcgctcgacgtgcaggcgaccgcgatcaacgaggaaatgaagatcgccgccgcgcgcgccatcgccgaactcgcccgcgagcgtgtgcccgaggaagtggccgccgcctatggcgtgacgcatcagttcggcgaggaatacatcatccccgcccccttcgatccgcgcctgatggatgtcgtctcttccgccgtggcgcaggccgcgatggacagcggcgttgcgcagaagccgatcgaggacatggacgcctaccgccaccagctgaaggcgcgtctcaacccgaccaccggcgccctcaccaatatctacgagcaggccaaggccaatcccaagcggatggtgttcgccgaagccgaagaagacgtggccctgcgcgcagccatccagtaccgcgactatggctatggcgaaccgatcctggtgggccgtaccgagaaggttctcgccaagctcaaggagctgggggtcgacgatccggacgactggatcatcgagaactcgaacgtgtcggacaaggtcccggccatggtcgactatctctacaagcgcctccagcgccgcggctataccgagcgcgatgtgggccgcatggtcaaccaggaacgcaatgtcttcgccgccctgctggtggcgctaggacacgggcacggcatggtttcgggtctcacccggaccttcgcccagaccgcacgcgaggtggcccgcgtgatcgatcccaagcccggcgcgacgccgttcggcattcacatgatggtcggcaagaaccagaccaccttccttgccgataccacgataaacgaacgcccgaccgcggccgagctggcgcatatcgccaaggaaaccgccgccgtggcgcggcgcatggggcatgagccgcgcgtcgccttcctgtcctattcgaccttcggcaatccgtccggccagtggctcggcaatattcgcgatgcggtagcgctgctcgatgcggaggagggcctcgatttcgaatacgaaggcgagatggctcccgatgccgcgctcaaccccaaggtgatggcgctttatcccttcagccgcctgtcgggtccggccaatgtcctcatcatgcccggtctccagtcggccaatctctcggccaagctgctgcgcgaactgggcggggaaaccacgatcggcccgatgatgatcggcagcgaaaagccggtgcagattgccccgatgaccgcaatcgcgcccgatctcctgaccctggccgtgctcgcgagcgcgggcgtggtgggctga

SEQ ID NO: 5880 - protein, 754 aa, Erythrobacter sp. SD-21
MAEEKQTGFNTREALFYHETIRPGKIEIIASKPMATQRDLALAYSPGVAAPVEAIAANPQDAARYTARSNLVAVISNGTAILGLGNLGALASKPVMEGKAVLFKRFADVDSIDLELDTEDPEAFINAVALMEPSFGGINLEDIAAPECFIIEQALREKMNIPVMHDDQHGTAIISAAGLINACHLTGRDLDTVKMVVNGAGASALACTALIKAMGVRHENVIVCDRAGPIYPGRDNVDQWKSAHAVETPHRSLEEALEGADVFLGLSAAGALKPEWVAKMADKPIIFAMANPVPEIMPEDAKAVRPDAIIATGRSDYPNQVNNVLGFPFIFRGALDVQATAINEEMKIAAARAIAELARERVPEEVAAAYGVTHQFGEEYIIPAPFDPRLMDVVSSAVAQAAMDSGVAQKPIEDMDAYRHQLKARLNPTTGALTNIYEQAKANPKRMVFAEAEEDVALRAAIQYRDYGYGEPILVGRTEKVLAKLKELGVDDPDDWIIENSNVSDKVPAMVDYLYKRLQRRGYTERDVGRMVNQERNVFAALLVALGHGHGMVSGLTRTFAQTAREVARVIDPKPGATPFGIHMMVGKNQTTFLADTTINERPTAAELAHIAKETAAVARRMGHEPRVAFLSYSTFGNPSGQWLGNIRDAVALLDAEEGLDFEYEGEMAPDAALNPKVMALYPFSRLSGPANVLIMPGLQSANLSAKLLRELGGETTIGPMMIGSEKPVQIAPMTAIAPDLLTLAVLASAGVVG

SEQ ID NO: 5881 - DNA, 2304 bp, unidentified eubacterium SCB49
  CDS (1)..(2304): transl_table=11
atgagtacaccaagtaaaagaagagaagccttattatatcacgctaagccaaaacctggtaagatagaagtagtgcccacaaaaaaatatgccacacaaagagatttgtcattggcttattcgccaggagttgctgtgccttgcctagagatagcaaaagatgtagaaaacgtttataagtatacggcaaaagggaacctggtagcggtaatctctaatggtactgctgttttgggtctagggaatataggtccagaagcttcaaaacctgtaatggaagggaaaggattgctgtttaagatttttgcggatatagatgtctttgatattgaggttgatacagaagatatagacgcttttattgaaactgtaaaaaatatagctcccacttttggtggtatcaatctagaagatattaaagcgcccgaggcttttgagattgaacgaagattaaaagaagagcttgatattcctgtaatgcatgatgaccagcatggaacagcaataatttcggctgctgctttattaaatgccttagagatttcagaaaaaaatataagcgaagtaaagattgttattagtggtgcgggagcagctgcggtttcttgtacaagattgtataaagcatttggagctagtgccgataatattgtaatgatagatagtaaaggtgtgatacgtaaagatcgtgacaatttaacacctgaaaaagctgagtttgctacatcaagaaaaatagatacacttacagaagccatgaaagatgcagatgtatttgtaggattgtctattgcagatattgtaactccagaaatgctaaagtctatggcgcaaaaacccatcgtttttgcaatggcaaatccagatcccgaaatagaatataacctagcgattaaaacacgcaaggatattattatggctacgggccgaagtgatcatcctaatcaagtaaataatgtacttggttttccgttcatttttagaggagcactagatgttcgcgcgacaaagattaatgaagctatgaaaatggcagcagtaaaagcacttgcagatttagcaaaagaagcagtgccagagcaagtgaatattgcatatggagaaacaaaacttaattttggtagagattatattattccaaaaccctttgatccacgtttaattgccaaagtgccgccagcggtagcaaaagctgctatggagagtggtgtcgcgacggctcctattacaaattggcaaaaatatgaagacgagctaaatgagcgcatggggagtgataataagattattaggctcttaatgaatcgtgctaaaacgaacccgaaacgtattgtttttgctgaagcagatcatctagatgtgttgaaggctgcgcagatagtacatgatgaaggtataggtattcctattcttttgggaagaagagatgtgattgaggagctaatggaacaaatagaatatgatagagaggtgactattattgatcctaaaagcgatgaagaggcagctcatagagatcgctatgcagaaaagcattttaaaaacagacagcgtagtggtatcacgtattatgatgctcagagtatgatgagagagcgtaactattttgcatctatgatggtaaatgaaggtgatgcagacgctatgatttctggttattctagagcatatccatctgttgttagacccgttctagaaacaataggtagttatgatggtgtggataaggttgcaaccacaaatatgatgttaactaaacgtggtcctttatttatttcggacacatctattaatattgacccttcggcaaaagaacttgctaaaattgcacagatgacaaactataccatgaaaatgtttggtttaaatcctgtgattgcaatgatctcttatgcaaattttggttcttcaaaagatccacacgctacaaaagtgaaagatgctgttaaatatcttcatcgtactaatccagatatgcatgtggatggtgagttacaaacagattttgcattaaatagtgagttgctgcaaaagaaatttccattttctaaattagcagggaaaaaggtaaatgccttaatattccctaatttagattctgcaaatagtaattacaagttgctaaaagaattgaataatgtggagtctattggtccaattatgttaggaatgcgtaagcctgttcatattttacaattaggtgcaagtgtagaagaaatggtgaatatggcagctgttgccgtagtggattctcagcaaaaagaaaagcgagaaaaagaagcgagcaagtttagggctatgtga

SEQ ID NO: 5882 - protein, 767 aa, unidentified eubacterium SCB49
MSTPSKRREALLYHAKPKPGKIEVVPTKKYATQRDLSLAYSPGVAVPCLEIAKDVENVYKYTAKGNLVAVISNGTAVLGLGNIGPEASKPVMEGKGLLFKIFADIDVFDIEVDTEDIDAFIETVKNIAPTFGGINLEDIKAPEAFEIERRLKEELDIPVMHDDQHGTAIISAAALLNALEISEKNISEVKIVISGAGAAAVSCTRLYKAFGASADNIVMIDSKGVIRKDRDNLTPEKAEFATSRKIDTLTEAMKDADVFVGLSIADIVTPEMLKSMAQKPIVFAMANPDPEIEYNLAIKTRKDIIMATGRSDHPNQVNNVLGFPFIFRGALDVRATKINEAMKMAAVKALADLAKEAVPEQVNIAYGETKLNFGRDYIIPKPFDPRLIAKVPPAVAKAAMESGVATAPITNWQKYEDELNERMGSDNKIIRLLMNRAKTNPKRIVFAEADHLDVLKAAQIVHDEGIGIPILLGRRDVIEELMEQIEYDREVTIIDPKSDEEAAHRDRYAEKHFKNRQRSGITYYDAQSMMRERNYFASMMVNEGDADAMISGYSRAYPSVVRPVLETIGSYDGVDKVATTNMMLTKRGPLFISDTSINIDPSAKELAKIAQMTNYTMKMFGLNPVIAMISYANFGSSKDPHATKVKDAVKYLHRTNPDMHVDGELQTDFALNSELLQKKFPFSKLAGKKVNALIFPNLDSANSNYKLLKELNNVESIGPIMLGMRKPVHILQLGASVEEMVNMAAVAVVDSQQKEKREKEASKFRAM

SEQ ID NO: 5883 - DNA, 1242 bp, Moritella sp. PE36
  CDS (1)..(1242): transl_table=11
atgtcagactttagacagcaagcattagattatcacgcgaaccctaaaccaggtaaaattgctattcaacttactacatcagcagaaaccgccgatgatctttctctagcatatagcccgggtgtcgcagaaccagtgcgtgaaattgctgctaatcctgatgatgcttacaaatatacggctaaaggtaacttagtggcggtgatcactaacggtactgcaattctaggccttggtaatttaggcccactggcatcaaaaccagtgatggaaggtaaagcactcttgtttaaacgctttgctgatattgattcaattgatattgaagtgaaacaccgtacaactgaagaatttattgataccgtagcgaatatcgcggatacatttggtggcattaacttagaagacattaaagcaccagaatgttttgaaattgaaaaagcgctcattgcccgttgtcagatcccggtattccatgatgatcaacacggtactgcaatcgtaaccgctgcgggcatgattaatgcgctagacattcaaggtaaagatatcgcggaagtgattattgtttgtatgggcgctggtgcggcggctattgcatgtatggagttattgatttcatgtggcgcacaacgtgaaaaaatctacatgttagaccgcaaaggtgtgatccacactcgtcgtgatgacattaacgaatataagcaacgttttgctaataataccgacaagcgtacattgcaagatgccattaacggtgctgacgtatttgttggtgtatctggtcccaatgtattagctgctcacgatgttaaattaatggccgataatccgattatttttgcctgttcgaatcctgatccagaaattaaaccggaattagcacacggtgctcgtcaagatctgatcatggcaaccggtcgttctgattatccaaatcaagtgaataacgtgctgtgcttcccattcatcttccgtggtgcattagacgcacgtgccagtgtgattaatgaagcgatgaaagtagccgctgttcatgcgatccgtgagatcgccaaagaagaagtgccacagtctgtattgactgcatcgggtgtggaatcattagagtttggtactgagtacatcattccaaaaccaatggaccctcgtttattacctcgtgtggcacgtgctgttgcgctagccgcggtagaaactggcgttgcccgtgtcgaactacctgaaaattatatgctgtaa

SEQ ID NO: 5884 - protein, 413 aa, Moritella sp. PE36
MSDFRQQALDYHANPKPGKIAIQLTTSAETADDLSLAYSPGVAEPVREIAANPDDAYKYTAKGNLVAVITNGTAILGLGNLGPLASKPVMEGKALLFKRFADIDSIDIEVKHRTTEEFIDTVANIADTFGGINLEDIKAPECFEIEKALIARCQIPVFHDDQHGTAIVTAAGMINALDIQGKDIAEVIIVCMGAGAAAIACMELLISCGAQREKIYMLDRKGVIHTRRDDINEYKQRFANNTDKRTLQDAINGADVFVGVSGPNVLAAHDVKLMADNPIIFACSNPDPEIKPELAHGARQDLIMATGRSDYPNQVNNVLCFPFIFRGALDARASVINEAMKVAAVHAIREIAKEEVPQSVLTASGVESLEFGTEYIIPKPMDPRLLPRVARAVALAAVETGVARVELPENYML

SEQ ID NO: 5885 - DNA, 1935 bp, Zea mays
  CDS (1)..(1935)
atgatctccgcgcgcaccgccgcagcttcccccgcttccctgtggaagcagggaggacgaagcgagggcggcggcagctgcgacggatgtcggacttacaggaacactttgcggagggccgcagcagcgaaggtgcgtgccttgccgtcgagggcggtggaggcggtcaaaatgggctccgccgcggagatggagcaggaggaggcggaggtggccgcggccgcggccggcgtcgtcgtcgaggaccactacggcgaggacagcgccaccgaggagctgcccattttgccctgggccttctccgtcgcaagcggttacaccctcttgagggatccacatcacaacaagggtcttgctttcatggagaaggagagggatgcacaccacttgcgggggctgcttcctcctgcagttgtgcctcaagaactccaaattaagaagatcatgcacaacctgcggcagtaccaggtccctttgcagcgctatatggccatgatggaccttcaggagaggaacgagaggcttttctacaagcttttaattgataacgtggaggagctgcttcctgtggtttatacaccaactgtaggtgaggcctgccagaagtatgggtccatctttcgacaaccacagggtctgtatgtcagcttgagggacaaggggaaggtcctagaagttctaaggaactggccacataggaacattcaagttatctgtgttactgatggtgagcgaatcttgggacttggagatttgggttctcagggaatgggaattcctgtaggcaaacttgctctatacactgctcttggaggagttcgtccatcagcttgtttgcctatcacaatcgatgttggcacaaataatgagaaactgcttaatgatgagttttacattggactccggcaaaaacgtgcaactggcgaggagtatcatgagcttatggaagagttcatggctgctgttaagcaaatctacggcgagaaagtcctcattcagtttgaggacttcgcgaatcataatgcttttaatttgcttgcaaaatatagcaagagccatcttgttttcaatgatgacatccagggcacagcatcagtggtccttgcaggtttgttagcagcactcaaggtggttggtgggaccttggcagagcacacttatttattccttggtgctggggaggctggaactggtattgcagaactcattgctcttgagatttcaaaacagacgtcggctccaattgaagagtgccgcaagaagatttggttggtggactcaaagggtttgattgttgactctcgtaaaaactccgttcagtcattcaaaaaaccttgggcacatgagcatgagcccttgacaaccttgtacgatgctgttcagtccatcaaacctacagttctgattgggacgtctggagttggaagaacattcacaaaagaagttgttgaggccatggcttccttcaatgagaggcctatcatcttttcactgtcaaatccaacctctcattctgaatgtactgctgaagaagcatataactggactcagggtcgtgcaatatttgccagtggcagtccatttgaccctgtggagtacgatgggaaggtttttgtacctggacagtcgaacaacgcctacattttccctggattcggcctcggtcttgttatctctggagccatccgtgtccacgaggacatgcttcttgccgcctcggaagcactagctgctcaggccacacaggagaacttcgacaagggatcaatcttcccgcccttcaccaacattagaaagatctctgcgcgcattgccgcagccgtggctgcaaaagcttatgaactcggtttggcgacccgtctgcctcccccaagggacctagtgaaatatgcacagagctgcatgtacactcctgtctaccgtaactaccggtag

SEQ ID NO: 5886 - protein, 644 aa, Zea mays
MISARTAAASPASLWKQGGRSEGGGSCDGCRTYRNTLRRAAAAKVRALPSRAVEAVKMGSAAEMEQEEAEVAAAAAGVVVEDHYGEDSATEELPILPWAFSVASGYTLLRDPHHNKGLAFMEKERDAHHLRGLLPPAVVPQELQIKKIMHNLRQYQVPLQRYMAMMDLQERNERLFYKLLIDNVEELLPVVYTPTVGEACQKYGSIFRQPQGLYVSLRDKGKVLEVLRNWPHRNIQVICVTDGERILGLGDLGSQGMGIPVGKLALYTALGGVRPSACLPITIDVGTNNEKLLNDEFYIGLRQKRATGEEYHELMEEFMAAVKQIYGEKVLIQFEDFANHNAFNLLAKYSKSHLVFNDDIQGTASVVLAGLLAALKVVGGTLAEHTYLFLGAGEAGTGIAELIALEISKQTSAPIEECRKKIWLVDSKGLIVDSRKNSVQSFKKPWAHEHEPLTTLYDAVQSIKPTVLIGTSGVGRTFTKEVVEAMASFNERPIIFSLSNPTSHSECTAEEAYNWTQGRAIFASGSPFDPVEYDGKVFVPGQSNNAYIFPGFGLGLVISGAIRVHEDMLLAASEALAAQATQENFDKGSIFPPFTNIRKISARIAAAVAAKAYELGLATRLPPPRDLVKYAQSCMYTPVYRNYR

SEQ ID NO: 5887 - DNA, 2313 bp, Herbaspirillum seropedicae
  CDS (1)..(2313): transl_table=11
atggattcgatgatcagtaagaaagaagaagtgcgtcagcaacttcgtcaggcagcgctggactaccatgagtttccgaccccgggcaagatcgctgtcacgcccaccaagctgctgaccaaccagcgtgatctctccctcgcgtattctcccggcgtggccgcggcctgcgaagaaatcgtggccgacccgctcaacgccttccgctacaccgcccgtggcaacctggtggccgtcatcagcaacggcaccgccgtgctgggcctgggcaacatcggtgcgctggcttccaagccggtcatggaaggcaagggcgtgctgttcaagaaattcgccggcatcgacgtcttcgacatcgaagtcaacgagaccgaccccgacaagctgatcgacgtcatcgcggccctggagccgaccttcggcggcatcaacctggaagacatcaaggcgccggaatgcttctacatcgagcgcaagctgcgcgagaagatgaagatcccggtcttccacgatgaccagcacggtaccgccatcatcgtcggcgcggccatcctgaacggcctgaaggtcgtgggcaaggacatcaagaacgtcaagctggtggtctccggcgccggcgcggctgcgctcgcctgcctggatctgatcgtcgacctgggcttccccatcgagaacatctacgtcaccgacctggccggcgtggtctacaagggccgcaaggaactgatggatccggacaaggaacgtttcgcccgcgaaaccgaggcccgcaccctggccgaggtgattccggacgccgacatcttcctgggcctgtccgccgccggtgtgttgaagcccgagatggtcaagcagatggcggcgcgtccgctggtgctggcgctggccaacccgaccccggaaatcctgccggaagaggtcaaggccgtgcgtgacgacgccatcatcgccaccggccgttcggattatccgaaccaggtcaacaatgtgctgtgcttcccgtacatcttccgtggtgcactcgattccggcgccaccaccatcacccgcgagatggagatcgccacggtgcacgccatcgccgagctggcccaggccgagcagtccgatatcgtggccaccacctatggcatcgccaacctgtccttcggcccggaatacatcattcccaagcccttcgacccgcgcctgatgatcaagatcgcgccggccgtggcgcgtgccgccgaaagctcgggcgtggccgcccgtcccatccaggacatggacgcctatatcgagaagctggagcagttcgtctaccatagcggcaccttcatgcgtccgatcttccaggtcgccaagaaggccgccgaggccaagaagcgcatcgtctacgccgagggcgaagaagaacgcgtgctgcgtgcggtgcaggtgatcgtcgatgaaaacctggccaagcccatcctggtgggccgtccggaagtgctggagcagcgcatccagaagttcggcctgcgcctgcgcgccggcaccgacttcgaggtgatcaaccccaacttcgacaaccgctaccgcgactattggcagaccttcctggagatgtcgcgccgcaagggcgtcaccgagcagtacgccaagctggaaatgcgtcgtcgccacaccctgatcggctccatggccatccacaagggcgacgccgacggcatgatctgcggcacctacggcaccacccagctgcacctgcactacatcgaccaggtgctgggcaagcgcgaaggcgtcaatgtctatgcggcgatgaacgcggtgatcctgcccaatcgccaactggtgatggtggacacccacgtcaacgagaaccccaacgcccgcgagctggccgagatcaccatgctggccgctgaggaaatgcgccgcttcggcctgcatccgcgcgccgcgctgctgtcgcattcgaacttcggttccagcaacagcgaatcggcccgcaagatgcgcgaagccttggccatcctgcgcgagatcgcgccggagctggaagtggacggcgaaatgcacggcgacaccgcgctggattccaagctgctcaatgcagtgattccggattcgccgctcaagggcgacgccaacctgctggtcatgcccaacatcgatgccgccaacatcgcctacaacctgctcaagacggcgtcgggcaatggcgtggcgattggccccatcctgctgggttgcgccaagccggtgcatatcctgaccccgtcggccaccgtgcgccgcatcatcaacatgacggccctgtgcgtcatggatgcgctgtcggagcgttga

SEQ ID NO: 5888 - protein, 770 aa, Herbaspirillum seropedicae
MDSMISKKEEVRQQLRQAALDYHEFPTPGKIAVTPTKLLTNQRDLSLAYSPGVAAACEEIVADPLNAFRYTARGNLVAVISNGTAVLGLGNIGALASKPVMEGKGVLFKKFAGIDVFDIEVNETDPDKLIDVIAALEPTFGGINLEDIKAPECFYIERKLREKMKIPVFHDDQHGTAIIVGAAILNGLKVVGKDIKNVKLVVSGAGAAALACLDLIVDLGFPIENIYVTDLAGVVYKGRKELMDPDKERFARETEARTLAEVIPDADIFLGLSAAGVLKPEMVKQMAARPLVLALANPTPEILPEEVKAVRDDAIIATGRSDYPNQVNNVLCFPYIFRGALDSGATTITREMEIATVHAIAELAQAEQSDIVATTYGIANLSFGPEYIIPKPFDPRLMIKIAPAVARAAESSGVAARPIQDMDAYIEKLEQFVYHSGTFMRPIFQVAKKAAEAKKRIVYAEGEEERVLRAVQVIVDENLAKPILVGRPEVLEQRIQKFGLRLRAGTDFEVINPNFDNRYRDYWQTFLEMSRRKGVTEQYAKLEMRRRHTLIGSMAIHKGDADGMICGTYGTTQLHLHYIDQVLGKREGVNVYAAMNAVILPNRQLVMVDTHVNENPNARELAEITMLAAEEMRRFGLHPRAALLSHSNFGSSNSESARKMREALAILREIAPELEVDGEMHGDTALDSKLLNAVIPDSPLKGDANLLVMPNIDAANIAYNLLKTASGNGVAIGPILLGCAKPVHILTPSATVRRIINMTALCVMDALSER

SEQ ID NO: 5889 - DNA, 1779 bp, Tigriopus californicus
  CDS (1)..(1779)
atgagttacaagcctttggatagaattggatccaggccaatggccaccagagtgacagctgatcgaggaacatcagttgcaccctccactgttcccggaatggattacctccgcaatcccaagctcttcaagggcatgggattcagtcttgaagagagacaggctcttggaattcatggcttgctcccaccgaggatcaagacccaagatgagcaagtggacaattgtttgagaaacttgaatcgttacgagaacaaactgaatcaatatgtgtacatgattgatcttttggaccgaaatgagagactcttctacaagcttctgtcggaaaatgtccaaaaactcatgcccattgtgtatacacccactgtgggagaggcatgccagaagtttgggtacactttcaaaagacctcagggcctatttatcactatttacgacaagggacatatttatgacatcttgcaaaactggcccgaaaatgatgttcgagccattgttgtaactgacggagagcgtattttgggtttgggagatttgggggttcacggaatgggaattcccgtgggtaaattggctctctacacggctttggccggaatcaagcctcaccaaactctacccatcaccttggatgtggggaccaataaccaaaaattcttggaagatgccgattatgttggtttgcgccatcgtcgtgtcactggccaagattatgacgacttcatcgacgagtttatggatgcggtggtccagcgatatggccagaacaccttgatccaattcgaggattttggcaatcacaatgccttccgctttctggagaagtaccgcaacaagttctgcaccttcaatgacgacatccaaggaacagcttccgtcgctgtagctggcatcctggctgctctgaaagcaacggacaccaagctctcggaacacaccttcttgttccaaggtgctggagaggctgccattgggatcgcccaacttctggccaaagccatggaaaaacgggaaggcattcccgaggctgaagctcggaagcagatctggatgaaagactccaaaggtctgattgtcaaggatcgacctgagggagggatcagccaacataaggccccatttgctcacgagcacgagcccatgaaggaactggaagacattgtgaagaagttgaagccctcttgcttgattggggctgccgccatatcgggggtatttaaccaaggcatcctggaggacatggcctctttcaacaaaaggcccattgtttttgccttgagcaatcccaccgataaggctgagtgcactgctgaagacgcttacaaacacaccaagggtcaagtagtgtatgcctccggatcgccatttgagccttttgactacgatggcaaacgtgtggagcctggtcaagggaataatgcctacatcttccctggagtgtccttgggtgtgatttgcactggcatccatcatatttccgatgaggtcttcttgggtgcggctgaagccttggctgatatggttacccccgaagatttggcagtgggccgactctatccgcccattgagaaaatcaaggattgttcgatcaagattgcggccaatattgctaatattgcttatgaggaccaaacggcatccacctatccggagcccaaaaataaagaagagttcattcggagccagttgtacaactatgagtacgatggggtcagcgctctaccagaacgttatgattggccagaggaggtccaaaagccttttagtaaactgtaa

SEQ ID NO: 5890 - protein, 592 aa, Tigriopus californicus
MSYKPLDRIGSRPMATRVTADRGTSVAPSTVPGMDYLRNPKLFKGMGFSLEERQALGIHGLLPPRIKTQDEQVDNCLRNLNRYENKLNQYVYMIDLLDRNERLFYKLLSENVQKLMPIVYTPTVGEACQKFGYTFKRPQGLFITIYDKGHIYDILQNWPENDVRAIVVTDGERILGLGDLGVHGMGIPVGKLALYTALAGIKPHQTLPITLDVGTNNQKFLEDADYVGLRHRRVTGQDYDDFIDEFMDAVVQRYGQNTLIQFEDFGNHNAFRFLEKYRNKFCTFNDDIQGTASVAVAGILAALKATDTKLSEHTFLFQGAGEAAIGIAQLLAKAMEKREGIPEAEARKQIWMKDSKGLIVKDRPEGGISQHKAPFAHEHEPMKELEDIVKKLKPSCLIGAAAISGVFNQGILEDMASFNKRPIVFALSNPTDKAECTAEDAYKHTKGQVVYASGSPFEPFDYDGKRVEPGQGNNAYIFPGVSLGVICTGIHHISDEVFLGAAEALADMVTPEDLAVGRLYPPIEKIKDCSIKIAANIANIAYEDQTASTYPEPKNKEEFIRSQLYNYEYDGVSALPERYDWPEEVQKPFSKL

SEQ ID NO: 5891 - DNA, 2325 bp, Rhodopseudomonas palustris
  CDS (1)..(2325): transl_table=11
atggcgggggaacgtatggcgtcgtattccgaagatcttcaggcggcagcgctcggctatcatcgccggccgaagcccggaaagctggagattcaggcatcgaagccgctcgccaaccagcgcgaccttgcgttggcctattcccccggcgttgccgcagcctgtaacgcgatcgcagccgatccggcgcaggccgccgagctcactgtgcgatccaacttggtcgccgtcgtcaccaacggcacggcggtgctcggcctcggcaatatcgggccgcttgccgccaagccggtgatggaaggcaaggcggttctgttcaagaagttcgccggcatcgacgtgttcgacatcgagatcgcggccgagaccgtcgatcgcgtggtcgaaacggtggcggcgctggagccgaccttcggcggcatcaacctcgaagatatcaaggggccggagtgcttcgagatcgaggcgatgctgaaagaccggatgaagatcccggtatttcacgacgatcagcacggcactacgatcatcgtcggcgccgcggtgaagaacgcgctggcgctgaccggcaaggacatctcgaaggtcaagatcgtcgcggccggtgctggcgcagcggcgctcgcctgcctcaatctgctggtgtcgctaggcgcgcagcgcaagaatatcttcgtctgtgacctcgaaggcctggtgtaccaaggccgcaatgtgctgatggaccgctggaaagaggtctacgcgcagaagaccgacaagcggacgctagccgaagtcatcccgggcgccgacatcttcctcggcctctcggggccgaacgtgctgtcgcaggacatggtcaagcagatggcggagctgccgttggtgatggcgctggccaatccgacgcccgagatcatgccggaagacgtccgcaaagtgcggccggacgcgatgatctgcaccggacgctcggacttcccgaaccaggtcaacaacgtcctgtgcttcccctacatcttccgcggcgcgctcgatgtcggcgccaccgcgatcaacgaggcgatgaagcacgccgccgtcgacgccatcgtgcagctcgcgcgcgaggcgccggcggacccggtgtcggtcggtcttgataatgacgaagcgttcggcttcggtccgggctcgctgatcccgagcccggtcgatccgcgcctgatcttgcggatcgcgccggcggtggcgatggctgcgatggattccggcgtcgcgactcgtccgatcacctcgttcgatgattactacgcgcagctcgagcgcttcgcgttccgctccggcctggtgatgaagccggtgttcgccaaggcgaagggccagcccgtccgcgtcatcaacgccgaaggcgaagacgagaaggtgctgcacgcggtccagaccatcctcgaggagaagctggcacggccgatcctggtcggccgtccgtcggtggtggaagcgcggatcaagcgctcgggcctgtcgatccgtcccggtgaggatttcgacctcgtcaatccccaggacgacccgcggtatcgttcctacgtgcagtcctacattgacatcgccggtcgcgccggcgtgacgccggcagcggcgcgcgcggtggtgcgcaccaactcgacggtgatcgcggcgctcgccgtagcgcgcggcgaggccgatgcgatgatctgcggcctcgacggccgctacatgaaccatctacgccacgttcgcgacgtgatcggccgtcgtcccggcgtgtcggactacgctgctctggcgctgctgatcaccaagaagggcccgatcttcatcgccgacacccaggttcggcccaatccgaccgccgaagagctcgccgagttggcagcgctggctgcggtccatgtacagcgcttcaacatcaagccgaagatcgcgttcctgtcgcattcggacttcggcagcttcccgaccgactcgtcgctgaagatgcgccgcgccaccgcgatcctggccgagaagcatccggagattgaagccgacggcgaaatgcagggtgacagcgcgctgtcggaaacgtcgcggcagatgatcctgccgcattcgcggctgaccggcgtcgccaacgtgctgatcatgccgaatctcgataccgcgatcgtcgcctatcagatgatcaaggtggtgggcgaggcgctgcccgtcggcccgatcctgatcggacctgcgctgccggcgcacatcctgacgccgtcagcgaccgcgcgcggcatcctcaacatgaccgcggtggcggtggtcgaggcacaggagcgggcgggccggcatcagggaacgctgttcgcctga

SEQ ID NO: 5892 - protein, 774 aa, Rhodopseudomonas palustris
MAGERMASYSEDLQAAALGYHRRPKPGKLEIQASKPLANQRDLALAYSPGVAAACNAIAADPAQAAELTVRSNLVAVVTNGTAVLGLGNIGPLAAKPVMEGKAVLFKKFAGIDVFDIEIAAETVDRVVETVAALEPTFGGINLEDIKGPECFEIEAMLKDRMKIPVFHDDQHGTTIIVGAAVKNALALTGKDISKVKIVAAGAGAAALACLNLLVSLGAQRKNIFVCDLEGLVYQGRNVLMDRWKEVYAQKTDKRTLAEVIPGADIFLGLSGPNVLSQDMVKQMAELPLVMALANPTPEIMPEDVRKVRPDAMICTGRSDFPNQVNNVLCFPYIFRGALDVGATAINEAMKHAAVDAIVQLAREAPADPVSVGLDNDEAFGFGPGSLIPSPVDPRLILRIAPAVAMAAMDSGVATRPITSFDDYYAQLERFAFRSGLVMKPVFAKAKGQPVRVINAEGEDEKVLHAVQTILEEKLARPILVGRPSVVEARIKRSGLSIRPGEDFDLVNPQDDPRYRSYVQSYIDIAGRAGVTPAAARAVVRTNSTVIAALAVARGEADAMICGLDGRYMNHLRHVRDVIGRRPGVSDYAALALLITKKGPIFIADTQVRPNPTAEELAELAALAAVHVQRFNIKPKIAFLSHSDFGSFPTDSSLKMRRATAILAEKHPEIEADGEMQGDSALSETSRQMILPHSRLTGVANVLIMPNLDTAIVAYQMIKVVGEALPVGPILIGPALPAHILTPSATARGILNMTAVAVVEAQERAGRHQGTLFA

SEQ ID NO: 5893 - DNA, 2289 bp, Magnetospirillum gryphiswaldense
  CDS (1)..(2289): transl_table=11
atgagcatatcggacgaattgcgcgacagcgcgctggaatatcaccgccttcccacccccgggaagatcagcgtcaccccgaccaagcccttgggcaatcagcgtgatctggcgcttgcgtattcccccggcgtcgccgccgcctgcgaagagatcgtgcgcgaccccgaggcggtatccgagatgaccgcgcgcggcaatctggtggcggtggtcaccaacggcaccgctgtcctcggcctgggcaatatcgggccgctggccgccaagccggtgatggaaggcaagggcgttctgttcaagaagttcgccggcatcgacgtcttcgacatggaaatcgccgagaacgatgccgacaagctggtcgacatcatcgcctccatggagcccactttcggcgccatcaatctggaagacatcaaggcgccggaatgcttcgaggtcgagcgcaagctgaaggaacgcatgtccattccggtcatgcatgacgatcagcacggcaccgccatcgtcgtcggcgccgccatggtcaacgcgctcaggatcgtcggcaaggatatcggcaaggtccgtctggtcgcctcgggcgccggcgccgctgctttggcctgtctgaacctgctggtgtccttgggcgtcaagcgtgagaacatctgggtcaccgacatcaagggcgtggtctacaagggccgcaacgaattgatggacccctacaaggaaatcttcgcccaggagaccgaagcccgcacgctcgatgacgtcatcggcggcgccgacatcttcctggggctgtcggcaccgcgcgtgctgaccggcgacatggtggccaagatggccgaccagcccatcgtcttcgccctggccaatccgaccccggaaatcctgcccgacgaggtcaaggcggcgcgcaaggatgccatcatcgccaccgggcgctcggattatcccaatcaggtcaacaacgtcctggtcttcccctatatcttccgcggcgccctggacgtgggcgccacccagatcaacgaggaaatgaagctggccgccacctatgcgctggcggagctggccatggccgaatccgacgagcgggtgcgtgccgcctatggcgagcagcggctgtcgttcggcccggaatacctgattcccaagccgttcgattcgcgcttgatcctgaagatcgcgccggcggtggcccgcgccgccatgagctcgggcgtggcgcgccgcccgatcatcgacttccaggcctatctggagcggctgtcgcaatgggtgttccgctccgggctggtgatgaagccggtgttcgaccgcgccaagcaggacgtgcgccgcgtcgtctattgcgagggcgaaggccgccgggtgctgctggcggtgcaggcggtggtggatgaaggtgtcgccttccccgtcctcatcggtcgccgcgacgtggtggtcaagcgcatcaaggatctggatctgcgtctgaccatcgacgaggatttcgaactgtgcgacccgcaggacgatccgcgctacaacgattattggcgcaattatcatacgttgctggaacgcaaaggcgtcagccccgattacgcccgcacggtggtgcgcacccgttccaccgtcatcggcacgctgatggtgcgccggcgcgaagccgacgccatgatctgcggcaccatcgggcgctatgacaagcacctggaacatatcaccgacgtcatcggcgtgcgcgacaccgtcaaggtgccggcggccatgaacctgctgatcatgccccagggcaccttcttcatctgcgacacctatgtgaccgccgatcccagccccgaacagatcgtcgagaacaccttgctggcggcggaagaagtgcgccgcttcggtatcgagcccaaggtggccttcctgtcgcattccaattttggtgcccgcgacaccgcctcggcgcaaaagatgcgcgccgccatcgcgttgttgcacgaacgcgccccctatctggaggcggaaggcgaaatgcatggcgacgcggcgctggaagaaagcatccgctcgcgcattttccccaactcgcgcttgaaggggcaggcgaatctgttgattatgcccaacctggacgcggcgaacatttcgttcaacctcttgaaggttctgggggaaggcctgtcggtcggccccatcctgatgggcgccgctttgccggcccatattctgacgccttcggcgaccgtgcggaacattgtcaacatgaccgcactggccgctgtcgacgcccagatggcagcccatcagcggggatag

SEQ ID NO: 5894 - protein, 762 aa, Magnetospirillum gryphiswaldense
MSISDELRDSALEYHRLPTPGKISVTPTKPLGNQRDLALAYSPGVAAACEEIVRDPEAVSEMTARGNLVAVVTNGTAVLGLGNIGPLAAKPVMEGKGVLFKKFAGIDVFDMEIAENDADKLVDIIASMEPTFGAINLEDIKAPECFEVERKLKERMSIPVMHDDQHGTAIVVGAAMVNALRIVGKDIGKVRLVASGAGAAALACLNLLVSLGVKRENIWVTDIKGVVYKGRNELMDPYKEIFAQETEARTLDDVIGGADIFLGLSAPRVLTGDMVAKMADQPIVFALANPTPEILPDEVKAARKDAIIATGRSDYPNQVNNVLVFPYIFRGALDVGATQINEEMKLAATYALAELAMAESDERVRAAYGEQRLSFGPEYLIPKPFDSRLILKIAPAVARAAMSSGVARRPIIDFQAYLERLSQWVFRSGLVMKPVFDRAKQDVRRVVYCEGEGRRVLLAVQAVVDEGVAFPVLIGRRDVVVKRIKDLDLRLTIDEDFELCDPQDDPRYNDYWRNYHTLLERKGVSPDYARTVVRTRSTVIGTLMVRRREADAMICGTIGRYDKHLEHITDVIGVRDTVKVPAAMNLLIMPQGTFFICDTYVTADPSPEQIVENTLLAAEEVRRFGIEPKVAFLSHSNFGARDTASAQKMRAAIALLHERAPYLEAEGEMHGDAALEESIRSRIFPNSRLKGQANLLIMPNLDAANISFNLLKVLGEGLSVGPILMGAALPAHILTPSATVRNIVNMTALAAVDAQMAAHQRG

SEQ ID NO: 5895 - DNA, 2292 bp, Magnetospirillum gryphiswaldense
  CDS (1)..(2292): transl_table=11
atgaccgattcgtccgctaaccgtaatgagtccagcgcccagtcgacgctggagcgcgaaaccctgctgatgcatgcctcgggccgtcccggcaagatcgaggtggtgccgaccaagcccatgaccacccagcgcgatttgtcgctggcctattcaccgggcgtcgcctttccctgcctgcatatcgcccgcgatccgtcgctggcctatgattacacggccaagggcaatctggtggcggtgatctccaacggcaccgccgttctcggcctgggtgatctgggggcgttggccggcaagccggtgatggaaggcaaggcggttctgttcaagcgtttcgccgacgtcgatgccatcgacctggaggtcgatacccgcgacgtcgatgaattcgtcaattgcgtccgcttcctggggccgaccttcggcggcatcaacctggaagacatcaaggcgccggaatgcttcatcatcgaaagccggctgcgcgagatcatggatattccggtcttccatgacgaccagcacggcaccgccatcatcgccgccgccggcctgctgaacgcgctcgacctgaccgggagggcgctcgctgacaccaaggtcgtcgtcaacggtgctggcgccgccgccatcgcctgcgtcgagttgatcaaggccatgggcatccgtcatgaaaacgtgttgctgtgcgacaccaagggcgtcatctaccagggccgaacccagggcatgaaccagtggaagtcggcccatgcggtgcccaccgatgcccgcaccctggaccaggccataatcggcgccgacgtgttcatggggctgtcggccaagggcgcggtgacgcccgaaatggtggcgtccatggcggcacgaccgatcatcttcgccatggccaatcccgacccggaaatcactccggaagaggtgcgccaggtccgcaccgacgccatcgtcgccaccgggcgctcggattatcccaaccagatcaacaatgtgctgggcttcccctatatcttccgcggcgccctcgacgtccgtgcgcggaccatcaacgaagccatgaaggtggcggcggcccgcgccatcgcccaattggcgcgcgaggacgtgcccgacgaagtggacgcggcttacgccgggcgccggcttcgtttcggtcccgaatatattatcccggtgccgttcgacccgcgcctgatcgccaccatcccgccggcggtggccaaggccgccatggactccggggtggcgcaaaagccgatcatcgacatggaagcctatggcaagcagctttccgcccgcctcgaccccatggcggccagcctgcaaaccatttccgagaaggtccgcgcccatccccaacgcgtcgtcttcgccgagggcgaagaggaaaagaccatccgtgccgccctcgccttccgtaatgccggttacggcacgccgctgctgctggggcgcgaggaacagatccacgaaacgctgaagaccagcggcctgcccggtctggaaggcatggaaatcgtcaatgcccgcctgtccgaccggcgcgagcattacaccgaggtgctgtaccggcgcctgcaacgccagggcctgctcatgcgcgacgtgcagcgtctggtcaaccaggaacgcaacatcttcggcgccctgatggtgtgcgaaggcgacgccgatgccatggtcaccggcctgacccgcaattattggcaggccttcgacgagatcaagcgggtggtcgaccccgccccgggcgaggtgctgctgggcctgacgatgctgatcgccagaggccacacggtgtttttggccgacaccaccgtgcacgagacgccaacccccgagcaactggccgacatcgcccagcaaagcgccgccaaggcccggcaaatggggcacgagccccgcgtcgccttgctgtcttattccaatttcggcaatccggcctccaatccgtcggaacgggtgcgcgaggcggtggccatcttggattcgcgccgtgtcgattttgaatacgatggcgaaatggccgccgacgtggcgctagacccgacgcttctcaagctttatccgttctgccggttgtcggggccggccaatgtgctggtcatgcccggcctgcattcggccaatatcagcgccaagctgatgcagaagctgggcggcggcaccgtcatcggccccatcctgatggggttggaccagccgatccagatcacctccatggacgccaccgtcaacgacatcgtcaacatggcggtgctcgcctgctacgatgccatgagaagttaa

SEQ ID NO: 5896 - protein, 763 aa, Magnetospirillum gryphiswaldense
MTDSSANRNESSAQSTLERETLLMHASGRPGKIEVVPTKPMTTQRDLSLAYSPGVAFPCLHIARDPSLAYDYTAKGNLVAVISNGTAVLGLGDLGALAGKPVMEGKAVLFKRFADVDAIDLEVDTRDVDEFVNCVRFLGPTFGGINLEDIKAPECFIIESRLREIMDIPVFHDDQHGTAIIAAAGLLNALDLTGRALADTKVVVNGAGAAAIACVELIKAMGIRHENVLLCDTKGVIYQGRTQGMNQWKSAHAVPTDARTLDQAIIGADVFMGLSAKGAVTPEMVASMAARPIIFAMANPDPEITPEEVRQVRTDAIVATGRSDYPNQINNVLGFPYIFRGALDVRARTINEAMKVAAARAIAQLAREDVPDEVDAAYAGRRLRFGPEYIIPVPFDPRLIATIPPAVAKAAMDSGVAQKPIIDMEAYGKQLSARLDPMAASLQTISEKVRAHPQRVVFAEGEEEKTIRAALAFRNAGYGTPLLLGREEQIHETLKTSGLPGLEGMEIVNARLSDRREHYTEVLYRRLQRQGLLMRDVQRLVNQERNIFGALMVCEGDADAMVTGLTRNYWQAFDEIKRVVDPAPGEVLLGLTMLIARGHTVFLADTTVHETPTPEQLADIAQQSAAKARQMGHEPRVALLSYSNFGNPASNPSERVREAVAILDSRRVDFEYDGEMAADVALDPTLLKLYPFCRLSGPANVLVMPGLHSANISAKLMQKLGGGTVIGPILMGLDQPIQITSMDATVNDIVNMAVLACYDAMRS

SEQ ID NO: 5897 - DNA, 1923 bp, Solanum lycopersicum
  CDS (1)..(1923)
atgttctccttgaatggcaccagttttacgaacaattcgttatctggggtttcaagatgtttgaatcagtcaagcagaagagtttcagctcctatggtggtggtagccgccgtgaactcaaacggaaaacctggagatggaagtgttagtgtattggttgagaatgctttgacggaaagtcctgcaccggttgagatggaggttaaatctactgttactggtggagttcaagacgtttatggtgaggatagtgccacagaagatcaatccatcacaccttggaccttatctgttgctagtggtttctcattgttgcgtaacccacactacaataagggccttgctttctctgagagagagagagacacccactatttgcgtggtcttcttcctcctgtcgtaattagtcatgaccttcaggtcaagaaaatgatgaacagcatccgtaagtatgatgtaccacttcaaagatacatggccatgatggatcttcaggaaatgaatgagcggctattctacaagcttcttattgacaatgttgaggagcttcttccgatagtttacactccaactgttggtgaagcatgccagaaatatggtagcatcttcaggcgtcctcaaggtctttttatcagcttgaaagaaaaaggcaaaattcacgaggtattaaaaaattggcccgagaagaaaattcaagttattgttgttactgatggagaacgaattctgggccttggggaccttggttgccagggaatggggataccagtgggcaagctctctttatacactgctctgggaggcattcgtccttcagcttgtttgcccgttaccattgatgtgggtacaaacaatgaaaatttgttgaacgatgaattctacattggactcaggcaaagaagagctaccggacaggaatattctgaacttttagatgaatttatgtatgccgtcaagcagaattatggggagaaagtgctcattcagtttgaagactttgcaaatcataatgcatttgacctccttgcaaagtatggaactagccaccttgttttcaatgatgacatacaggggacagcatccgtggtccttgctgggctgatggccgcattaaacttggttggaggaagcttgtctgaacatacattcttattccttggagcaggagaggctggcacaggtatagctgaactcatagctcttgagatgtcaaagcagactggaatccctctagaagagactcgcaagaaaatttggatggtggattctaaggggctaattgttaagtctcgcatggagatgcttcaacatttcaagaggccctgggcacatgaccacgaaccagtacaagaactagtgaatgccgtgaagtcaattaagcctacggtcttgattggatcttctggagctgggagaacgtttactaaagaagttgtacaagctatggcaaccttcaatgagaaaccaattatttttgccctctccaatccaacatcacagtctgaatgtactgctgaggaggcttatagctggagtgaggggcgagccatttttgctagtgggagtccatttgctccagttgagtacaatgggaaggtctatgcgtctggccaggcaaataatgcatatattttccctgggtttggtctaggactgataatctctggtgcaattcgtgtccacgatgacatgctcctggtagcctcggaagctttagcggacgaagtttctcaagagaactttgaaaagggactcatatacccgccattttccaacataagaaagatttcagcgcatattcgtgccaaagtggcagctaaagcatatgaattaggtttggccactcgtctaccgcagcccaaggacctagtcgcatatgcagagagctgcatgtacagcccagcataccgcagctatcgttga

SEQ ID NO: 5898 - protein, 640 aa, Solanum lycopersicum
MFSLNGTSFTNNSLSGVSRCLNQSSRRVSAPMVVVAAVNSNGKPGDGSVSVLVENALTESPAPVEMEVKSTVTGGVQDVYGEDSATEDQSITPWTLSVASGFSLLRNPHYNKGLAFSERERDTHYLRGLLPPVVISHDLQVKKMMNSIRKYDVPLQRYMAMMDLQEMNERLFYKLLIDNVEELLPIVYTPTVGEACQKYGSIFRRPQGLFISLKEKGKIHEVLKNWPEKKIQVIVVTDGERILGLGDLGCQGMGIPVGKLSLYTALGGIRPSACLPVTIDVGTNNENLLNDEFYIGLRQRRATGQEYSELLDEFMYAVKQNYGEKVLIQFEDFANHNAFDLLAKYGTSHLVFNDDIQGTASVVLAGLMAALNLVGGSLSEHTFLFLGAGEAGTGIAELIALEMSKQTGIPLEETRKKIWMVDSKGLIVKSRMEMLQHFKRPWAHDHEPVQELVNAVKSIKPTVLIGSSGAGRTFTKEVVQAMATFNEKPIIFALSNPTSQSECTAEEAYSWSEGRAIFASGSPFAPVEYNGKVYASGQANNAYIFPGFGLGLIISGAIRVHDDMLLVASEALADEVSQENFEKGLIYPPFSNIRKISAHIRAKVAAKAYELGLATRLPQPKDLVAYAESCMYSPAYRSYR

SEQ ID NO: 5899 - DNA, 1740 bp, Solanum lycopersicum
  CDS (1)..(1740)
atggagagcgcattgaaggatctgtcaactcccaccggtggcgtcgaggatgtttacggtgaggattgcgccactgaggatcagtgcatcactccctggactattgccgtttctagtggatacaacttgttgagggatccgcgttacaacaaagggcttgctttcactgagagagaaagagatgctcattacttgagaggccttttgcctcctgtcatttcctcacaggaacttcaggagaaaaaacttatgcagtctatacgccaatatgacgtccctctgcacaaatatgtcgccatgatggaattagaggaacggaatgaaaggttgttttacaagcttcttattgataatgtggaagagttacttcctattgtctacactccaactgtcggtgaggcgtgtcaaaaatatggaagcctttttaagcgtccacagggtttatacatcagtttgaatgaaaaaggaagaatccttgaggtattgaagacctggcctgaaaaatcaatccaggtcatcgtcgtaactgatggagaaagaattttgggacttggtgaccttggctgccagggaatgggaatacccgtggggaaattggccctgtatactgcacttggaggagttagaccttccgcgtgcttgcctataaccattgacgtagggacaaacaatgagaagttattgaacgacgagttctacattggtctcagacaaaggagagcaactggacaggaatattatgactttcttcatgaattcatgtctgctgtgaagcaaaactatggcgaaaaaattctcgtacagtttgaagattttgcaaaccacaatgcttttgagctgttggctaaatatcgtacctcgcatttggtcttcaacgatgatatacaggggacagcttcagtcgtacttgcagggcttattgcatcccttaagctacttggaggtgcattatgtgatcatacattcttgttcctcggtgccggagaggctgggactggtattgcagaactcatagcacttgaaatttcaaacaagacaaatatacccgtggaggaaacacgaaaaaagatctggcttgtggactcaaagggtcttattgttagtggtcgcaaggaaacacttcaagccttcaagaagccttgggctcatgaacacgaacctgtcaacaatctcctagacgctgttaaggccgttaagccaactgtcttaattgggacatctggaactggaagaacatttacgaaggaagtagttgaggccatggcctgcatgaataagagacctcttattatggctctctcaaacccaacctcacaagctgaatgtactgctgaagaagcttatacttggagtgagggtcgcgctgtttttgccagtggaagtccattcccttcttttgaatacgatggaaaactcaacatccctggccaggcaaataactgttacatattccctggttttggttttggcttggtcatgtctggcacaatccgtgtgcacgatgacatgcttttagcagcttcggaagctctggctgctcaagtaaccgaggaacattacgccaagggaatgatataccctccttttgctgatatccgaaagatctcagctcacatagctgctagtgttgcagccaaagcgtatgaacttggtgtggcaacacgtcttcctcgacctgcagatttggtgaagtatgctgaaagttgcatgtatactcctaactaccgaagctacagatga

SEQ ID NO: 5900 - protein, 579 aa, Solanum lycopersicum
MESALKDLSTPTGGVEDVYGEDCATEDQCITPWTIAVSSGYNLLRDPRYNKGLAFTERERDAHYLRGLLPPVISSQELQEKKLMQSIRQYDVPLHKYVAMMELEERNERLFYKLLIDNVEELLPIVYTPTVGEACQKYGSLFKRPQGLYISLNEKGRILEVLKTWPEKSIQVIVVTDGERILGLGDLGCQGMGIPVGKLALYTALGGVRPSACLPITIDVGTNNEKLLNDEFYIGLRQRRATGQEYYDFLHEFMSAVKQNYGEKILVQFEDFANHNAFELLAKYRTSHLVFNDDIQGTASVVLAGLIASLKLLGGALCDHTFLFLGAGEAGTGIAELIALEISNKTNIPVEETRKKIWLVDSKGLIVSGRKETLQAFKKPWAHEHEPVNNLLDAVKAVKPTVLIGTSGTGRTFTKEVVEAMACMNKRPLIMALSNPTSQAECTAEEAYTWSEGRAVFASGSPFPSFEYDGKLNIPGQANNCYIFPGFGFGLVMSGTIRVHDDMLLAASEALAAQVTEEHYAKGMIYPPFADIRKISAHIAASVAAKAYELGVATRLPRPADLVKYAESCMYTPNYRSYR

SEQ ID NO: 5901 - DNA, 1923 bp, Vitis vinifera
  CDS (1)..(1923)
atgatctcgttgaacagcagtagtttcctgagcaactcgggcttttccgggatttctcggagcgtgtctcagaggaaggttctacctccggtagtgttggctttggggtccaacggcagagcaggggagctaaacgtcagcgctgtgatggagagtaccttgaaggagttgagggatggtaacacggtgcttgaggtggattcgaaatccgcggtcagtggtggggttcgggatgttcaaggcgaggatgccgccacagaggatcagattgttactccttggactataaccgtcgctagcggttattcgttattgcggaatccacatcataataaagggcttgccttcactgaaaaagagagagatcaccattatttacgtggccttctccctccagctgttgtctctcaagatcttcaggtaaaaaagttgatggccaatatccgccagtatactgttccattgcagaagtacatggcaatgatggatcttcaggaaagaaatgaaaagctgttctacaagctactcatggataatgttgaggagctactcccagttgtctataccccaacggttggtgaagcttgccaaaaatatggaggcatcttgaggcgtcctcagggccttttcattagtctgaatgagaaggggaagattcttgaggtactgaagaactggcctgagaagaatattcaagttattgttgtcactgatggggagcgaattttggggcttggggatcttggttgccagggtatggggataccagtagggaaactctctttatacaccgcacttggaggagttcgtccttcagcctgcttgccagttacaattgatgtgggaacaaacaatcagaaattattggatgatgagttctatatcgggctccggcagaagagggcaacagggcaggaatatgctgaacttatacatgaattcatgtgtgcggtcaagcagaactatggggagaaagtccttgttcagtttgaggactttgcaaaccacaacgcatttgatctgcttgcaagatatggtacaactcatctcgttttcaatgatgatattcagggaacggcatctgtggttcttgcagggcttatttcagcgctaaatttagttgggggaaccttagctgaacatacatttttattccttggtgctggagaggctggcactggaatagcagaactcatagctcttgagatgtcaaaacagacacaagctccactggaagagacccgcaagaagatttggcttgtggactcaaagggattgattgttagctcccgcatggattcacttcaacatttcaagaagccctgggctcatgagcatgagcctattaaaaatctcgtagatgctgttaaggcaatcaagccaacggtgttgattggatcttcaggagtaggcagaacatttactaaggaggtggttgaggccatggcctccttcaatgagaaacccatcattcttgctctctccaacccgacttcacaatctgaatgcacagctgaagaagcttatacatggagtgagggtcgtgccatttttgctagtggaagcccatttgaccccgtcgaatacaatggaaaagtttttgtgcctggacagtcaaataatgcatacattttccctggatttggtctgggtttgatcatctctggtgcaatccgtgtgcatgacgacatgcttttggcagcctcggaagctttggcaaaacaggcaacccaggagaacttcgacaagggaatgatatacccaccattctctaatatcagaaagatttcagcccatattgccgctaatgtggctgctaaagcttacgagcttggtttggctacccgtctccctcagccggaaaatctggtggagtatgctgagaactgcatgtacagccctgcatatcgatcattccggtga

SEQ ID NO: 5902 - protein, 640 aa, Vitis vinifera
MISLNSSSFLSNSGFSGISRSVSQRKVLPPVVLALGSNGRAGELNVSAVMESTLKELRDGNTVLEVDSKSAVSGGVRDVQGEDAATEDQIVTPWTITVASGYSLLRNPHHNKGLAFTEKERDHHYLRGLLPPAVVSQDLQVKKLMANIRQYTVPLQKYMAMMDLQERNEKLFYKLLMDNVEELLPVVYTPTVGEACQKYGGILRRPQGLFISLNEKGKILEVLKNWPEKNIQVIVVTDGERILGLGDLGCQGMGIPVGKLSLYTALGGVRPSACLPVTIDVGTNNQKLLDDEFYIGLRQKRATGQEYAELIHEFMCAVKQNYGEKVLVQFEDFANHNAFDLLARYGTTHLVFNDDIQGTASVVLAGLISALNLVGGTLAEHTFLFLGAGEAGTGIAELIALEMSKQTQAPLEETRKKIWLVDSKGLIVSSRMDSLQHFKKPWAHEHEPIKNLVDAVKAIKPTVLIGSSGVGRTFTKEVVEAMASFNEKPIILALSNPTSQSECTAEEAYTWSEGRAIFASGSPFDPVEYNGKVFVPGQSNNAYIFPGFGLGLIISGAIRVHDDMLLAASEALAKQATQENFDKGMIYPPFSNIRKISAHIAANVAAKAYELGLATRLPQPENLVEYAENCMYSPAYRSFR

SEQ ID NO: 5903 - DNA, 1779 bp, Aloe arborescens
  CDS (1)..(1779)
atggagagcatgatgaagagtctgagaggcgacgacgtgtcggtgctggatctcgatccgaagacagctgttggaggtggggtcggtgacgtgtacggcgaggaccgggcgactgaggagcagcaagtcacgccttggactgtttcagttgccagtggttactctttgttgagggatccacaccacaacaaagggcttgcctttagcgagaaagagagggatgcccattacttgcgaggccttttaccacccacatgcatcagtcaagagatccaagtaaaaaagatgttgcacaatcttcgccagtatcaggtgcccctccagcggtacatggcaatgatggatcttcaggagatgaatgagagacttttctacaagcttctcatcgatcatgttgaggaattgctcccggttgtttacacaccaacagtcggtgaggcttgccagaagtacggctgcatctttaggcgtccacagggtctttatatcagcttaaaagaaaagggaaagattcttgaggtgttgaagaactggcctgagaggaacattcaagttattgttgtcactgatggtgagcgcattttggggcttggcgatcttggttgtcaggggatgggaattcctgtaggcaagttgtccctttacactgccctaggaggcattcgtccttctgcatgcttaccagtcaccattgacgtggggacaaacaatgagcaacttttgaaggatgaattttatattggattgaggcaaaagcgtgctactggccaggaatatgctgagttactgcatgaatttatggctgctgtcaaacagaactatggggagaaagttcttattcagtttgaagactttgccaaccataatgcatttgagttactagcaaaatatagtacaagccatctcgtcttcaatgatgatattcagggaacggcttctgttgtacttgctgggcttgttgctgcactgaagttggttggtggaacattagcggagcacactttcttgtttctgggtgctggcgaggctggtaccggtattgcagagcttatagctcttgaaatgtcaaaacagacaaaagctccggtcgaagagactcgtaagaagatttggcttgtagattccaagggcttgatcgtgagctcacgcaaggatacactgcaacactttaagaagccttgggcacatgaacatgaacctgttgacactctcttaggggctgtgaagaccatcaagccaacagtgctgataggatcatccggagtggggagaactttcacgaaggaggtcatcgaggccatgtcctctttcaccgagaagccggtgattcttgcgctatcaaacccaacatcgcagtctgagtgtactgctgaagaagcatacacttggagtaagggccgagccatttttgccagcgggagcccatttgatccagttttatacaacggaaagctctttgtacccggccaggcaaataatgcttacattttccccggactcggtcttggactggtgatctccggagcaatacgtgtacatgacgacatgcttcttgcagcttccgaagcattggctcagcaggtgacgcaagagaatttcgccaatggactcatctatccaccttttagcataatcagaaagatctctgcccagatcgctgctaatgtagcagctaaagcttatgagctaggtcttgccactcgtctccctcgaccagcggaccttgtgaaatacgcagagagctgcatgtacaccccagcgtaccgcagttacagataa

SEQ ID NO: 5904 - protein, 592 aa, Aloe arborescens
MESMMKSLRGDDVSVLDLDPKTAVGGGVGDVYGEDRATEEQQVTPWTVSVASGYSLLRDPHHNKGLAFSEKERDAHYLRGLLPPTCISQEIQVKKMLHNLRQYQVPLQRYMAMMDLQEMNERLFYKLLIDHVEELLPVVYTPTVGEACQKYGCIFRRPQGLYISLKEKGKILEVLKNWPERNIQVIVVTDGERILGLGDLGCQGMGIPVGKLSLYTALGGIRPSACLPVTIDVGTNNEQLLKDEFYIGLRQKRATGQEYAELLHEFMAAVKQNYGEKVLIQFEDFANHNAFELLAKYSTSHLVFNDDIQGTASVVLAGLVAALKLVGGTLAEHTFLFLGAGEAGTGIAELIALEMSKQTKAPVEETRKKIWLVDSKGLIVSSRKDTLQHFKKPWAHEHEPVDTLLGAVKTIKPTVLIGSSGVGRTFTKEVIEAMSSFTEKPVILALSNPTSQSECTAEEAYTWSKGRAIFASGSPFDPVLYNGKLFVPGQANNAYIFPGLGLGLVISGAIRVHDDMLLAASEALAQQVTQENFANGLIYPPFSIIRKISAQIAANVAAKAYELGLATRLPRPADLVKYAESCMYTPAYRSYR

SEQ ID NO: 5905 - DNA, 1137 bp, Leuconostoc mesenteroides
  CDS (1)..(1137): transl_table=11
atggtaaatatggatgaagtgctttcaattcatcaagcacatacaggtgtactcgatattgaatcttgttttgatatcaccacaccaactgatttaagtgaagcatacacaccaggcgttgctggactagcgaaactcattgctaaagatacgtcaaaaaaacgcgattacacaatgagtggaaaactaattccagttattacagatggatctgctgttcttggtttaggcaatattgggccagcagctggtttgccaattgttgaaggtaaagcattaatctacaaaaattttgcaaatgttgatgctttacccatggcgttgaatcaaatgagtgttgatcaatttgttgatacagttaaagctattgcaccatcttttgctggtattcatttggaagacatttcggcacctaaggtgttcgaaattgaacgacgtttgagcaatgaacttgacataccggtttatcacgatgatcagacaggaacagcaattgttgtattagcgggtattatgaatgcagcaaaagttgttggtaaaaatgttcatgatttgaaaattgttgttaacggtattggtcgctgcactgcaggtgtggcaacaacaaaaattttgattgcggctggtatttgtaatattacattggtagatattaacggcgttattaatttgggagacgcaaattcaaacagttaccagcaagagcttgtacgtgaggttactcaagtagatggcaaaacattagacgatgttattgcaaatcaagatgtatttattggtttgtcagatgccaatgttttgagcggaaaacaagtagctcggatgaatgagaatcctatcatttttgcattagcaaatcctgtaccagaaatttcaccggatgatgctaaaaaagctggtgcagcagttattgctactggttcgtcacaatggccaaaccaagtcaataatgtacttgtatttcctggtttgtttaaaggcttgctagagagtggcattaaacacgtggacatggcacttcaacttaatgttgcacatgctttggcaaatatgattagtgagccagatgccacccacattgtaccagctgtctttgatgatgacgttggtgaactcggtagaaacagcagtagttga

SEQ ID NO: 5906 - protein, 378 aa, Leuconostoc mesenteroides
MVNMDEVLSIHQAHTGVLDIESCFDITTPTDLSEAYTPGVAGLAKLIAKDTSKKRDYTMSGKLIPVITDGSAVLGLGNIGPAAGLPIVEGKALIYKNFANVDALPMALNQMSVDQFVDTVKAIAPSFAGIHLEDISAPKVFEIERRLSNELDIPVYHDDQTGTAIVVLAGIMNAAKVVGKNVHDLKIVVNGIGRCTAGVATTKILIAAGICNITLVDINGVINLGDANSNSYQQELVREVTQVDGKTLDDVIANQDVFIGLSDANVLSGKQVARMNENPIIFALANPVPEISPDDAKKAGAAVIATGSSQWPNQVNNVLVFPGLFKGLLESGIKHVDMALQLNVAHALANMISEPDATHIVPAVFDDDVGELGRNSSS

SEQ ID NO: 5907 - DNA, 1776 bp, Nicotiana tabacum
  CDS (1)..(1776)
atggagagcgcgttgaaggagcagagaggaggagaatcggtgcttgacctgtcaccgagagcaacaccggcgggtggtgtcgaggatgtctacggtgaggattgcgccaccgaggaccagcttatcactccctggactatcgccgtttctagtggctacaacttgttgagggacccacgttacaacaaagggcttgccttcactgagagagaaagagatgctcattacttgcgaggccttctgcctcctgtgatttccacacaggagcttcaggagaaaaaaattatgcagtctcttcgccagtatgatgtccctctgcacaaatatgtcgccatgatggaattagaggaaagaaatgaaaggttgttttacaagcttcttatcgataatgtagaagagttacttccaattgtctacactccaactgttggtgaggcgtgccaaaagtatggaagcatctttaagcgtcctcagggtttatacatcagcttgaaagaaaagggaaggatccttgaggtattgaagaactggcctgaaagatcaatacaggttattgttgtgactgatggagaaagaattttgggacttggggacctcggctgccagggaatggggataccagttgggaagttggctctgtatactgcacttggaggagtcagaccttcagcgtgcttgccaataaccattgacgttgggacaaataatgagcagttactgaaagatgaattctacattggtctcagacaaaagagagcaactgggcaggaatactatgacttcctacatgagttcatgtcagctgtaaagcaaaattatggtgaaaaaattctcgtacagtttgaagattttgcaaaccacaatgcttttgagctgttggctaaatatggtaccactcatttggtcttcaatgatgatatacaggggacagcttctgtggtgcttgcagggcttattgcatcccttaagctacttggaggctcattagctgatcatacattcttgttcctcggagcaggagaagctgggactggtattgcagaactcatagcacttgaaatttcaaagaagacaaaatatcccgtggaggagacacgaaaaaagatctggcttgtggattcaaagggtcttattgttagtggtcgcaaggaaacacttcaatccttcaagaagccttgggctcatgaacacgaacctgttaacaatctcctagatgctgttaaggccattaagccaaccgtcttaattgggacatctggagttggaagaacatttacaaaggaagttattgaggccatggcctccacaaatgagagacctcttattatggctctctcaaacccaacctcacaagctgaatgtacagctgaagaagcttatacttggagtgagggtcgcgctgtttttgccagtggaagtccattcccttcttttgaatacaatggcaaactcaacattcctggccaggcaaacaactgttacatattccctggatttggttttgggttggtcatgtctggtacaatccgtgtgcatgatgacatgcttttagcagcttcggaagctttggctgctcaagtaactgaggaacattttgccaaggggatgatataccctccttttgctgatatcagaaagatctcagctcacatagctgctagtgttgcagccaaagcatatgaacttgttgtggcaacacgtctccctcgacctgcaaatttggtgaagtatgctgagagttgcatgtatactcctaattaccgaagctacaggtga

SEQ ID NO: 5908 - protein, 591 aa, Nicotiana tabacum
MESALKEQRGGESVLDLSPRATPAGGVEDVYGEDCATEDQLITPWTIAVSSGYNLLRDPRYNKGLAFTERERDAHYLRGLLPPVISTQELQEKKIMQSLRQYDVPLHKYVAMMELEERNERLFYKLLIDNVEELLPIVYTPTVGEACQKYGSIFKRPQGLYISLKEKGRILEVLKNWPERSIQVIVVTDGERILGLGDLGCQGMGIPVGKLALYTALGGVRPSACLPITIDVGTNNEQLLKDEFYIGLRQKRATGQEYYDFLHEFMSAVKQNYGEKILVQFEDFANHNAFELLAKYGTTHLVFNDDIQGTASVVLAGLIASLKLLGGSLADHTFLFLGAGEAGTGIAELIALEISKKTKYPVEETRKKIWLVDSKGLIVSGRKETLQSFKKPWAHEHEPVNNLLDAVKAIKPTVLIGTSGVGRTFTKEVIEAMASTNERPLIMALSNPTSQAECTAEEAYTWSEGRAVFASGSPFPSFEYNGKLNIPGQANNCYIFPGFGFGLVMSGTIRVHDDMLLAASEALAAQVTEEHFAKGMIYPPFADIRKISAHIAASVAAKAYELVVATRLPRPANLVKYAESCMYTPNYRSYR

SEQ ID NO: 5909 - DNA, 1926 bp, Ostreococcus tauri
  CDS (1)..(1926)
atgcgcgcgtgcgcgcgcgcggtgacgcgacgatggcgcccgggacgatggacgcgcgcgtcgttcggtgacggtggcgcgcgggcgccggcgatcggcgcggatggggacgatgacgcgcgagacgtgggtgaatgcgcgtggacgcggcgaccgcggcggcggacgtacgcgacgtcgcggacggaggacggcgacgacggcgcgccgcggacgatggtgccgtggaatcgaacggtgatctccggggtggagctgctaaggagtgggaggtataataaaggcatgagcttcgcgcgggacgagcgggatcgattgaacctgcgcgggttgctcccgccggcggtgttcgatcaggcgacgcaggttgaacgcgtgatcgagcggttgcgacgcgtgacgagtggggtggagaagcacgcgtggttgccggcgttgtacgagcggaacgagcggttgttttatcgcgtggtgaaggatcacttggaggaactgcttccggtgctcgccgagccgacggtgtggcaggtgtgtcgcgaggctggattgatgtatcgtcaacccagaggtttatacgtgtcgatgcaagataaggggtcggtgtatcggttgctgaagaattggccggtgaggaacgtcaaagcggtggtgctcacggacgggcagcgcgtgacgggaatcggcgatttgggcgtgcagggaatgcccgcggcggtgagtaaggcgtcgctcttcaccgcgctcgggggattagatcccgcggacgtgttgccgatatgtatagacgtcggcaccgataatcaaactctgctcgaggacaagttttacatcgggttgagacagaagcgcgtcggcggagaggcgtacgaggagttgttggatgaagtcgtctccggcttgaagcgacgattcggaccgcgcgtgcttttgtgtttcgaggagttctcgaacgcgaacgccaaaaagctactcagtagatataaccgcgactcagtggcgtacgttgacgatctgcaaggcgtcgcggcgataaccttggcggcggtcatctcctcgctgccgcgtatgggcgggtctctgctcgatcagaggtttctcttcgcgggcgcgggcgagaccggggcgcacgccgctgatttacttgcgacgtacatcgcccaagaacacgggatcacgcttcccgaggcgagaaagaacatgtacttcatcgacagaaagggattgctcacgcgaagacgcgccgagcaagaggacgatttggagttccacaagttgccgtacgcgcacgacattccggacggatgcgggaagacggtgttagagtcggtagagctcctcaaacccacggcgttgatcggcgttcgtaggcatcgtttctcattcttcgagggctccaagctctgcgacgaaaagctcttcactacggacgttctcggcgcgatggccaagcacaccgagcggccgctcatcatggcgctatcgcgtcccgccgcgctccacgagtgtactgcagaggaggcgtacgcggcgaccgacggtcggtgcatatttgtcggtgcttgccgctcgacatcgtttgagtttggcggacgaacgatttcgccatccgagtgcagcacggattacatttatcccggactcggcctcggtctggcgattgccgagggtacgcgacttcgtgattcgctcattatcgaagccgcacaagccgtggctgcgtctacaacagacgccgacatcgaccaaggcgcggtattcccacgaaagcgtctcattccagatgtgagcgcgcgtgtcgccgcgcgcgtcgcttccaaagccttcgcgagcggcttatcggcgttacccgtgaaaccaaaaggtgattggctcggactcgccaaatcgtggatgttcgaccccacgtaccgaccgtacacccactga

SEQ ID NO: 5910 - protein, 641 aa, Ostreococcus tauri
MRACARAVTRRWRPGRWTRASFGDGGARAPAIGADGDDDARDVGECAWTRRPRRRTYATSRTEDGDDGAPRTMVPWNRTVISGVELLRSGRYNKGMSFARDERDRLNLRGLLPPAVFDQATQVERVIERLRRVTSGVEKHAWLPALYERNERLFYRVVKDHLEELLPVLAEPTVWQVCREAGLMYRQPRGLYVSMQDKGSVYRLLKNWPVRNVKAVVLTDGQRVTGIGDLGVQGMPAAVSKASLFTALGGLDPADVLPICIDVGTDNQTLLEDKFYIGLRQKRVGGEAYEELLDEVVSGLKRRFGPRVLLCFEEFSNANAKKLLSRYNRDSVAYVDDLQGVAAITLAAVISSLPRMGGSLLDQRFLFAGAGETGAHAADLLATYIAQEHGITLPEARKNMYFIDRKGLLTRRRAEQEDDLEFHKLPYAHDIPDGCGKTVLESVELLKPTALIGVRRHRFSFFEGSKLCDEKLFTTDVLGAMAKHTERPLIMALSRPAALHECTAEEAYAATDGRCIFVGACRSTSFEFGGRTISPSECSTDYIYPGLGLGLAIAEGTRLRDSLIIEAAQAVAASTTDADIDQGAVFPRKRLIPDVSARVAARVASKAFASGLSALPVKPKGDWLGLAKSWMFDPTYRPYTH

SEQ ID NO: 5911 - DNA, 1776 bp, Medicago truncatula
  CDS (1)..(1776)
atggagagcacacttaagtcctttagagatggtgagtcggtgctggacctcagcccaagatccgccgttggtggcggtgttgaggatgtctacggtgaagattgtgctactgaggatcaacttgtcaccccttggaccttctctgttgccagtgggtactctttgctgagggatccacaatacaacaaagggcttgctttcaccgagaaagagagggatgcgcattatttgcgtggcctcttacctcccactgtcagcagccagcaacttcaggagaagaagcttatgcacaacatccgccaatatgaggttcctttgcaaaagtatgtggccatgatggaccttcaggagaggaatgaaagattgttttacaaacttcttattgacaacgtcgaggaattgctcccaattgtatatactccggttgttggtgaggcttgccaaaaatatgggagcatatacaagcgtcctcagggtctatatattagtttgaaagagaagggaaaaattcttgaggttttaaaaaactggcctgagagaagtattcaagttattgttgtaactgacggtgagcggattttaggactcggagatcttggatgccagggtatgggaattcctgttggtaaattggctctgtactccgcactaggtggagttcgtccttcagcatgtttaccagttacaatcgatgtggggacaaataatgagaaattactgaatgatgagttttacatcggccttagacaaaagagggcaactgggaaggaatactatgaccttctgcacgagttcatgactgcagtgaagcaaaactatggtgaaaaagttctagtacagtttgaagattttgcaaatcacaatgcttttgaattgcttgcaaaatacggtacaactcatcttgttttcaacgacgatatacaggggactgcagctgttgttctagctggagttgtagcatccctgaagttgattggtggtaccctacctgagcatacattcctcttcctcggtgctggagaagcaggaactggtatagctgagctaattgctcttgagatgtcaaagcagactaaggcacctatagaagagagtcgtaagaagatatggcttgtagactcaaagggtttaattgttagttcacgagcgaattcacttcaacacttcaagaagccttgggctcatgaacacgagcctgttagcactctcctagatgctgttaagataatcaagcctacggttctgattggatcatcaggagtgggaaaaacatttacaaaggaagtagttgaggctatgacagaaatcaataaaattcctctcattttggctctttccaatccaacctcacagtctgagtgtacagctgaggaggcatacacatggagtgagggtcgtgctattttcgctagcgggagtccatttgatcctgttgaatacaaaggcaaaacttattattctggccagtccaacaatgcttacattttcccaggctttggtttgggtatagtgatgtcgggagcaatccgagtacatgatgatatgcttctagcagcctcggaagccttagcgaagcaagtgacagaggagaactacaaaaagggcttgacgtatccacctttctctgatatcagaaaaatttcggccaacatagctgcaaatgttgctgccaaggcatatgaactaggcttggctacacatcttcctcgtcctgagaatcttgtcaagtatgctgagagttgcatgtattcccctctgtaccgcaactataggtga

SEQ ID NO: 5912 - protein, 591 aa, Medicago truncatula
MESTLKSFRDGESVLDLSPRSAVGGGVEDVYGEDCATEDQLVTPWTFSVASGYSLLRDPQYNKGLAFTEKERDAHYLRGLLPPTVSSQQLQEKKLMHNIRQYEVPLQKYVAMMDLQERNERLFYKLLIDNVEELLPIVYTPVVGEACQKYGSIYKRPQGLYISLKEKGKILEVLKNWPERSIQVIVVTDGERILGLGDLGCQGMGIPVGKLALYSALGGVRPSACLPVTIDVGTNNEKLLNDEFYIGLRQKRATGKEYYDLLHEFMTAVKQNYGEKVLVQFEDFANHNAFELLAKYGTTHLVFNDDIQGTAAVVLAGVVASLKLIGGTLPEHTFLFLGAGEAGTGIAELIALEMSKQTKAPIEESRKKIWLVDSKGLIVSSRANSLQHFKKPWAHEHEPVSTLLDAVKIIKPTVLIGSSGVGKTFTKEVVEAMTEINKIPLILALSNPTSQSECTAEEAYTWSEGRAIFASGSPFDPVEYKGKTYYSGQSNNAYIFPGFGLGIVMSGAIRVHDDMLLAASEALAKQVTEENYKKGLTYPPFSDIRKISANIAANVAAKAYELGLATHLPRPENLVKYAESCMYSPLYRNYR

SEQ ID NO: 5913 - DNA, 1173 bp, Enterococcus faecalis
  CDS (1)..(1173): transl_table=11
gtgttagaagaagttctagcaattcatcaaaaaaatattggtgtgctaagtcttgaagcaacagaagcggtgttaaaccatcatgatttagccaaaatgtatacacctggtgtcgcagaattgagtttaatgattgctcaaaatcatgaattagcgcgcgagtggaccattagtggtaagttaattgcggttattacagatgggtcagctgttctgggtctcggcaatatgggcacgcaagcgggcttgccaattgttgaaggcaaagctttactttataaaaatttggcgggggtcgatgctattcctttagcactggaacaaaaatcagttgacgagatggttcaaacaattgaaaatttacaaaatagttttgcaggaatccacttagaagatatttctgcaccaaaatgttttgaaattgaagaaaaacttcaacaacgtttgaacattcctgtgtatcatgatgaccaagaaggcactgccattgtcgttttagctgggctaattaacgcagctaaaattaaaggaaaacctttaaatgaattacgtgtggtgattaacggagttggagcttctggtgtagcgaccgctaagttatgtattcaagcggggattacgcatctcaccttagtagatcgccaaggtgttttaagagaagaagacccgacattgaatccttaccaacgtgctttgcttcgacaggtaataaaaccatcagtagaaaacaaagatttagccaccgctgtcgtcaatcaggatgtttttttaggcttatcagaagcggatgtgctaacgccagccctgattaaatcaatgaaccaagacccaattatctttgctttagcaaatcctaaaccagaaattgaaccagacctcgcccaagccaatggcgtccgtttattagcaactggttcttccaaatatccgaatcaagtgaacaacattttagcttttccaggtctttttaaagggttattggcagcgaaaggcagaaaagtcgatgtcggtttgcaaatgacagtagcacgaagcttggccgctatgatttcagaacccacagcagaaaaatttatacctaatgtatttgatggcggcgtagttgacacggtttttaatgctgtactagactatataaaacaagaaaagaccacggcagaagaagggacgtaa

SEQ ID NO: 5914 - protein, 390 aa, Enterococcus faecalis
MLEEVLAIHQKNIGVLSLEATEAVLNHHDLAKMYTPGVAELSLMIAQNHELAREWTISGKLIAVITDGSAVLGLGNMGTQAGLPIVEGKALLYKNLAGVDAIPLALEQKSVDEMVQTIENLQNSFAGIHLEDISAPKCFEIEEKLQQRLNIPVYHDDQEGTAIVVLAGLINAAKIKGKPLNELRVVINGVGASGVATAKLCIQAGITHLTLVDRQGVLREEDPTLNPYQRALLRQVIKPSVENKDLATAVVNQDVFLGLSEADVLTPALIKSMNQDPIIFALANPKPEIEPDLAQANGVRLLATGSSKYPNQVNNILAFPGLFKGLLAAKGRKVDVGLQMTVARSLAAMISEPTAEKFIPNVFDGGVVDTVFNAVLDYIKQEKTTAEEGT

SEQ ID NO: 5915 - DNA, 1737 bp, Drosophila simulans
  CDS (1)..(1737)
atgagcaaacccgattcgaaactagataaatacgcgcaacgcgatcgcctgggcctttggggcactggtgacaatgaggtggtcggcagcctctccggattcacccgactcttggacaagcgctactcaaagggcctggccttcacacacgaggagcgccagcagttgggcatccatggcatgctgccctatgtggtccgtgagcccagtgagcaggtggagcactgccgcgctctgctggcgcgactggagcaggatctggacaagtacatgtacctgatcagcttgtcggagcggaacgagcgtctgttctacaacgtgctcagctcagacatcgcctccatgatgccactggtgtacacgcccaccgtgggattggcctgccagcgctacagcttgatccaccagaacgccaagggcatgttcatatccatcaaggacaagggacacatctacgacgtgctgaagaactggccggaaacggatgtgcgtgccatcgtcgtcacggacggcgagcgcatcctgggactgggtgatctgggcgccaacggcatgggcatacccgtgggcaaactgtccctgtatacggccttggcgggcattaagccatcgcagtgcctgcccatcaccttggatgtgggcaccaataccgaatccctgctggaggatcccctgtacatcggtctgcgcgaacgcagggccactggagatctgtacgatgagttcatcgatgagttcatgcacgcctgcgtccgtcgctttggccaaaactgcctaatccagttcgaggactttgccaacgccaatgccttcaggctgttgtccaagtaccgcgactccttctgcaccttcaacgacgatattcaaggaaccgcatcggtggccgtggctggactgctggcctcgctgaagatcaagaagacccagctgaaggacaacacgctgttgttcctgggcgccggagaagcggctcttggtattgccaacctgtgcctgatggccatgaaggtggagggtctcaccgaggaggaggccaaggcccgcatctggatggtggacagccgtggtgtcatcacccgcgatcgtccaaagggcggactcaccgaacacaagctgcactttgcccagctgcacgagcccatcgatactttggctgaggcggtgcgcaaagtgcgtcccaatgtcctgattggagcggctgcgcagggcggcgccttcaaccaggagatcctcgagctgatggccgatatcaacgagacgccgatcatctttgcactgtccaatccgaccagcaaggcggagtgcaccgccgaggaggcgtacacgtacaccaaggggcgctgcatcttcgccagcggatcgccttttgctcccgtgacgtacaacaacaagaagttctatccgggtcagggcaacaactcgtacattttccctggcgtggcactgggtgttctgtgtgccggcatgctgaacattcccgagcaggtattcttggtcgccgccgagcgcttggcggagctggtctccaaggatgacctggccaagggcagtttgtatccaccactcagctccattgtcagctgttcgatggccattgccgaaaggattgtggagtacgcctacaagaacggattggccactgtccgcccagagccggtcaataagctggcgttcatcaaggcccagatgtacgatctggactatccccgatccgtgcccgccacctataagatgtag

SEQ ID NO: 5916 - protein, 578 aa, Drosophila simulans
MSKPDSKLDKYAQRDRLGLWGTGDNEVVGSLSGFTRLLDKRYSKGLAFTHEERQQLGIHGMLPYVVREPSEQVEHCRALLARLEQDLDKYMYLISLSERNERLFYNVLSSDIASMMPLVYTPTVGLACQRYSLIHQNAKGMFISIKDKGHIYDVLKNWPETDVRAIVVTDGERILGLGDLGANGMGIPVGKLSLYTALAGIKPSQCLPITLDVGTNTESLLEDPLYIGLRERRATGDLYDEFIDEFMHACVRRFGQNCLIQFEDFANANAFRLLSKYRDSFCTFNDDIQGTASVAVAGLLASLKIKKTQLKDNTLLFLGAGEAALGIANLCLMAMKVEGLTEEEAKARIWMVDSRGVITRDRPKGGLTEHKLHFAQLHEPIDTLAEAVRKVRPNVLIGAAAQGGAFNQEILELMADINETPIIFALSNPTSKAECTAEEAYTYTKGRCIFASGSPFAPVTYNNKKFYPGQGNNSYIFPGVALGVLCAGMLNIPEQVFLVAAERLAELVSKDDLAKGSLYPPLSSIVSCSMAIAERIVEYAYKNGLATVRPEPVNKLAFIKAQMYDLDYPRSVPATYKM

SEQ ID NO: 5917 - DNA, 1788 bp, Aspergillus oryzae
  CDS (1)..(1788)
atggctcgtctcccttcacaacaaggccgtcaggtccatgcgacctcgacgtcgtatgtgaaccatgccgctccagtagaagccaactatgatacagccaaccctccgtacatccgcaagtacctccgcacgtacggcctgactcctccgcgcgcagaatcctacgaggttcagaaaacaagatgtctggctcaattggccttgaagcaaaccgccattgacaaatttctctacctgagcactcttcgcaagaacaatgtgcatctattctaccgtctggtgacggatcatctgagggaacttacccctctgatctataccccggtcgtcggtgaagcttgccagagatggtccgagatctaccagcaaccggaaggtatgtacttaagttgggaagatcgcggcaatcttgctgctgtcattgccaattggccccagcccaatgtggagatcacatgcatcaccgatggctcccgaattctcggcctcggcgaccttggcattaatggaatgggcattcccattggcaagttggcgctctacactgcatgtgcaggtattcgccccgaggccaccctgcctttgactttggatctgggaacaagcaacaagaccctccgggaagacccgttgtacatgggtagcaatcgtgacaagattacgccggaagaggagcgggagttcatggatgagttgatgtctgctcttacggagcgttggcctggcattgtcattcagttcgaagacttcaagaaccccttccctgccttggagcgttaccgtgatatttacacgtgcttcaacgatgatattcagggcacaggagccgtcatcctgggtggagtcatcaacgccgtgaagcgctcgggccttccttgcaaggatcaccgtgctgtcttctttggtgcgggaagtgccggtgtcggcgttgctaaacaaattgttgctttctttatgcgtgagggcatgactgaggatgaggcccggtcctgcttctacctggtcgacaccaagggtctcgtcaccaatgaccgtggcgacaagctcgccgagcacaaggtctacttcgcccgagaggacaatgaaggccagcagtacaagaccctggaggaggttgtcgactatgtgaagccaactatcctcatgggtttgtcaaccattggtggtgtcttcaccccagagatcctacgcaagatggccgactggaacaccgctcctatcattttccctctctccaacccctcctccaagtccgaatgtgacttcgagaccgctattactcacactgatggtcgggctctctttgcctctggctcccccttccagcccttctcattcaccaactctgctggagagactcgcacctactatcccggccaaggcaacaacatgtatgtcttccctggtatcggtctgggtacaatcctctccaaggccgtcaagatcaccgacagcatgatctatgcgtcgggtgcggccctctcgcaggccctgactgcggaggagatcgagcgcggtctcctctaccccgacttgacccggatccgccaggtcagcgttgtggtgacgcgcaaggttatccgcgctgcacaggaagacaaggttgatcgtgagactgccttgcgcagcatgaacgatgacgcgcttgatgcctggatcaaggcccgcatgtatgatgctcacagcgaagttctggccttggagagggaagttggtgccctcctgcacaacttgaacccagcctcacttttgaacgggctgtcaagtgaagagaatgccaaactgtaa

SEQ ID NO: 5918 - protein, 595 aa, Aspergillus oryzae
MARLPSQQGRQVHATSTSYVNHAAPVEANYDTANPPYIRKYLRTYGLTPPRAESYEVQKTRCLAQLALKQTAIDKFLYLSTLRKNNVHLFYRLVTDHLRELTPLIYTPVVGEACQRWSEIYQQPEGMYLSWEDRGNLAAVIANWPQPNVEITCITDGSRILGLGDLGINGMGIPIGKLALYTACAGIRPEATLPLTLDLGTSNKTLREDPLYMGSNRDKITPEEEREFMDELMSALTERWPGIVIQFEDFKNPFPALERYRDIYTCFNDDIQGTGAVILGGVINAVKRSGLPCKDHRAVFFGAGSAGVGVAKQIVAFFMREGMTEDEARSCFYLVDTKGLVTNDRGDKLAEHKVYFAREDNEGQQYKTLEEVVDYVKPTILMGLSTIGGVFTPEILRKMADWNTAPIIFPLSNPSSKSECDFETAITHTDGRALFASGSPFQPFSFTNSAGETRTYYPGQGNNMYVFPGIGLGTILSKAVKITDSMIYASGAALSQALTAEEIERGLLYPDLTRIRQVSVVVTRKVIRAAQEDKVDRETALRSMNDDALDAWIKARMYDAHSEVLALEREVGALLHNLNPASLLNGLSSEENAKL

SEQ ID NO: 5919 - DNA, 1158 bp, Lactobacillus reuteri
  CDS (1)..(1158): transl_table=11
atggaagataaagaaatactctcaatgcatgctaagaaccaaggagtacttaatattgcacctcaatttgaagtgaaaaatcgaaaagaattaggtgaagcgtatactccaggagttgcgataatctctaagcttatagaacgttatcccgaactaaaggataaatatactcttagtggaaaacttgtagcattagtaacagatggctctgctgttttgggattaggaaacattggcccagccggtggtcttccagttgttgaggggaaagcattactttataaggatttggctaatgttaatgcactacctttaactgttgagcaagttcctgttaatgaatttgtagcaacattaaagaatatgcaggaatcttttgcgggttttcatttagaagatattaaagcacctcgttgttttgaaatcgaagagaaattgtctaaagtagttaatattccagtttatcatgatgatcaagaaggaacagcaattgttgttttggctggattaattaatgctgctagagtagtaaagaaaaatctgaaagatttgaaagtcataattaatggagttggagcgtcaggagttgcaacagctcgattactttttgcggcaggtattaaaaatattacatttgttgatattgatggaccagtgcatgttgatagtcaaaattataatcattatcaaacagatttagtaaaacaaagtgctgatcaaactccttataagaatttaagtgaagcggtaaaggatcgggatgtttttatcggtctttctgatgcagatgttttaacaagtgaacaagtaaagacaatggctaagaatccaattatttttgcacttgcaaatccaaagcctgagattgatcctcaaattgcaaaagatgcagatgcagcagtaatggcaactggctcaagtcaatacccaaatcaagtaaataatattttggtatttcccgggttatataaaggattattatcagctgatttaaataaagtcgatttcggccttgaaaaagcaattgcttctgcattagcaaatatgatttctaatccaacagctgaaaaaattgttcctggagtatttgatgatggtgtagtaaatacagtagctaaagctgttcaacattatgcaagtcaaaagaataacgattag

SEQ ID NO: 5920 - protein, 385 aa, Lactobacillus reuteri
MEDKEILSMHAKNQGVLNIAPQFEVKNRKELGEAYTPGVAIISKLIERYPELKDKYTLSGKLVALVTDGSAVLGLGNIGPAGGLPVVEGKALLYKDLANVNALPLTVEQVPVNEFVATLKNMQESFAGFHLEDIKAPRCFEIEEKLSKVVNIPVYHDDQEGTAIVVLAGLINAARVVKKNLKDLKVIINGVGASGVATARLLFAAGIKNITFVDIDGPVHVDSQNYNHYQTDLVKQSADQTPYKNLSEAVKDRDVFIGLSDADVLTSEQVKTMAKNPIIFALANPKPEIDPQIAKDADAAVMATGSSQYPNQVNNILVFPGLYKGLLSADLNKVDFGLEKAIASALANMISNPTAEKIVPGVFDDGVVNTVAKAVQHYASQKNND

SEQ ID NO: 5921 - DNA, 1170 bp, Streptococcus bovis
  CDS (1)..(1170): transl_table=11
atgtcaacaaaagatgtaaaagaattagcgattgagcaagcaaaaaaatttgggggaaaattagaagtctgtcctaaagttccgattgaaacaaaagcagatttaggaattgcctacacaccaggtgttgcggctgtttcttctgccatatatgaaaaaaaagaacgcgcttacgaattaacgacaaagaaaaacaccgtcgccgttatcagtgatggttcagcagttttaggtttaggtaacattggtcctgaagcagcgatgcctgtcatggaaggaaaagctgcattgtttaaacgctttgctggtgtggattcgattccccttgttttagatacacaagataccgaagaaattattcaaacggtgaaatttttggctccaacctttgggggaattaacttggaagatatcagcgctcctcgttgttttgaaattgaacagcgtttaatcgatgaactagatattcccgttttccatgatgatcaacacgggacagcgattgttgttctagcggctttgtacaacagcttaaaattaatcaacaagaaaatagaggacattcatgtggtaatcaacggtggtggctccgctggtctttcgatcacaagaaaatttttagctgctggcgtaaaacatattatcattgttgaccgtacagggattctgagcgaaacagatacagctctgccaccacaccacgcagaaattgcgaagctaaccaatcgggaacaccgtaccggtgatttagctactgctcttgaaggagctgatgtctttgttggtgtttcggcaccaggtgttttaaaacctgagtggattcaacagatgaatgagcagccagttatttttgcaatggctaacccagttcctgaaatttttcctgatgaagctttagcggcaggcgcttatattgtcggaactggtcgtagtgactttccgaatcaaattaataatgtgttggccttccctggtatcttccgcggtgccttagatgctcgagcgaaaaagattacgattgaaatgcaaattgccgctgccaaaggtattgcaaaattgattcccgataatgaactcacgccgaccaatattattcccgatccattccaagaaggagtcgcaaaagtcgtcgccgaaagcgtccgtaacgctgtcaaagaaacaaattaa

SEQ ID NO: 5922 - protein, 389 aa, Streptococcus bovis
MSTKDVKELAIEQAKKFGGKLEVCPKVPIETKADLGIAYTPGVAAVSSAIYEKKERAYELTTKKNTVAVISDGSAVLGLGNIGPEAAMPVMEGKAALFKRFAGVDSIPLVLDTQDTEEIIQTVKFLAPTFGGINLEDISAPRCFEIEQRLIDELDIPVFHDDQHGTAIVVLAALYNSLKLINKKIEDIHVVINGGGSAGLSITRKFLAAGVKHIIIVDRTGILSETDTALPPHHAEIAKLTNREHRTGDLATALEGADVFVGVSAPGVLKPEWIQQMNEQPVIFAMANPVPEIFPDEALAAGAYIVGTGRSDFPNQINNVLAFPGIFRGALDARAKKITIEMQIAAAKGIAKLIPDNELTPTNIIPDPFQEGVAKVVAESVRNAVKETN

SEQ ID NO: 5923 - DNA, 2511 bp, Xanthomonas oryzae pv
  CDS (1)..(2511): transl_table=11
ttgatgcttcctgcggccctgtcttccgtcggtattgccggcgggatgcagggccgttttcgcgttgagccacactccgcgccgcgcacgccgcgttgcagcatgcgatctccctgccgcgctgacagctgcgcgacaggcccttgttcaggcaggagggtagaattcagttctcctgcgccttcgagacacacacagccgatgtccaccgacgacttcaaacaggccgccctcgactatcaccgccagcagccggcgggcaagatcaaggtcaccgcgaccaagccgatgctgacccagcgcgatctgtcgctggcgtattcgccgggcgtggccttcgcctgcgaggccatcgtcgacgatgccacccaggccagcgagctcaccgcgcgcggcaatctggtggcggtcatcaccaacggcaccgcggtgctgggcctgggcaacatcggtccgctggcctccaagccggtgatggaaggcaagggcgtgctgttccagaagttcgccggcatcgacgtgttcgatatcgaaatcagcgagaacgacccggacaagctggtcgatatcatcgccagcctggagcccaccttcggcggcatcaatctggaagacatcaaggcgcctgagtgcttcatcgtcgagcgcaagctgcgcgagcgcatgaacatcccggtgttccatgacgaccagcacggcaccgcgatcatcgtcggcgctgccgtgctcaacgcgctggtggtcactggcaagaagatcgaggaggtcaagctggccaccaccggcatgggcgcggcgggcatttcctgcgtcaacatgctggtctcgctgggcctgaagccggagaacatcctggcgctggaccgtgacggcgtgatccacaccggccgcaccgacctggacccggacaagcagcgctatgcgcgcgacaccgacaagcgcaccctggccgagatcgtcgaaggcgcggatatcttcctgggcctgtcggcggccggcatcctcaagccggagatggtcgccagcatggcgcgccagccggtgatcttcgcgctggccaatcccaacccggaaatcaccccggaagcggccaaggcggtgcgcccggattgcatcatcggcaccggccgttcggactatccgaaccagatcaacaacgtgctgtgcttcccgtatctgttccgtggcgcgctggacgtgggcgccaccggcatcaatgaggaaatgaagatcgcctgcgtcaaggcgatcgccgcgatggcgcggcgcgaggcctccgacctgggcgcagcctacggcggcgagaccccgagcttcggcccggaatacctgattccgcgtccgctcgacccgcgtctgctggtggagttgtcgtctgcggttgcgcaggcggcgatggattcgggcgtggccacgcgcccgatcaccgacatggaggcctaccgcgacaagctcggccagttcgtctaccgcaccagcctgatgatgaagccggtctacgaccgtgcgcgcgccgacaagcagcgcgtggtgtatgccgaaggcgaagaagaagtggtgctgcgcgcggtgcagaacgtggtcgacgaaggcctggccttcccgatcctgatcggccgccctgacgtcatcgaagcgcgtatcgagcgcatgggcctgcgcctgaccgccggcgtggacttcgagatcaccaacatcctcgacgacccccgcttcaacgattactggcagtactaccacgcgctcaccgagcgccgcggcgtgaccgtcaccgcggccaaggaactgatgcgctcgcgtccgaccctgatcgcggcggtcatggtggcgcgcggcgaagccgacgcgatgctgtccggcgtggtcggccgcttccacaagaagctgggctatgcgcgcagcgtgattccgctggaaccgcgggtgagttccacctcggcgatgaccggcgtgatcaaccagctcggcgtgttcttcttcctggacacgcacgtgcaggaagaccccaccgtggagcaggtggtggaagccacgttgcaggccgcgtatcgcctcaagctgttcggcatcgagcccaatatcgcgttgctgtcgcattccaacttcggcagccacgactcgcgcgatgcgctgaagatgcgccaggtgcgcgaagcactgctcaagcgcaagcccgagctcaacatcgacggcgaaatgcagggcgataccgcctgggacgaagcgctgcgcaagcagatcatgcccaacagcaccttgaagggtcgcgccaacctgttcgtgctgccgaacctggaagcggccaacatcgcctacaacctggtgcgcgtgttcaccgatggcgtggcgatcggcccgatcctgatgggcatctccaagccggtgcatatcctcaccaccagcgccacctcgcgccgggtgatgaacatgaccgcgattgccgcagtggatgcacagatccgcaagctgctggaagccgagaagggcggggcagacaagagcaacgactga

SEQ ID NO: 5924 - protein, 836 aa, Xanthomonas oryzae pv
MMLPAALSSVGIAGGMQGRFRVEPHSAPRTPRCSMRSPCRADSCATGPCSGRRVEFSSPAPSRHTQPMSTDDFKQAALDYHRQQPAGKIKVTATKPMLTQRDLSLAYSPGVAFACEAIVDDATQASELTARGNLVAVITNGTAVLGLGNIGPLASKPVMEGKGVLFQKFAGIDVFDIEISENDPDKLVDIIASLEPTFGGINLEDIKAPECFIVERKLRERMNIPVFHDDQHGTAIIVGAAVLNALVVTGKKIEEVKLATTGMGAAGISCVNMLVSLGLKPENILALDRDGVIHTGRTDLDPDKQRYARDTDKRTLAEIVEGADIFLGLSAAGILKPEMVASMARQPVIFALANPNPEITPEAAKAVRPDCIIGTGRSDYPNQINNVLCFPYLFRGALDVGATGINEEMKIACVKAIAAMARREASDLGAAYGGETPSFGPEYLIPRPLDPRLLVELSSAVAQAAMDSGVATRPITDMEAYRDKLGQFVYRTSLMMKPVYDRARADKQRVVYAEGEEEVVLRAVQNVVDEGLAFPILIGRPDVIEARIERMGLRLTAGVDFEITNILDDPRFNDYWQYYHALTERRGVTVTAAKELMRSRPTLIAAVMVARGEADAMLSGVVGRFHKKLGYARSVIPLEPRVSSTSAMTGVINQLGVFFFLDTHVQEDPTVEQVVEATLQAAYRLKLFGIEPNIALLSHSNFGSHDSRDALKMRQVREALLKRKPELNIDGEMQGDTAWDEALRKQIMPNSTLKGRANLFVLPNLEAANIAYNLVRVFTDGVAIGPILMGISKPVHILTTSATSRRVMNMTAIAAVDAQIRKLLEAEKGGADKSND

SEQ ID NO: 5925 - DNA, 1944 bp, Flaveria bidentis
  CDS (1)..(1944)
atgatttccttgaactcttcatttcttgagaggagctccgttgccggaggctcgaggacgcaatcgcagtcgttgaggttgtcggtgaggcgtcctgtggtggcgtctatgctgaattccaacagcctaccggagagaaacgtcaacgtttcggtggatagtgctgtgagggatgtgaatgctccggtggcggtggaagttgatcgttctgttggtgaaaaaccatttgcagttgttggtggtggtgttgaggatatgtacggtgaggataccgccaccgaggatcagtatatcactccgtggtctgtttctgtcgccagcggctattcgttgttgcgggacccacaccacaataaaggtctggcctttactgagaaagaacgagatgcccattttctacgtggtcttcttcctccagttgttgttaatcacgatcttcaggtaaaaaagatgatgcataatatccgccaatatcaagtacctctacagaggtaccaagccatgatggatcttcagcaaagaaatgagaggttattctacaagctattaattgagaatgttgaggagcttctcccaattgtatatacaccaaccgttggtgaagcatgccaaaaatacgggagcattttcgagaactcacagggtttatttattagtttaaaagacaagggtagaattcttgagatattgaagatttggccacataaaaaaattcaagttatagttgtcacagacggtgaacgaatcttaggtctaggagaccttggctgtcagggaatgggcatacctgtgggaaagctcgctctgtacacagctcttggaggagttcgcccctcagcttgtttgccgataaccattgatgttggcaccaataatgagaagttgttgaacgatgaattctacattggtttaaagcaaaagagagctgctgggcaggagtatgctgaacttatgaatgagttcatgtctgctgtcaagcagaattatggggaaaaggtcctcattcagtttgaggattttgcaaaccacaacgcctttgatcttcttgaaaagtacagaaccacccatcttgtgtttaacgatgatatacaggggacagcttccgtggtgcttggagggcttatttctgcactaaaattagttggtggatctttggcagaccaaaaatttttattccttggagctggagaggctggcacaggcattgctgaactcatagctctggagatatcaaaacagacaaatattccattagaagagagccgcaagaaggtttggcttgcggactcaaagggtttgattgttaaatcccgcctagattcactacagcatttcaagaagccctgggcccatgatcatgaacctgttaatgaattcttggatgctatcaagacaatcaagccaacagtgttaattggatcatcagggacaggacagactttcacaaaagaagttgttgaaactatgtcatcacttaatgagaaacctattattcttgctctttccaacccaacttcacaatctgaatgtaccgctgagcaagcttatacctggagtgagagtcgtgctatattcgccagtgggagtccctttaagcctgttgaatataatggaaagctctatgtgtcaggccaggccaacaatgcatacattttccctggatttggtctgggcttgatcatttctggtgcaatccgcgttcatgatgacatgcttttagcagcctccgaggctttagctgaacaggtgacacaggaacattttgacaaagggctaatattcccaccattcaccagcatccgcaagatttctgctcatattgctgccaaggtggcagccaaagcatatgaacttggtttggcgagtcgtcttccccaaccagaaaatctagtagcttatactgagagctgcatgtacagccccaaataccgcatctatcgttaa

SEQ ID NO: 5926 - protein, 647 aa, Flaveria bidentis
MISLNSSFLERSSVAGGSRTQSQSLRLSVRRPVVASMLNSNSLPERNVNVSVDSAVRDVNAPVAVEVDRSVGEKPFAVVGGGVEDMYGEDTATEDQYITPWSVSVASGYSLLRDPHHNKGLAFTEKERDAHFLRGLLPPVVVNHDLQVKKMMHNIRQYQVPLQRYQAMMDLQQRNERLFYKLLIENVEELLPIVYTPTVGEACQKYGSIFENSQGLFISLKDKGRILEILKIWPHKKIQVIVVTDGERILGLGDLGCQGMGIPVGKLALYTALGGVRPSACLPITIDVGTNNEKLLNDEFYIGLKQKRAAGQEYAELMNEFMSAVKQNYGEKVLIQFEDFANHNAFDLLEKYRTTHLVFNDDIQGTASVVLGGLISALKLVGGSLADQKFLFLGAGEAGTGIAELIALEISKQTNIPLEESRKKVWLADSKGLIVKSRLDSLQHFKKPWAHDHEPVNEFLDAIKTIKPTVLIGSSGTGQTFTKEVVETMSSLNEKPIILALSNPTSQSECTAEQAYTWSESRAIFASGSPFKPVEYNGKLYVSGQANNAYIFPGFGLGLIISGAIRVHDDMLLAASEALAEQVTQEHFDKGLIFPPFTSIRKISAHIAAKVAAKAYELGLASRLPQPENLVAYTESCMYSPKYRIYR

SEQ ID NO: 5927 - DNA, 1335 bp, uncultured archaeon GZfos12E1
  CDS (1)..(1335): transl_table=11
atggaagaggagaaacgaaaggcgggggaaaagcatttgaggacgataaataagcatgagcctgaaaaagtcgcctcggaatatcattcgtattatcgcggaaaaatagagatagggctaaaggcaccggttcggagttacgatgattttgcgatatggtacacgcccggtgtggcggagccgagcagggagataaaaaacagccgagagcgagtatttgagtacacgaataaaggtaattccgtggcaatagtcacagatgggacaagagtgttggggttaggcgatgtaggtgcagaagcggcacttccggtaatggaaggtaaagcaatgctatttaaatatttagggggcgtagatgcgtttcccctttgtctggatacgtcagatgcggaggacataataaataccgtgaaatgggttgcgcccacttttggcggcgtgaatctggaggacatagaaagcccgaagtgctattatatcctggagaggttgcaggaggagttaggtatgcccgtatggcatgatgaccagcagggcacggcattagtgatacttgcaggggcaataaacgcgttgaaagtagtggggaagcgtttgagcgagatagcgatttcgctggtaggcgcaggtgcggcgaacatgaacgttgcaaaatatctgtgcttggctggtgcgaaagagggaaacatagtgatggtggatagcaaaggaatattgaacagggagcgaatggaggatgtaaagcgggatgaaaataagcgggatatgtgcgaaaagacgaataaagaggggcgaaaaggggggataaaagaggcaatgcgcgataccgacctttgcatagcgctttcaacacctggtcctggagtgataaagaaggaatgggtagctgatatggccaacgatgcgattgtatttgcgtgtgcaaatcccgtacctgagatatggcctgtggaagcggaggagggtggagcaagaatagttgccacaggaaggagtgactttaataatcaagtaaacaattctttaggcttccctgcggtattcagaggcgctttggatgttcgcgcagcgcgtataacagatgggatgtgtatagcagcggcgaacgcaatagcgagatatacggaagaagaggggaagggaaaggaaaaaggcataagtgaaagtcgcataattccaaggatggaagagagcgagatgtatgtgtgcgaagcggttgcagtgggtatgaaggcgatagagcagggagtggcggaaaagggaatgagtatgaaggcgttggaagagcgagtacgagaaaaaatatcggacaaaactactaaacctttttaa

SEQ ID NO: 5928 - protein, 444 aa, uncultured archaeon GZfos12E1
MEEEKRKAGEKHLRTINKHEPEKVASEYHSYYRGKIEIGLKAPVRSYDDFAIWYTPGVAEPSREIKNSRERVFEYTNKGNSVAIVTDGTRVLGLGDVGAEAALPVMEGKAMLFKYLGGVDAFPLCLDTSDAEDIINTVKWVAPTFGGVNLEDIESPKCYYILERLQEELGMPVWHDDQQGTALVILAGAINALKVVGKRLSEIAISLVGAGAANMNVAKYLCLAGAKEGNIVMVDSKGILNRERMEDVKRDENKRDMCEKTNKEGRKGGIKEAMRDTDLCIALSTPGPGVIKKEWVADMANDAIVFACANPVPEIWPVEAEEGGARIVATGRSDFNNQVNNSLGFPAVFRGALDVRAARITDGMCIAAANAIARYTEEEGKGKEKGISESRIIPRMEESEMYVCEAVAVGMKAIEQGVAEKGMSMKALEERVREKISDKTTKPF

SEQ ID NO: 5929 - DNA, 1368 bp, uncultured archaeon GZfos28B8
  CDS (1)..(1368): transl_table=11
atggaaaatgaagtaaagaagaataattcagaattaatagaagaggaaggagtgaaaaagacggagaaactgcaaatggaagcagtaagacagcattcgtcttatgccggcaaaatacaaataatgcctaaatgttctattcacagcttagatgacttcgctgtttactatacacccggtgttgcgggaccttgcaaaataatagagaaagaaaaagagaaagcgtatgagctgacaaataaatggaataccgtggcggtcatctcagacggcacccgcgttttaggcttgggtgacataggtccggaagcgggattaccggtgatggaaggaaaagcacttttgttcaaatatttgggtggtgtagatgcgatacccatttgtcttgacacgaaaaacgcagaagagattattcaggcggttaagtggctgcagccttcttttggcggtatcaatctggaagacatagcaaatcccaagtgttttcaaattctcgatacattaagagaagagatggaaattcccgtctggcatgacgatcagcagggaacagcagcagtcactttgacaggcttaacaaacgcgctaaaaatagtaggcaaaaagctggaagatgcaagaattgcatttatcggtgccggagcagcaaatgttgctatttctcgtgtgctattctccgctggcgttaaaccacgtaattgtatcgttgccgatagtaaaggaattcttcataccggacgaaaggacatagaagagcgaaaagatgaatatcgcgataaatggcggttgtgccggattactaatccggagggaataacaggaggaatggatatagcgttaaaagatgttgatgtctgtcttgcactctctaagccaggcccaggtgttattaaaccagaatgggtaaatacaatgaacgaagcagcgatcgttttcgcttgcgcgaatcccgtaccggagatttggcctcaggaggcaaaagaagcaggcgcggaaatagttgctaccggacgttcggattttgcgaatcaagtaaataattcaataggatttcccggtattttccgcggtgctttagatgtacgcgctaaaaccataacagatgagatgtgtatagcagcagcaaatgctctggcactgtttgcacagaaacgcggtattaatgaggactatatcatacccacaatggaagactcagaagcttttgtagaggaagcagtggctgttggcttacaagctcaaaaagatggcgtcgcgagattgaacattagttccaaagagttgtatcataaagcagaatctataattagtaatgcccagaagtcaacttcactattaatgaaggaaaaactcatcccttcttattga

SEQ ID NO: 5930 - protein, 455 aa, uncultured archaeon GZfos28B8
MENEVKKNNSELIEEEGVKKTEKLQMEAVRQHSSYAGKIQIMPKCSIHSLDDFAVYYTPGVAGPCKIIEKEKEKAYELTNKWNTVAVISDGTRVLGLGDIGPEAGLPVMEGKALLFKYLGGVDAIPICLDTKNAEEIIQAVKWLQPSFGGINLEDIANPKCFQILDTLREEMEIPVWHDDQQGTAAVTLTGLTNALKIVGKKLEDARIAFIGAGAANVAISRVLFSAGVKPRNCIVADSKGILHTGRKDIEERKDEYRDKWRLCRITNPEGITGGMDIALKDVDVCLALSKPGPGVIKPEWVNTMNEAAIVFACANPVPEIWPQEAKEAGAEIVATGRSDFANQVNNSIGFPGIFRGALDVRAKTITDEMCIAAANALALFAQKRGINEDYIIPTMEDSEAFVEEAVAVGLQAQKDGVARLNISSKELYHKAESIISNAQKSTSLLMKEKLIPSY

SEQ ID NO: 5931 - DNA, 1317 bp, uncultured archaeon GZfos27G5
  CDS (1)..(1317): transl_table=11
atggaagaggagaaacgaaaagcgggggaaaagcgtttgagtgcaataaataagcatgagcctgaaaaagttgcctcggaatatcattcgtattatcgcgggaaaatagagatagggctaaaggcaccggttcggagttacgatgattttgcgatatggtacacgcccggtgtggcggagccatcgcgcgagataaaaaacagccgagagcgagtgtttgagtacacgaataaaggtaattccgtggcgatagtcacagatgggacaagagtgttggggttaggcgatgtaggtgcagaagcggcacttccggtaatggaaggtaaagcaatgctatttaaatatttgggtggcgtagatgcgtttcccctttgcctagatacgtcagatgcggaggacataataaataccgtgaaatgggttgcgcctacttttggcggcgtgaatctggaggacatagaaagcccgaagtgctattatatcttgcagaggttgcaggatgagttaggtatgcccgtatggcatgatgaccagcagggcacggcactggtgatacttgcaggtgtaataaacgcgttgaaagtagtggggaagcgtttgagcgagatagcgatttcgctggtgggcgcgggtgcggcgaacatgaacgttgcaaaatatctgtgcttggccggtgcgaaagaaggaaatatggtgatggtggatagtaaaggaatattgaatagggagcgaatggaggatgaaaagagggacgaaaataagcgggatatgtgcgaaaagacaaataaagaggggcgaaaaggggggataaaggaggcaatgcgcgatactgacctttgcatagcgctttcaacacctggtcccggagtgataaagaaggaatgggtagctgatatggccgatgatgcgattgtatttgcgtgtgcaaatcccgtacctgagatatggcctgtggaagcggaggaaggaggagcaagaatagttgccacaggaaggagtgacttcaataatcaagtaaacaattctttaggcttccctgcggtattccgaggcgctttggatgttcgcgcagcgcgcataacagatgaaatgtgtatagcagcggcgaacgcaatagcgagatatacggaagaagaggggaagggaaaggaaaagggcataagtgaaagtcgcataattccaaggatggaagagagcgagatgtatgtgtgcgaagcggttgcagtaggtatgaaggcgatagagcagggggtggcggaaaagggaatgagtatgaaggcgttggaagagcgaatacgagaaaaaatatcggactaa

SEQ ID NO: 5932 - protein, 438 aa, uncultured archaeon GZfos27G5
MEEEKRKAGEKRLSAINKHEPEKVASEYHSYYRGKIEIGLKAPVRSYDDFAIWYTPGVAEPSREIKNSRERVFEYTNKGNSVAIVTDGTRVLGLGDVGAEAALPVMEGKAMLFKYLGGVDAFPLCLDTSDAEDIINTVKWVAPTFGGVNLEDIESPKCYYILQRLQDELGMPVWHDDQQGTALVILAGVINALKVVGKRLSEIAISLVGAGAANMNVAKYLCLAGAKEGNMVMVDSKGILNRERMEDEKRDENKRDMCEKTNKEGRKGGIKEAMRDTDLCIALSTPGPGVIKKEWVADMADDAIVFACANPVPEIWPVEAEEGGARIVATGRSDFNNQVNNSLGFPAVFRGALDVRAARITDEMCIAAANAIARYTEEEGKGKEKGISESRIIPRMEESEMYVCEAVAVGMKAIEQGVAEKGMSMKALEERIREKISD

SEQ ID NO: 5933 - DNA, 1323 bp, uncultured archaeon GZfos10C7
  CDS (1)..(1323): transl_table=11
atggaagaggagaaacgaaaggaggggaaaaagcatttgaggacgataaataagcatgagcctgaaaaagtcgcctcggaatatcattcgtattatcgcgggaaaatagagatagggctaaaggctccggttaggagttacgatgattttgcgatatggtacacgcccggtgtggcggagccagcgcgagagataaaaaacagccgagagcgcgtgtttgagtacacgaataaaggtaattcagtggcgatagtcacagatgggacaagagtgttggggttaggcgatgtaggtgcagaagcggcacttccggtaatggaaggtaaagcaatgctatttaaatatttgggtggcgtagatgcgtttcccctttgtctggatacgtcagatgcggaggacataataaataccgtgaaatgggttgcgcccacttttggcggcgtgaatctggaggacatagaaagcccgaagtgctattatatcctggagaggttgcaggaggagttaggtatgcccgtatggcatgatgaccagcagggcacggcactggtgatacttgcaggtgcaataaacgcgttgaaagtagtggggaagcgtttgagcgagatagctatatcgctggtgggcgcgggtgcggcgaacatgaacgttgcgaaatatctgtgcttggctggtgcgaaagaaggaaacatggtgatggtggatagcaaaggaatattgaacagggagcgagtggaggatgtaaagcaggatgaaaataagcgggatatgtgcgaaaagacgaatagagaggggcgaaaaggagggataaaggaggcaatgcgcgataccgacctttgcatagcgctttcaacgcctggtcccggagtgataaagaaggaatgggtggttgatatggccgacgatgcaattgtattcgcgtgtgcaaatcccgtacctgagatatggcctgtggaagcggaggagggtggagcaagaatagttgccacaggaaggagtgacttcaataaccaagtaaacaattctttgggtttccctgcggtattcagaggcgctttggatgttcgcgcagcgcgtataacagatgagatgtgtatagcagcggcgaacgcaatagcgagatatactgaagaaggagggaaaggcataagtgaaagtcgcataattccgaggatggaagagagcgagatgtatgtgtgtgaagcggttgcagtgggtatgaaggcgatagagcagggagtggcggaaaagggaatgagtatgaaggcgttggaagagcgagtacgagaaaaaatatcggacaaaactactaaacctttttaa

SEQ ID NO: 5934 - protein, 440 aa, uncultured archaeon GZfos10C7
MEEEKRKEGKKHLRTINKHEPEKVASEYHSYYRGKIEIGLKAPVRSYDDFAIWYTPGVAEPAREIKNSRERVFEYTNKGNSVAIVTDGTRVLGLGDVGAEAALPVMEGKAMLFKYLGGVDAFPLCLDTSDAEDIINTVKWVAPTFGGVNLEDIESPKCYYILERLQEELGMPVWHDDQQGTALVILAGAINALKVVGKRLSEIAISLVGAGAANMNVAKYLCLAGAKEGNMVMVDSKGILNRERVEDVKQDENKRDMCEKTNREGRKGGIKEAMRDTDLCIALSTPGPGVIKKEWVVDMADDAIVFACANPVPEIWPVEAEEGGARIVATGRSDFNNQVNNSLGFPAVFRGALDVRAARITDEMCIAAANAIARYTEEGGKGISESRIIPRMEESEMYVCEAVAVGMKAIEQGVAEKGMSMKALEERVREKISDKTTKPF

SEQ ID NO: 5935 - DNA, 1728 bp, Hydrilla verticillata
  CDS (1)..(1728)
atggaagggaactcgaacgcgtgcggcggcgtgagggatccctacggcgaggattgcgccacggaggagcagctcgtcacgccctggaccttctccgtcgcgagtggctacaccttgctgagggatccacgccacaacaagggacttgctttcactgagaaagagcgggatgcacattacttgcgaggccttctgccaccagtttgcatcacacaggagcgtcaggagaagaagatcatgcacaaccttcgtaactaccaggttccgcttcagcgttacatggcgatgatggatttacaggagaggaatcagagacttttctacaaacttctcatagataacgttgaggagctgcttcctgttgtttacacacctacagttggcgaagcttgccagaagtatgggtgcatttataggcgtccccagggcctttatatcagtctcaaagaaaagggaaagattcttgaggtgttgaagaactggccagaaaagaacattcaggttattgtggtcactgatggagagagaatattaggtcttggagaccttggaacccagggaatgggcattcctgtgggcaagttagctctttacactgcccttggtggcatccggccttcttcctgtttacccataactattgatgtgggaacaaataacgagacactattgaatgaggaattctatattggtctcaggcagaaaagagcaaccggaaaggaatatgctgatctgctccacgaattcatgatttctgttaagcaaaactacggggaaagagttcttgtacagtttgaggacttcgcaaaccacaatgcatttgaactgctgtctaagtatagtaagacacacctggttttcaatgatgacattcagggtactgcttctgttgtcctagcaggagttgttgcagcactgaaattagttggtggagctttagctgaacacactttcttgttccttggagccggtgaggcaggtactggtatagctgaactcattgcacttgaaatatctaaacagatcaaggcacccgtggaagaaacccgcaagaagatctggctggtggactctaaaggattaattgttagctcacgcaaggaatcacttcagcactttaaaaaaccttgggctcatgagcatgaacctatcaaacatcttgtggatgctgtaaagacaatcaaacctactgtgttggtgggatcttctggtgtgggaagggcttttacaaaagaagttatagaagccatggcatctttcaatgagaaacccatcattcttgctctttcaaaccccacctcccaatcagaatgtaccgcggaagaagcatacacatggacccagggtcgcgcaattttcgccagtggaagtccgtttgatcctgttgaatacgaaggaaaaacatttgttcctggccaggccaataatgcatacatcttccctggatttggtctcggtctgattatagcaggtgcaattcgtgtgcatgatgatatgctgattgctgcatcggaggcactggctaatcaggtatcagaggagaactttgagaaggggcttatctatccaccattctcgaacatcagaaagatttctgccaacattgctgctaacgttgctgcaaaggcctatgagctcggtctggcttcccatcttccacgcccggccaatctcgtaaagtacgccgagagttgcatgtacagtccagtctaccgcacctaccgctga

SEQ ID NO: 5936 - protein, 575 aa, Hydrilla verticillata
MEGNSNACGGVRDPYGEDCATEEQLVTPWTFSVASGYTLLRDPRHNKGLAFTEKERDAHYLRGLLPPVCITQERQEKKIMHNLRNYQVPLQRYMAMMDLQERNQRLFYKLLIDNVEELLPVVYTPTVGEACQKYGCIYRRPQGLYISLKEKGKILEVLKNWPEKNIQVIVVTDGERILGLGDLGTQGMGIPVGKLALYTALGGIRPSSCLPITIDVGTNNETLLNEEFYIGLRQKRATGKEYADLLHEFMISVKQNYGERVLVQFEDFANHNAFELLSKYSKTHLVFNDDIQGTASVVLAGVVAALKLVGGALAEHTFLFLGAGEAGTGIAELIALEISKQIKAPVEETRKKIWLVDSKGLIVSSRKESLQHFKKPWAHEHEPIKHLVDAVKTIKPTVLVGSSGVGRAFTKEVIEAMASFNEKPIILALSNPTSQSECTAEEAYTWTQGRAIFASGSPFDPVEYEGKTFVPGQANNAYIFPGFGLGLIIAGAIRVHDDMLIAASEALANQVSEENFEKGLIYPPFSNIRKISANIAANVAAKAYELGLASHLPRPANLVKYAESCMYSPVYRTYR

SEQ ID NO: 5937 - DNA, 1845 bp, Hydrilla verticillata
  CDS (1)..(1845)
atgctctcgcacaaccgcctccgcgtgctgcgaaaggcggtgatcccgtgctgcgttgggcggaggaagggttttgctgccgacaggaagggttccgccatggagagggagaatgaggcttatgtggataaccaccaggtggctaatggtgccgcgtttgtggtggataatgccgcagctctggatcagcccatcacgccctggatgagcatggttgcgagtggttatacattattaagagatccacaccataacaacggactggctttcacagagaaagaaagagatgctcactatctgcggggcctgttgcctcctgtaagcatcagccaggaactccaggaaaagaagctcatgcgcaaccttcgtgagtacaaagttcctcttcagcgttacatggcaatgatggatcttcaggagagaaatgaaagacttttctataagcttctaattgacaatgtggaagagttgctccctgttgtttacacgcctaccgttggcgaggcttgccagaagtatggatcaatcttccggcgacctcggggactttatattagccttagagaaaagaacaaagttctcgaggtattaaaaaattggccacaaaagaatattcaggttattgttgtcacggacggggagcgaatacttggtcttggcgatctaggatgccagggtatgggaattcctgttggtaaactcgctctgtatacagcccttggaggaattcgcccttctgcttgtcttccggtaactattgatgttgggacaaataatgagaacttactcaatgacgagttctatattgggttaaggcggaagagagccactggtcaggaatatgctgaacttctagaagagttcatgtcttctgtgaagcaaaaatatggagagcgcattctaattcagtttgaagactttgccaaccacaatgcttttgacttgctttcgaaataccgtgaaacacatttagtgttcaatgatgacattcagggaacagcttctgttgtccttgctggggttgttgctgcactgagactggttggtggaacactagccgagcatactttcttatttcttggtgcaggggaggctggtaccggtatagctgaactaatcgctcttcaaatgtcaaaagagacaagaataccagtggaagaggctcgcaagaagatttggcttgtggactcgaagggcttaatagtgagatcccgtatacagtcacttcaacatttcaagaaaccgtgggctcatgagcatgaatctattaaaggactgttggatgctgtcaagtcaatcaagccgacagtgttaattggatcatctggggcgggtcaggccttcactcaagaagttatcgagacaatggctctgttcaatgaaaagccaattattctagcactatccaaccccacttcacaatctgaatgctctgcagaacaagcttatacctggtcaaagggacgcgctatttttgctagtggcagcccatttgaccctgtcgagtacaagggaagaacttttgttcctggacaggcaaacaatgcatacattttccctggatttgggcttggtttggtaatgtcgggagccatacgagtacacgacgatatgcttcttgctgcttctaaggcattagctgaacaagtgacggacgagaacttcgagaaggggctgatctatcctccattctcaaacatccgaaagatttccgctcacattgccgctaatgttgctgcaaaggcatatgaacttggtcttgcaggtaatcttcctcgccctgataatttggttaaacatgcagagaagtgcatgtacagccccatttaccgtacctaccgttga

SEQ ID NO: 5938 - protein, 614 aa, Hydrilla verticillata
MLSHNRLRVLRKAVIPCCVGRRKGFAADRKGSAMERENEAYVDNHQVANGAAFVVDNAAALDQPITPWMSMVASGYTLLRDPHHNNGLAFTEKERDAHYLRGLLPPVSISQELQEKKLMRNLREYKVPLQRYMAMMDLQERNERLFYKLLIDNVEELLPVVYTPTVGEACQKYGSIFRRPRGLYISLREKNKVLEVLKNWPQKNIQVIVVTDGERILGLGDLGCQGMGIPVGKLALYTALGGIRPSACLPVTIDVGTNNENLLNDEFYIGLRRKRATGQEYAELLEEFMSSVKQKYGERILIQFEDFANHNAFDLLSKYRETHLVFNDDIQGTASVVLAGVVAALRLVGGTLAEHTFLFLGAGEAGTGIAELIALQMSKETRIPVEEARKKIWLVDSKGLIVRSRIQSLQHFKKPWAHEHESIKGLLDAVKSIKPTVLIGSSGAGQAFTQEVIETMALFNEKPIILALSNPTSQSECSAEQAYTWSKGRAIFASGSPFDPVEYKGRTFVPGQANNAYIFPGFGLGLVMSGAIRVHDDMLLAASKALAEQVTDENFEKGLIYPPFSNIRKISAHIAANVAAKAYELGLAGNLPRPDNLVKHAEKCMYSPIYRTYR

SEQ ID NO: 5939 - DNA, 1911 bp, Zea mays
  CDS (1)..(1911)
atgctgtccacgcgcaccgccgccgtcgccgcctccgcgtcccccgcctccccgtggaaggtgggaggacggagcgagggcggcgccagctgcgacggatgccggacctacaggaacaccctgcggaggagggccgcgcccgccaaggtgcgcgccttgccgcccaggcgggtggacgcggtcgccatggtctccaacgcggagacggagacggaaaaggagcaggaggaggcggcggccgccagcgaggagctgcccgtcatgccctgggccacctacgtcgcaagcggttacacccttttgagggatccacaccacaacaagggtcttgctttcacagaggaggaaagggatggacactacttgcgtggactgcttcctccggcagtactatttcaggaactccaaattaagaagttcatgaacaccctgcggcagtaccagacccctttgcagcggtatatagctatgatgaaccttcaggaaacggacgagaggcttttctacaagcttttaattgataatgtggtggagctgcttccttttgtttacacaccaactgtaggtgaggcctgccagaagtatgggtccatctttggacgaccacagggtctgtatgtcagcctgaaggacaaggggaaggtcctagaagttctaaggaactggccacataggaacattcaagttatctgtgttactgatggtgagcgaatcttgggacttggagacttgggttgtcagggaatgggaattcctgtaggcaaacttgctctatacactgctcttggaggagttgacccatcagtttgcttgcctatcacaattgatgttggtacaaataacgagaagctgcttaatgatgagttctacattggactccggcaaaaacgtgcgactggcgaggagtatgatgagcttattgaagagttcatgtctgctgttaagcaattctatggtgagaaagtcctcattcagtttgaggactttgccaatcataatgcctttgatttgcttgaaaaatatagcaagagccatcttgttttcaatgatgatatccagggcacagcatcagtggtcattgcaggtttgttagcagcactcaagatggttggtgggaccctggcagagcagacttatttgttccttggtgctggggaggctggaactggtattgcagaacttattgctcttgagatttcgaaacagacgaatgctccacttgaagagtgccgcaagaaggtttggctggtggactcaaagggtttgattgttgactctcgtaaaggctcccttcagccattcaagaaaccttgggcgcatgagcacgagcccttgaaaaccttgtatgatgctgttcagtctatcaaacctacagttctgattgggacatctggagttggaagaacattcacaaaagaaatcattgaggccatgtcttccttcaacgagaggcctatcatcttttcactgtcaaacccaacctcgcattctgaatgcactgctgaacaagcatatacatggagtcagggccgttcaatctttgccagtggcagtccatttgcccccgtggagtacgaaggaaagacttttgtgcctgggcagtcgaacaatgcctacattttccctggactcggcctcggtcttgtgatctctggagccgtccgtgtccacgaggacatgcttctcgccgcctcgaaagcgctagctgatcaggccacacaggacaacttcgagaagggctccatcttcccacccttcaccagcatcagaaagatctctgcgcacatcgctgcagccgtggctgcaaaagcctacgagctcggtctggcgacccgtctgcctccccccagcgacctggtgaaatatgcagagaactgcatgtacactcccgtctaccgcaactaccggtag

SEQ ID NO: 5940 - protein, 636 aa, Zea mays
MLSTRTAAVAASASPASPWKVGGRSEGGASCDGCRTYRNTLRRRAAPAKVRALPPRRVDAVAMVSNAETETEKEQEEAAAASEELPVMPWATYVASGYTLLRDPHHNKGLAFTEEERDGHYLRGLLPPAVLFQELQIKKFMNTLRQYQTPLQRYIAMMNLQETDERLFYKLLIDNVVELLPFVYTPTVGEACQKYGSIFGRPQGLYVSLKDKGKVLEVLRNWPHRNIQVICVTDGERILGLGDLGCQGMGIPVGKLALYTALGGVDPSVCLPITIDVGTNNEKLLNDEFYIGLRQKRATGEEYDELIEEFMSAVKQFYGEKVLIQFEDFANHNAFDLLEKYSKSHLVFNDDIQGTASVVIAGLLAALKMVGGTLAEQTYLFLGAGEAGTGIAELIALEISKQTNAPLEECRKKVWLVDSKGLIVDSRKGSLQPFKKPWAHEHEPLKTLYDAVQSIKPTVLIGTSGVGRTFTKEIIEAMSSFNERPIIFSLSNPTSHSECTAEQAYTWSQGRSIFASGSPFAPVEYEGKTFVPGQSNNAYIFPGLGLGLVISGAVRVHEDMLLAASKALADQATQDNFEKGSIFPPFTSIRKISAHIAAAVAAKAYELGLATRLPPPSDLVKYAENCMYTPVYRNYR

SEQ ID NO: 5941 - DNA, 1911 bp, Sorghum bicolor
  CDS (1)..(1911)
atgatctccgctcgcgccgccaccgtcgccgccgcgtcccccgcctccccgtggaagcggggaggaggacggagcgagggtgccggcagctgcgacggatgcagcacctacaggaagaccgtgcggaggagggccgccgccgccaaggtgcgcgccttgccgccgaagcgggtggaggcggtcgcgataggctccgccgcggagacggagacggaggaggtggtggtggaggtggcggcggccaacgaggagctgcccgtcatgccctgggccacctctgtcgcaagcggttacacccttttgagggatccacgtcacaacaagggtcttgctttcacggagaaggagagggatgcacactacttgcgtggactgcttcctccggcagttgtctctcaggaactccaaattaagaagttcatgaacaacctgcggcagtaccagctccctattcagtgctatatggccatgatgaaccttcaggagacggacgagaggcttttctacaagcttttgattgaaaatgtggtggagctgcttccttatgtttacacaccaactgtaggtgaggcctgccagaagtatgggtccatctttggacgaccacagggtctgtatgtcagcctgaaggacaaggggagggtcctagaagttctaaggaactggccacataggaacgttcaagttatctgtgtcactgatggtgagcgaatcttgggacttggagatttgggttgtcagggaatgggaattcctgtaggcaaacttgctctatacactgctcttggaggagttgatccatcagcttgtttgcctatcacaattgatgttggcacaaataatgagaaactgcttaatgatgagttctacattggactccgacaaaaacgtgcaaggggcgaggagtatgatgagcttatggaagagttcatggctgctgttaagacattctacggtgagaaagtcctcattcagtttgaggactttgccaatcataatgcctttgatttgcttgaaaaatacagcaagacccatcttgttttcaatgatgatatccagggcacagcatcagtggtccttgcaggtttgttagcagcactcaagatggttggtgggaccctggcagagcagacttatttgttccttggtgctggggaggctggaactggtattgcagaactcattgctcttgagatgtcgaaacagacgaaggctccaattgaagagtgccgcaagaaggtttggctggtggactcaaaggggttgattgttgactctcgtaaaagctcccttgcgccattcaaaaaaccatgggcacatgagcacgagcccttgacaaccttgtatgatgctgttcagtccatcaaacctacagttctgattgggacatctggagttggaagaacattcacaaaagaaattgttgaggccatggcttccatcaatgagaggcctatcatcttttcactgtcaaacccaacctcacattctgaatgtactgctgaacaagcatatacctggactcagggtcgtgcagtatttgccagtggcagtccatttgcccccgtggagtatgatgggaagacttttgtacctgggcagtcgaacaatgcctacatcttccctggactcggcctcggtcttgttatttctggagccgtccgtgtccacgaggacatgcttcttgccgcctcggctgcactagctgatcaggccacagaggagaactttgtcacgggatcgatcttcccacccttcaccaacatcagaaagatctctgcgtacattgctgcagccgttgctgcaaaagcttatgaactcggtttggcgacccgtctgcctccccccaaagacctggtggcatatgcagagagctgcatgtactctcctgtctaccgtaactaccagtag

SEQ ID NO: 5942 - protein, 636 aa, Sorghum bicolor
MISARAATVAAASPASPWKRGGGRSEGAGSCDGCSTYRKTVRRRAAAAKVRALPPKRVEAVAIGSAAETETEEVVVEVAAANEELPVMPWATSVASGYTLLRDPRHNKGLAFTEKERDAHYLRGLLPPAVVSQELQIKKFMNNLRQYQLPIQCYMAMMNLQETDERLFYKLLIENVVELLPYVYTPTVGEACQKYGSIFGRPQGLYVSLKDKGRVLEVLRNWPHRNVQVICVTDGERILGLGDLGCQGMGIPVGKLALYTALGGVDPSACLPITIDVGTNNEKLLNDEFYIGLRQKRARGEEYDELMEEFMAAVKTFYGEKVLIQFEDFANHNAFDLLEKYSKTHLVFNDDIQGTASVVLAGLLAALKMVGGTLAEQTYLFLGAGEAGTGIAELIALEMSKQTKAPIEECRKKVWLVDSKGLIVDSRKSSLAPFKKPWAHEHEPLTTLYDAVQSIKPTVLIGTSGVGRTFTKEIVEAMASINERPIIFSLSNPTSHSECTAEQAYTWTQGRAVFASGSPFAPVEYDGKTFVPGQSNNAYIFPGLGLGLVISGAVRVHEDMLLAASAALADQATEENFVTGSIFPPFTNIRKISAYIAAAVAAKAYELGLATRLPPPKDLVAYAESCMYSPVYRNYQ

SEQ ID NO: 5943 - DNA, 1734 bp, Lithospermum erythrorhizon
  CDS (1)..(1734)
atggagagtagtaatttgaaggatgttacaggtggagttgaggatgcttatggtgagcatcgtgccatcgaggaacaacttgttactccatggactgtctctgtagctagtggttattctttgctgagagacccccatcataacaaggggctagccttcactgagagggaacgagattctcattacttgcgtgggcttttgcctccagctgttgtaacccaagagcttcaggagaagaagttgatggaaaatattcgggaatatcagcttccgatacacaagtacatggccatgatgggactagaggagaggaatgagaggttgttttataagcttctgattgacaatgtagaggaactcctaccagttgtttatacaccaactgttggtgaggcttgccagaaatacggaagcatctttcgccgtcctcagggtctatatattagtttgaaagaaaaggggaagattcttgaagttcttaagaattggccagaaagggcaattcaagtcattgttgttactgatggtgagagaatcttgggacttggagaccttggatgccagggtatggggataccggtaggaaagttggcactttatactgcacttggaggagttagaccttcagcttgcctacctataaccatcgatgtgggcacaaataaccagcagctacttgatgatgagttttacattggtcttaagcaaagaagggcaactggggaggaatattatgagcttcttgaggagttcatgtcagctgtaaaacattgttacggtgaaaaagttctcgtgcagtttgaagattttgctaaccacaatgcatttgagctattatccaagtataggaatacccatttagtgtttaacgatgatatacaggggacagcatctgtggtgctttctgggcttatagcatccctaaagccactcggtggtaccttgggcgatcataccttcttgttccttggagccggagaggctggtactgggatagctgagctcatagctcttgaaatttcaaagcagacaaaggcgcccgtggaagaaacacgtaaaaagatctggttagttgactcaaagggattagtagttagttctcgcaaggagaagcttcaacatttcaagcagccttgggctcatgagaaagaaccaattggaaatcttttagatgctgtgaaggatatcaagccaacagtcttaatcggaacttctggcgttggtaggcaattcacaaaggaggttgttgaagccatggcttccttcaatgagaaacctctcattatggctctttctaacccaacatcacaagctgagtgcacagctgaagaagcttacacttggtctgagggccgtgccattttctccagtggaagtccatttgaccccgtggagtacaacggaaaagtttttgtacctggccaggccaacaactgctacatatttccaggacttggtttcgggttactcatttctggtgcgatcagagtgcacgatgacatgcttctagctgcatctgaagctcttgctaatcaagtgacagatgagcactatgccaaagggcttatctacccaccattttctgatatcagaaagatatcagcaaacattgcagccaaggttgctgctaaagcatatgaactcggtgttgcaactcgcctccctcgtcctgaaaacttggtcgagtatgctgaacgctgcatgtattcgcctatctaccgcacttatcgttga

SEQ ID NO: 5944 - protein, 577 aa, Lithospermum erythrorhizon
MESSNLKDVTGGVEDAYGEHRAIEEQLVTPWTVSVASGYSLLRDPHHNKGLAFTERERDSHYLRGLLPPAVVTQELQEKKLMENIREYQLPIHKYMAMMGLEERNERLFYKLLIDNVEELLPVVYTPTVGEACQKYGSIFRRPQGLYISLKEKGKILEVLKNWPERAIQVIVVTDGERILGLGDLGCQGMGIPVGKLALYTALGGVRPSACLPITIDVGTNNQQLLDDEFYIGLKQRRATGEEYYELLEEFMSAVKHCYGEKVLVQFEDFANHNAFELLSKYRNTHLVFNDDIQGTASVVLSGLIASLKPLGGTLGDHTFLFLGAGEAGTGIAELIALEISKQTKAPVEETRKKIWLVDSKGLVVSSRKEKLQHFKQPWAHEKEPIGNLLDAVKDIKPTVLIGTSGVGRQFTKEVVEAMASFNEKPLIMALSNPTSQAECTAEEAYTWSEGRAIFSSGSPFDPVEYNGKVFVPGQANNCYIFPGLGFGLLISGAIRVHDDMLLAASEALANQVTDEHYAKGLIYPPFSDIRKISANIAAKVAAKAYELGVATRLPRPENLVEYAERCMYSPIYRTYR

SEQ ID NO: 5945 - DNA, 1677 bp, Drosophila melanogaster
  CDS (1)..(1677)
atggaaagtacaataaggtggggccttgcgttcaccattaaggaacggcaacgtttgggcatcatgggattgatgccctgctccgtgcgctccatggatgaccagatgaatgcggccctggcgaattttgaggcgagacccacagatatcgcccgctttacatacttgagtgctgtccaccatcgacaccggcgactgtactaccggttcatcaaggagaacatcgagaaatcgctacccattgtttatacaccaacggtgggcgatgtggtggccacctatggactgaacttccagcaggccatcagcctgttcatcagcattcacgacaagggccacatccgggatcttatgcacaactgggtggacgagggcgttaaggccatctgtgtgacggatggcggaagggtactgggtctcggggacatgggtgccaatgcgatgggcattagtttgggcaaaatgatcctatatacggctttgggtagcattccgccgagcacactaatgcccgtttgcctcgacgtgggtaccgataatcaggccctgctgcaggatcccctttatgttggggcacgaataccgcgggtcaagggaccggaatacgatgaactggtggatgaatttatggagtcggcggttaaatgcttcggaaacaacaccttcatccacttcgaggactttgccactccaaatgccttgaagttcttggaaaaataccagtacaagtactgttgcttcaacgatgatattcagggaacgggagccactggcctggccgcgttcatcaatgtggaacgcatcactggccgtaaattggaggacaccgtatttctcttcgtaggagctgggagtgcggcattgggtatcgccaatatgctggccatggaactggaggtacgcggcattcctgccgaggaggcaactaaaaatatctacttgatggatgtcaatggtattttgacaccggagtcacctaatccaccggagatgggtaaaatatttataaagtccatggagcccatgaaggatatgatggccgtgctgaagaagcttaagccatccgtacttgttggagcaactggtgtgggtggaattttcaatgaagaagtactgaaaaccatggcgaaaaatcacgaacgtcctgcagtttttcccctctcgaatccaactgccaactcggaatgcaccgccgagcaggcttttacacacactgagggtcgcgtgctcttcggatccggatcgccctttccaccagtggtcatcaatggcaaaagatatcgccccgctcaggccaacaactgtctgacttttccgggcatcgcattggccgccattacggccaaggcccggtatctgccaaacgaagtattttccgttgtgtcgcacgagctggccaggaatacaccgcaggaactacttgacgaaggcactctgtttccgcccatcaaggatgcacataatgtggccttcaatgtgggcgttgccatgactcagtatctaattgataatgatctttcaaatgtttacccaaagcccgatgatatctgtgagtttgtcaagagaagtctgtataagttcgattacagaaattccctgccaactacgtgggactatcccgtggaaccgccaacaccgaaacccaaaaccaaacccaaaacgaagccgaaggaataa

SEQ ID NO: 5946 - protein, 558 aa, Drosophila melanogaster
MESTIRWGLAFTIKERQRLGIMGLMPCSVRSMDDQMNAALANFEARPTDIARFTYLSAVHHRHRRLYYRFIKENIEKSLPIVYTPTVGDVVATYGLNFQQAISLFISIHDKGHIRDLMHNWVDEGVKAICVTDGGRVLGLGDMGANAMGISLGKMILYTALGSIPPSTLMPVCLDVGTDNQALLQDPLYVGARIPRVKGPEYDELVDEFMESAVKCFGNNTFIHFEDFATPNALKFLEKYQYKYCCFNDDIQGTGATGLAAFINVERITGRKLEDTVFLFVGAGSAALGIANMLAMELEVRGIPAEEATKNIYLMDVNGILTPESPNPPEMGKIFIKSMEPMKDMMAVLKKLKPSVLVGATGVGGIFNEEVLKTMAKNHERPAVFPLSNPTANSECTAEQAFTHTEGRVLFGSGSPFPPVVINGKRYRPAQANNCLTFPGIALAAITAKARYLPNEVFSVVSHELARNTPQELLDEGTLFPPIKDAHNVAFNVGVAMTQYLIDNDLSNVYPKPDDICEFVKRSLYKFDYRNSLPTTWDYPVEPPTPKPKTKPKTKPKE

SEQ ID NO: 5947 - DNA, 1935 bp, Zea mays
  CDS (1)..(1935)
atgatctccgcgcgcaccgccgcagcttcccccgcctccctgtggaagcggggaggacaaagtgagggcggcggcagttgcgacggatgtcggacctacaggaacactttgcggagggccgcagcagcgaaggtgcgtgccttgccgtcgagggcggtggaggcggtcaaaatgggctccgccgcggaggtggagcaggaggaggcggaggtagccgcggccgcggacggcgtcgtcgtcgaggaccactacggcgaggacagcgccaccgaggagctgcccatcatgccctgggccttctccgtcgcaagcggttacaccctcttgagggatccacatcacaacaagggtcttgctttcacggagaaggagagggatgcacaccacttgcgtgggctgcttcctcctgcagttgttcctcaagaactccaaattaagaagatcatgcacaacctgcggcagtaccaggtccctttgcagcgctatatggccatgatggaccttcaggagaggaacgagaggcttttctacaagcttttaattgataacgtggaggagctgcttcctgtggtttatacaccaactgtaggtgaggcctgccagaagtatgggtccatctttcgacaaccacagggtctgtatgtcagcttgagggacaaagggaaggtcctagaagttctaaggaactggccacataggaacattcaagttatctgtgttactgatggtgagcgaatcttgggacttggagatttgggttctcagggaatgggaattcctgtaggcaaacttgctctatacactgctcttggaggagttcgtccatcagcttgtttgcctatcacaatcgatgttggcacaaataatgagaaactgcttaatgatgagttttacattggactccggcaaaaacgtgcaactggcgaggagtatcatgagcttatggaagagttcatggctgctgttaagcaaatctacggcgagaaagtcctcattcagtttgaggacttcgcgaatcataatgcttttaatttgcttgcaaaatatagcaagagccatcttgttttcaatgatgacatccagggcacagcatcagtggtccttgcaggtttgttagcagcactcaaggtggttggtgggaccttggcagagcacacttatttattccttggtgctggggagggtggaactggtattgcagaactcattgctcttgagatttcaaaacagacgtcggctccaattgaagagtgccgcaagaagatttggttggtggactcaaagggtttgattgttgactctcgtaaaaactccgttcagtcattcaaaaaaccttgggcacatgagcatgagggcttgacaactttgtacgatgctgttcagtgcatcaaacctacagttctgattgggacgtctggagttggaagaacattcacaaaagaagttgttgaggccatggcttccttcaatgagaggcctatcatcttttcactgtcaaatccaacctctcattctgaatgtactgctgaagaagcatataactggactcagggtcgtgtaatatttgccagtggcagtccatttgaccctgtggagtacgatgggaaggtttttgtacctggacagtcgaacaacgcctacattttccctggatttggcctcggtcttgttatctctggagccatccgtgtccacgaggacatgcttcttgccgcctcggaagcactagctgctcaggccacacaggagaacttcgacaagggatcaatcttcccgcccttcaccaacattagaaagatctctgcgcgcattgcccgagccgtggctgcaaaagcttatgaactcggtttggcgacccgtctgcctcccccaagggacctggtgaaatatgcacagagctgcatgtacactcctgtctaccgtaactaccggtag

SEQ ID NO: 5948 - protein, 644 aa, Zea mays
MISARTAAASPASLWKRGGQSEGGGSCDGCRTYRNTLRRAAAAKVRALPSRAVEAVKMGSAAEVEQEEAEVAAAADGVVVEDHYGEDSATEELPIMPWAFSVASGYTLLRDPHHNKGLAFTEKERDAHHLRGLLPPAVVPQELQIKKIMHNLRQYQVPLQRYMAMMDLQERNERLFYKLLIDNVEELLPVVYTPTVGEACQKYGSIFRQPQGLYVSLRDKGKVLEVLRNWPHRNIQVICVTDGERILGLGDLGSQGMGIPVGKLALYTALGGVRPSACLPITIDVGTNNEKLLNDEFYIGLRQKRATGEEYHELMEEFMAAVKQIYGEKVLIQFEDFANHNAFNLLAKYSKSHLVFNDDIQGTASVVLAGLLAALKVVGGTLAEHTYLFLGAGEGGTGIAELIALEISKQTSAPIEECRKKIWLVDSKGLIVDSRKNSVQSFKKPWAHEHEGLTTLYDAVQCIKPTVLIGTSGVGRTFTKEVVEAMASFNERPIIFSLSNPTSHSECTAEEAYNWTQGRVIFASGSPFDPVEYDGKVFVPGQSNNAYIFPGFGLGLVISGAIRVHEDMLLAASEALAAQATQENFDKGSIFPPFTNIRKISARIARAVAAKAYELGLATRLPPPRDLVKYAQSCMYTPVYRNYR

SEQ ID NO: 5949 - DNA, 1179 bp, Corynebacterium melassecola
  CDS (1)..(1179): transl_table=11
atgaccatcgacctgcagcgttccacccaaaacctcacccatgaggaaatcttcgaggcacacgagggcggaaagctctccattagttccactcgtccgctccgcgacatgcgcgatctttcccttgcttacaccccaggtgttgctcaggtttgtgaagcaatcaaggaagatccagaggttgcacgcacccacacgggcattggaaacaccgtcgcggttatttccgacggcaccgctgttcttggccttggcgatatcggacctcaggcctcccttcccgtcatggagggcaaggctcagctgtttagctctttcgctggcctgaaggctatccctatcgttttggatgttcacgatgttgacgctttggttgagaccatcgcagccatcgcgccttctttcggtgctatcaacttggaggacatctccgctcctcgttgcttcgaggtggagcgccgcctcatcgagcgtcttgatatcccagttatgcacgatgaccagcacggcaccgctgtggttatcctcgctgcgctgcgcaactccctgaagctgctggatcgcaagatcgaagacctcaagattgttatttccggcgcaggtgccgctggtgttgcagctgtggacatgctgaccaacgctggagcaaccgatattgtggttctcgattcccgaggcatcatccacgacagccgtgaggatctttccccagttaaggatgctcttgcagagaagaccaaccctcgtggcatcagcggtggcatcaatgaggctttcaccggcgcggacctgttcattggcgtgtccggcggcaacatcggcgaggacgccctcaagctcatggcaccacagccaatcctgttcaccctggcgaacccaaccccagagatcgatcctgagctgtctcagaagtacggcgccatcgtcgcgaccggccgctctgacctgcctaaccagatcaacaacgtgctcgcgttcccaggaattttcgccggcgctctcgcagccaaggccaagaagatcacccctgaaatgaagctcgccgctgcagaggcaatcgccgacatcgcagctgaggacctcgaggtcggccgcatcgtgcctaccgccttggatccccgcgtcgccccagcagtcaaggcagctgtccaggccgtcgccgaagcgcaaaacgcttaa

SEQ ID NO: 5950 - protein, 392 aa, Corynebacterium melassecola
MTIDLQRSTQNLTHEEIFEAHEGGKLSISSTRPLRDMRDLSLAYTPGVAQVCEAIKEDPEVARTHTGIGNTVAVISDGTAVLGLGDIGPQASLPVMEGKAQLFSSFAGLKAIPIVLDVHDVDALVETIAAIAPSFGAINLEDISAPRCFEVERRLIERLDIPVMHDDQHGTAVVILAALRNSLKLLDRKIEDLKIVISGAGAAGVAAVDMLTNAGATDIVVLDSRGIIHDSREDLSPVKDALAEKTNPRGISGGINEAFTGADLFIGVSGGNIGEDALKLMAPQPILFTLANPTPEIDPELSQKYGAIVATGRSDLPNQINNVLAFPGIFAGALAAKAKKITPEMKLAAAEAIADIAAEDLEVGRIVPTALDPRVAPAVKAAVQAVAEAQNA

SEQ ID NO: 5951 - DNA, 1926 bp, Ricinus communis
  CDS (1)..(1926)
atgatctccttgaaaaacagttttctgagtggctcgtgcagcagtcctgtaccagggaaacagagagcaggactcgtagtgcctacagctccttcttctctgaaagtagtagctttaaatcccaatagggaacgaaacggcagcattatgatggagagcacactacaagaaatgagagatggtgcttctgtgcttgacttagaccccaaatccaccgttgctggtggggtccgtgatgtgtatggtgaggatactgccactgaggatcagtttgtcactccttggtccctctctgttgctagtgggtattccttgttgcgagacccacaccacaacaaagggctcgctttcaatgataaagagagagatgcccactatttgcgtggccttcttcccccagcaatagtttctcaggagctccaggtgaagaaaatgatgcacataattcgtcaatatcaacttccattgcaaaagtacatggctatgatggatcttcaggagagaaatgaacgcttattctataagcttcttatccaaaatgttgaggagatgctccccattgtgtacactccaactgttggtgaggcatgccagaaatatggaagcatctttggtcgtcctcagggtctctacatcagcttgaaagaaaagggaagaattcttgaggtattgaggaactggcctgagaagaatattcaggtcattgttgtgactgatggtgagcgaattttggggctgggagaccttggatgtcagggtatggggatacctgtggggaaactttctttatatacagcacttggcggagttcgcccttcatcttgcttgcctgtaacaattgatgtgggaaccaacaatgagaagctgttaaatgacgagttctatataggtctcaggcaaagaagggctaccggacaggaatatgcagaactgctacatgaattcatgactgcggtcaaacagaattatggtgagagagtcctcgttcagtttgaagacttcgcaaaccataatgcttttgatttgcttgcaaaatatggtacaactcatcttgttttcaacgatgatattcagggcacagcatctgtggtcctagcagggcttgttgcagcactaaaattagttggtggatccttagctgatcacagattcttattccttggtgctggagaagctggcaccggaattgcagaactcatagccctggagatgtcaaaacagacaaacatgccagtggaagagactcgtaagaagatttggctggtggactcgaaggggttgattgttagttctcgtatggattcactccaacattttaagaggccctgggctcatgaacatgaacctattaagacacttctggatgctgttaatgacattaagccaacagttttaattggaacatcaggagtgggaagaacatttactaaagaagtagttgaggctatggcctccttcaatgagaaacctataattcttgctctttctaatccaacttcacaatccgaatgtactgctgaagaagcttatacatggagtcagggccgtgctatttttgctagtggaagcccatttgcccctgttgaatatgagggaaaggtttatgtgcctggtcaggcaaacaatgcatatatctttcctggatttggtctgggtttaattatgtcgggtacaatccgtgttcatgatgatatgcttctggcagcatcggaagctttggctgcacaggtgacccaggaaaactttgacaaggggctcatttacccaccattcacaaacatcagaaagatttcagcgaatattgctgccaatgtggctgctaaagcttatgaacttggattggcttctcgcctccctcaaccgaaggatctggtgaagtatgccgaaagctgtatgtacagccctgcctaccgaagttaccggtga

SEQ ID NO: 5952 - protein, 641 aa, Ricinus communis
MISLKNSFLSGSCSSPVPGKQRAGLVVPTAPSSLKVVALNPNRERNGSIMMESTLQEMRDGASVLDLDPKSTVAGGVRDVYGEDTATEDQFVTPWSLSVASGYSLLRDPHHNKGLAFNDKERDAHYLRGLLPPAIVSQELQVKKMMHIIRQYQLPLQKYMAMMDLQERNERLFYKLLIQNVEEMLPIVYTPTVGEACQKYGSIFGRPQGLYISLKEKGRILEVLRNWPEKNIQVIVVTDGERILGLGDLGCQGMGIPVGKLSLYTALGGVRPSSCLPVTIDVGTNNEKLLNDEFYIGLRQRRATGQEYAELLHEFMTAVKQNYGERVLVQFEDFANHNAFDLLAKYGTTHLVFNDDIQGTASVVLAGLVAALKLVGGSLADHRFLFLGAGEAGTGIAELIALEMSKQTNMPVEETRKKIWLVDSKGLIVSSRMDSLQHFKRPWAHEHEPIKTLLDAVNDIKPTVLIGTSGVGRTFTKEVVEAMASFNEKPIILALSNPTSQSECTAEEAYTWSQGRAIFASGSPFAPVEYEGKVYVPGQANNAYIFPGFGLGLIMSGTIRVHDDMLLAASEALAAQVTQENFDKGLIYPPFTNIRKISANIAANVAAKAYELGLASRLPQPKDLVKYAESCMYSPAYRSYR

SEQ ID NO: 5953 - DNA, 1737 bp, Drosophila melanogaster
  CDS (1)..(1737)
atgagcaaacccgattcgaaactagataaatacgcgcagcgcgatcgcctgggcctttggggcactggtgacaatgaggtggtcggcagcctctccggattcacccgactcttggacaagcgctactcaaagggcctggccttcacacacgaggagcgccagcagttgggcatccatggcatgctgccctatgtggtccgtgagcccagtgagcaggtggagcactgccgtgctctgctggcgcgactggatcaggatctggacaagtacatgtacctgatcagcctatcggagcggaacgagcgtctgttctacaacgtgctcagctcagacatcggctacatgatgccactggtgtacacgcccaccgtgggattggcctgccagcgctacagtttgatccaccagaacgccaagggcatgttcatatccatcaaggacaagggacacatctacgacgtgctaaagaactggccggaaacggatgtgcgtgccatcgttgtcacggacggcgagcgcatcctgggactgggagatctgggcgccaacggaatgggtatacccgtgggcaaactgtccctgtatacggccttggcgggcattaagccatcgcagtgcctgcccatcaccttggatgtgggcaccaataccgaatccatcctggaggatcccctgtacatcggtctgcgcgaacgcagggccactggagatctgtacgatgagttcatcgatgagttcatgcatgcctgcgttcgtcgctttggtcaaaactgcctaatccagttcgaggactttgccaacgccaatgccttcaggctgttgtccaaataccgcgactccttctgcaccttcaacgacgatattcaaggaaccgcctcggtggccgtggctggtctgctggcctcgctaaagatcaagaagacccagctgaaggataacacgctgttgttcctgggcgccggagaagcggctcttggtattgccaacctgtgcctgatggccatgaaggtggagggtctcaccgaggaggaggccaaggcccgcatctggatggtggatagccgtggtgtcatcacccgcgatcgtccaaagggcggactcaccgaacacaagctgcactttgcccagctgcacgaacccatcgatactttggcagaggcggtgcgaaaggtgcgtcccaatgtcctgattggagcggctgcgcagggcggcgccttcaaccaggagatccttgagctgatggccgatattaacgagacgccgatcatctttgcactgtccaatccgaccagcaaggcggagtgcaccgccgaggaggcgtacacgtacaccaaggggcgctgcatcttcgccagcggttcgccttttgcgcctgtgacgtacaacaacaagaagttctatccgggtcagggcaacaactcgtacatattccctggcgtggcactgggtgttctgtgtgccggcatgctgaacattcccgagcaggtattcttggtcgccgccgagcgcttggcggagctggtctccaaggacgacctggccaagggtagcttgtatccaccactcagctccattgtcagctgttcgatggccattgccgaaaggattgtggagtacgcctacaaaaacggattggccactgttcgtccagagccggtcaataagctggcgttcatcaaggcccagatgtacgatctggactatccccgatccgtgcccgccacctataagatgtag

SEQ ID NO: 5954 - protein, 578 aa, Drosophila melanogaster
MSKPDSKLDKYAQRDRLGLWGTGDNEVVGSLSGFTRLLDKRYSKGLAFTHEERQQLGIHGMLPYVVREPSEQVEHCRALLARLDQDLDKYMYLISLSERNERLFYNVLSSDIGYMMPLVYTPTVGLACQRYSLIHQNAKGMFISIKDKGHIYDVLKNWPETDVRAIVVTDGERILGLGDLGANGMGIPVGKLSLYTALAGIKPSQCLPITLDVGTNTESILEDPLYIGLRERRATGDLYDEFIDEFMHACVRRFGQNCLIQFEDFANANAFRLLSKYRDSFCTFNDDIQGTASVAVAGLLASLKIKKTQLKDNTLLFLGAGEAALGIANLCLMAMKVEGLTEEEAKARIWMVDSRGVITRDRPKGGLTEHKLHFAQLHEPIDTLAEAVRKVRPNVLIGAAAQGGAFNQEILELMADINETPIIFALSNPTSKAECTAEEAYTYTKGRCIFASGSPFAPVTYNNKKFYPGQGNNSYIFPGVALGVLCAGMLNIPEQVFLVAAERLAELVSKDDLAKGSLYPPLSSIVSCSMAIAERIVEYAYKNGLATVRPEPVNKLAFIKAQMYDLDYPRSVPATYKM

SEQ ID NO: 5955 - DNA, 2280 bp, Drosophila melanogaster
  CDS (1)..(2280)
atgtactcgatcctacgacgctgttctggtatcagaaaaacttttggacccacgccggtatatcccaccgccaacaattcgcagagtccttcctcatatagtcgcggcaaagagcgcgagctcggctgttacacgaagagaaacagcaacagcaacaacaacaatagccatgagagagagagtcagagctgttgtagtagtcgtgtgtgtaaaaatcatacgaccacaacgacaaccacactcgaatacgaactttccaatttcgcaaaactaacgacacgaatcacaacgcaaagtgccgccgaagtggacacatcgccgcatacggatacggaaacgcatagggacagagattcgaatccgggtaatatagccttagccaccgatttggaactgcccaagggtctgccgttatcgttatcctcgcgacaccactggaatcagctgcagagcagtttgcacgcccttcaccaccagcaacagcaacaacaacagcaactacgttcatacagctccactagcgaaacaaatttggaagacaagatgagcaaacccgattcgaaactagataaatacgcgcagcgcgatcgcctgggcctttggggcactggtgacaatgaggtggtcggcagcctctccggattcacccgactcttggacaagcgctactcaaagggcctggccttcacacacgaggagcgccagcagttgggcatccatggcatgctgccctatgtggtccgtgagcccagtgagcaggtggagcactgccgtgctctgctggcgcgactggatcaggatctggacaagtacatgtacctgatcagcctatcggagcggaacgagcgtctgttctacaacgtgctcagctcagacatcggctacatgatgccactggtgtacacgcccaccgtgggattggcctgccagcgctacagtttgatccaccagaacgccaagggcatgttcatatccatcaaggacaagggacacatctacgacgtgctaaagaactggccggaaacggatgtgcgtgccatcgttgtcacggacggcgagcgcatcctgggactgggagatctgggcgccaacggaatgggtatacccgtgggcaaactgtccctgtatacggccttggcgggcattaagccatcgcagtgcctgcccatcaccttggatgtgggcaccaataccgaatccatcctggaggatcccctgtacatcggtctgcgcgaacgcagggccactggagatctgtacgatgagttcatcgatgagttcatgcatgcctgcgttcgtcgctttggtcaaaactgcctaatccagttcgaggactttgccaacgccaatgccttcaggctgttgtccaaataccgcgactccttctgcaccttcaacgacgatattcaaggaaccgcctcggtggccgtggctggtctgctggcctcgctaaagatcaagaagacccagctgaaggataacacgctgttgttcctgggcgccggagaagcggctcttggtattgccaacctgtgcctgatggccatgaaggtggagggtctcaccgaggaggaggccaaggcccgcatctggatggtggatagccgtggtgtcatcacccgcgatcgtccaaagggcggactcaccgaacacaagctgcactttgcccagctgcacgaacccatcgatactttggcagaggcggtgcgaaaggtgcgtcccaatgtcctgattggagcggctgcgcagggcggcgccttcaaccaggagatccttgagctgatggccgatattaacgagacgccgatcatctttgcactgtccaatccgaccagcaaggcggagtgcaccgccgaggaggcgtacacgtacaccaaggggcgctgcatcttcgccagcggttcgccttttgcgcctgtgacgtacaacaacaagaagttctatccgggtcagggcaacaactcgtacatattccctggcgtggcactgggtgttctgtgtgccggcatgctgaacattcccgagcaggtattcttggtcgccgccgagcgcttggcggagctggtctccaaggacgacctggccaagggtagcttgtatccaccactcagctccattgtcagctgttcgatggccattgccgaaaggattgtggagtacgcctacaaaaacggattggccactgttcgtccagagccggtcaataagctggcgttcatcaaggcccagatgtacgatctggactatccccgatccgtgcccgccacctataagatgtag

SEQ ID NO: 5956 - protein, 759 aa, Drosophila melanogaster
MYSILRRCSGIRKTFGPTPVYPTANNSQSPSSYSRGKERELGCYTKRNSNSNNNNSHERESQSCCSSRVCKNHTTTTTTTLEYELSNFAKLTTRITTQSAAEVDTSPHTDTETHRDRDSNPGNIALATDLELPKGLPLSLSSRHHWNQLQSSLHALHHQQQQQQQQLRSYSSTSETNLEDKMSKPDSKLDKYAQRDRLGLWGTGDNEVVGSLSGFTRLLDKRYSKGLAFTHEERQQLGIHGMLPYVVREPSEQVEHCRALLARLDQDLDKYMYLISLSERNERLFYNVLSSDIGYMMPLVYTPTVGLACQRYSLIHQNAKGMFISIKDKGHIYDVLKNWPETDVRAIVVTDGERILGLGDLGANGMGIPVGKLSLYTALAGIKPSQCLPITLDVGTNTESILEDPLYIGLRERRATGDLYDEFIDEFMHACVRRFGQNCLIQFEDFANANAFRLLSKYRDSFCTFNDDIQGTASVAVAGLLASLKIKKTQLKDNTLLFLGAGEAALGIANLCLMAMKVEGLTEEEAKARIWMVDSRGVITRDRPKGGLTEHKLHFAQLHEPIDTLAEAVRKVRPNVLIGAAAQGGAFNQEILELMADINETPIIFALSNPTSKAECTAEEAYTYTKGRCIFASGSPFAPVTYNNKKFYPGQGNNSYIFPGVALGVLCAGMLNIPEQVFLVAAERLAELVSKDDLAKGSLYPPLSSIVSCSMAIAERIVEYAYKNGLATVRPEPVNKLAFIKAQMYDLDYPRSVPATYKM

SEQ ID NO: 5957 - DNA, 2292 bp, Drosophila melanogaster
  CDS (1)..(2292)
atgggtaattccagttccatttgcgccgatcgcaatgtcataacaaatttcgatgaaaatggcacgccggtatatcccaccgccaacaattcgcagagtccttcctcatatagtcgcggcaaagagcgcgagctcggctgttacacgaagagaaacagcaacagcaacaacaacaatagccatgagagagagagtcagagctgttgtagtagtcgtgtgtgtaaaaatcatacgaccacaacgacaaccacactcgaatacgaactttccaatttcgcaaaactaacgacacgaatcacaacgcaaagtgccgccgaagtggacacatcgccgcatacggatacggaaacgcatagggacagagattcgaatccgggtaatatagccttagccaccgatttggaactgcccaagggtctgccgttatcgttatcctcgcgacaccactggaatcagctgcagagcagtttgcacgcccttcaccaccagcaacagcaacaacaacagcaactacgttcatacagctccactagcgaaacaaatttggaagacaagatgagcaaacccgattcgaaactagataaatacgcgcagcgcgatcgcctgggcctttggggcactggtgacaatgaggtggtcggcagcctctccggattcacccgactcttggacaagcgctactcaaagggcctggccttcacacacgaggagcgccagcagttgggcatccatggcatgctgccctatgtggtccgtgagcccagtgagcaggtggagcactgccgtgctctgctggcgcgactggatcaggatctggacaagtacatgtacctgatcagcctatcggagcggaacgagcgtctgttctacaacgtgctcagctcagacatcggctacatgatgccactggtgtacacgcccaccgtgggattggcctgccagcgctacagtttgatccaccagaacgccaagggcatgttcatatccatcaaggacaagggacacatctacgacgtgctaaagaactggccggaaacggatgtgcgtgccatcgttgtcacggacggcgagcgcatcctgggactgggagatctgggcgccaacggaatgggtatacccgtgggcaaactgtccctgtatacggccttggcgggcattaagccatcgcagtgcctgcccatcaccttggatgtgggcaccaataccgaatccatcctggaggatcccctgtacatcggtctgcgcgaacgcagggccactggagatctgtacgatgagttcatcgatgagttcatgcatgcctgcgttcgtcgctttggtcaaaactgcctaatccagttcgaggactttgccaacgccaatgccttcaggctgttgtccaaataccgcgactccttctgcaccttcaacgacgatattcaaggaaccgcctcggtggccgtggctggtctgctggcctcgctaaagatcaagaagacccagctgaaggataacacgctgttgttcctgggcgccggagaagcggctcttggtattgccaacctgtgcctgatggccatgaaggtggagggtctcaccgaggaggaggccaaggcccgcatctggatggtggatagccgtggtgtcatcacccgcgatcgtccaaagggcggactcaccgaacacaagctgcactttgcccagctgcacgaacccatcgatactttggcagaggcggtgcgaaaggtgcgtcccaatgtcctgattggagcggctgcgcagggcggcgccttcaaccaggagatccttgagctgatggccgatattaacgagacgccgatcatctttgcactgtccaatccgaccagcaaggcggagtgcaccgccgaggaggcgtacacgtacaccaaggggcgctgcatcttcgccagcggttcgccttttgcgcctgtgacgtacaacaacaagaagttctatccgggtcagggcaacaactcgtacatattccctggcgtggcactgggtgttctgtgtgccggcatgctgaacattcccgagcaggtattcttggtcgccgccgagcgcttggcggagctggtctccaaggacgacctggccaagggtagcttgtatccaccactcagctccattgtcagctgttcgatggccattgccgaaaggattgtggagtacgcctacaaaaacggattggccactgttcgtccagagccggtcaataagctggcgttcatcaaggcccagatgtacgatctggactatccccgatccgtgcccgccacctataagatgtag

SEQ ID NO: 5958 - protein, 763 aa, Drosophila melanogaster
MGNSSSICADRNVITNFDENGTPVYPTANNSQSPSSYSRGKERELGCYTKRNSNSNNNNSHERESQSCCSSRVCKNHTTTTTTTLEYELSNFAKLTTRITTQSAAEVDTSPHTDTETHRDRDSNPGNIALATDLELPKGLPLSLSSRHHWNQLQSSLHALHHQQQQQQQQLRSYSSTSETNLEDKMSKPDSKLDKYAQRDRLGLWGTGDNEVVGSLSGFTRLLDKRYSKGLAFTHEERQQLGIHGMLPYVVREPSEQVEHCRALLARLDQDLDKYMYLISLSERNERLFYNVLSSDIGYMMPLVYTPTVGLACQRYSLIHQNAKGMFISIKDKGHIYDVLKNWPETDVRAIVVTDGERILGLGDLGANGMGIPVGKLSLYTALAGIKPSQCLPITLDVGTNTESILEDPLYIGLRERRATGDLYDEFIDEFMHACVRRFGQNCLIQFEDFANANAFRLLSKYRDSFCTFNDDIQGTASVAVAGLLASLKIKKTQLKDNTLLFLGAGEAALGIANLCLMAMKVEGLTEEEAKARIWMVDSRGVITRDRPKGGLTEHKLHFAQLHEPIDTLAEAVRKVRPNVLIGAAAQGGAFNQEILELMADINETPIIFALSNPTSKAECTAEEAYTYTKGRCIFASGSPFAPVTYNNKKFYPGQGNNSYIFPGVALGVLCAGMLNIPEQVFLVAAERLAELVSKDDLAKGSLYPPLSSIVSCSMAIAERIVEYAYKNGLATVRPEPVNKLAFIKAQMYDLDYPRSVPATYKM

SEQ ID NO: 5959 - DNA, 1137 bp, Weissella paramesenteroides
  CDS (1)..(1137): transl_table=11
atgaatcgtgttttgaaggtgcacaaatcccacactggtgtattggatattaaagccgatattagtattaaaacaccagatgatttaagtgaagcatacaccccaggtgtttcagggatcgccaagatgattgcggaagacgaagcgttgaaaaacgtttatacgatgagtgggaagttgattccaatcatcactgatggttctgcagtacttggattgggaaatattggaccggcggctgggttaccaatcgttgaaggaaaggcacttatttacaaagagttttcaggtgtaaatgccattccgatggcgttgaatcaagtggacgtcgatgagtttgtcgaaactattaagacaatggcgccatcatttgcaggaattcatttggaagatatcgcggctccgcgcgtatttgaaattgaaaagcgattgaatgaagaactggacatccccgtttatcacgatgatcaaaccggaacggcagttgtcgtcttagcagcacttatcaatgcagccaaagttgttaacaagcctttgaaagacttgaaggtagtgattaatggtatgggagcagctggagtggcaaccgccaaaatcttgttagcgagtggcatgaagaacttgactctagttgatattcacggcgttatccgcgcggacgataacgactacaacgagtatcaacgcgaactggcaacagcagttaaccaagttgacggtcgaagtttggatgatgtaatcgataatcaagatgtcttcatcggattgtcagacgcgaatgttttgtctaaggaacaagttacccgcatggctcaagatgcgattgtctttgctctggcgaacccagttcctgaaattttgccagaagaagcgcatgaaggtggcgctaccattacggcaactggctcatcacaatgggcaaaccaagttaacaatgtgttggtgttcccaggattgttcaagggattgttagcaacggacattaagaaggtagaactaagtctgcaagttaaattggcggaagggttagcacaaatggtaactacgccaacggcagaccacattgtgccacgcgtatttgatgatggtgtcgtcgatgccgtttcaaatgcagtaattgcatacgctaaggcataa

SEQ ID NO: 5960 - protein, 378 aa, Weissella paramesenteroides
MNRVLKVHKSHTGVLDIKADISIKTPDDLSEAYTPGVSGIAKMIAEDEALKNVYTMSGKLIPIITDGSAVLGLGNIGPAAGLPIVEGKALIYKEFSGVNAIPMALNQVDVDEFVETIKTMAPSFAGIHLEDIAAPRVFEIEKRLNEELDIPVYHDDQTGTAVVVLAALINAAKVVNKPLKDLKVVINGMGAAGVATAKILLASGMKNLTLVDIHGVIRADDNDYNEYQRELATAVNQVDGRSLDDVIDNQDVFIGLSDANVLSKEQVTRMAQDAIVFALANPVPEILPEEAHEGGATITATGSSQWANQVNNVLVFPGLFKGLLATDIKKVELSLQVKLAEGLAQMVTTPTADHIVPRVFDDGVVDAVSNAVIAYAKA

SEQ ID NO: 5961 - DNA, 1815 bp, Drosophila melanogaster
  CDS (1)..(1815)
atgttctcacgacccagcttatgtggaactgtgggcaaattgtgtcgatgcggcacttcagcaacaggaaagactgctgtggcagcagcaacagttcccaccgctcgacactatcatgaggtggtgggcgatatcatctgcccgtctcaggtgcgcggcatagatcacatccgtgatccgcgactcaacaagggccttgcctttacactggaggagcgccagactctgggcatccatgggctgcagccagcgcgcttcaagacgcaagaggagcagctgcagctatgcaagatcgccgtaaaccgctacacggagccgctgaacaagtatctctatctgagcgatctgtacgatcgcaatgagcgtctgttcttccgcttcctatcggagaacatcgaggatctgatgcccattgtgtacacgccgacggtgggcttggcctgccagcgctttggcctgatctaccgacgtcctcatggtctgttcatcacctacaacgatcgaggacacatctttgatgtgatgaagaactggccggagccgaatgtgcgtgccatctgtgtgacggatggtgagcgcatcctgggactgggagatttgggcgcctgcggcatgggcattcccgtgggcaagctggccttgtacacggctctggccggaatcaagccccatcagtgcctgcccattgtggtggatgtgggcaccaacaacatcgatctgctggaggatcccctgtacgtgggtctgcgtcagaagcgagtggttggtcgggagtacgacgagttcattgacgagtttatggaggccgtggtgcagcgctatggccagaacactctgatccagtttgaggactttggcaaccacaatgcatttaggttcctggacaaataccgcaacacctattgcactttcaacgacgacatccagggaaccgcctccgtggccgttgctgggctctatgcctccaagcgtattacgggtaagtccttcaaggactacaccttcctgtttgcaggagccggtgaggccgccatcggcatcgccgatctcacggtcaaggccatggtgcaggatggtgtgcccatcgaggaggcctacaacagaatttacatggtcgatatcgatggtctgctgaccaagagccgcaaggtgggcaacttggatggccacaaaatccactacgccaaggacatcaatccgatgtcagatctcgccgagattgtctccaccatcaaacccagtgtgcttattggtgcctcggctgctgccggcattttcacaccggaaatcctgcgcaccatggcggataacaatgagaggcccgtggtgttcgccttgtccaatcccaccagcaaggcagaatgcactgccgaagatgcttacaagcacacggatgctcgcgtgatcttctcgtcgggctctcccttcccaccggtccagatcggtgacaagaccttctacccgggccagggcaacaatgcctacatcttcccaggcgttggcttgggcgtgatctgcacgggtactcaccacatacccgacgaaatgttcctcatcgccgcccaggagttggccaacttcgtggagcccagcgatattgagcgcggatcgctgtatcctccgctgtcgagcatccgcaacgtgtccatgaacattgccgttggcgtgaccaaatgtgcctacgatagaggcttggcatctacctaccctgagccacaggacaagcgcaagtggctggagaatcagctgtacaacttcaactacgagagctcgatgcccggcttcctgggtttggccgcggatgccctacattaa

SEQ ID NO: 5962 - protein, 604 aa, Drosophila melanogaster
MFSRPSLCGTVGKLCRCGTSATGKTAVAAATVPTARHYHEVVGDIICPSQVRGIDHIRDPRLNKGLAFTLEERQTLGIHGLQPARFKTQEEQLQLCKIAVNRYTEPLNKYLYLSDLYDRNERLFFRFLSENIEDLMPIVYTPTVGLACQRFGLIYRRPHGLFITYNDRGHIFDVMKNWPEPNVRAICVTDGERILGLGDLGACGMGIPVGKLALYTALAGIKPHQCLPIVVDVGTNNIDLLEDPLYVGLRQKRVVGREYDEFIDEFMEAVVQRYGQNTLIQFEDFGNHNAFRFLDKYRNTYCTFNDDIQGTASVAVAGLYASKRITGKSFKDYTFLFAGAGEAAIGIADLTVKAMVQDGVPIEEAYNRIYMVDIDGLLTKSRKVGNLDGHKIHYAKDINPMSDLAEIVSTIKPSVLIGASAAAGIFTPEILRTMADNNERPVVFALSNPTSKAECTAEDAYKHTDARVIFSSGSPFPPVQIGDKTFYPGQGNNAYIFPGVGLGVICTGTHHIPDEMFLIAAQELANFVEPSDIERGSLYPPLSSIRNVSMNIAVGVTKCAYDRGLASTYPEPQDKRKWLENQLYNFNYESSMPGFLGLAADALH

SEQ ID NO: 5963 - DNA, 1989 bp, Zea mays
  CDS (1)..(1989)
atgatctccgcgcgcaccgccgcagcttcccccgcttccctgtggaagcagggaggacgaagcgagggcggcggcagctgcgacggatgtcggacttacaggaacactttgcggagggccgcagcagcgaaggtgcgtgccttgccgtcgagggcggtggaggcggtcaaaatgggctccgccgcggagatggagcaggaggaggcggaggtggccgcggccgcggccggcgtcgtcgtcgaggaccactacggcgaggacagcgccaccgaggagctgcccatcctgccctgggccttctccgtcgcaagatatgtttccttcagttggttgaaaaaatacgctgaggagtcttatttctacatcagcggttacaccctcttgagggatccacatcacaacaagggtcttgctttcatggagaaggagagggatgcacaccacttgcgggggctgcttcctcctgcagttgtgcctcaagaactccaaattaagaagatcatgcacaacctgcggcagtaccaggtccctttgcagcgctatatggccatgatggaccttcaggagaggaacgagaggcttttctacaagcttttaattgataacgtggaggagctgcttcctgtggtttatacaccaactgtaggtgaggcctgccagaagtatgggtccatctttcgacaaccacagggtctgtatgtcagcttgagggacaaggggaaggtcctagaagttctaaggaactggccacataggaacattcaagttatctgtgttactgatggtgaggcaatcttgggacttggagatttgggttctcagggaatgggaattcctgtaggcaaacttgctctatacactgctcttggaggagttcgtccatcagcttgtttgcctatcacaatcgatgttggcacaaataatgagaaactgcttaatgatgagttttacattggactccggcaaaaacgtgcaactggcgaggagtatcatgagcttatggaagagttcatggctgctgttaagcaaatctacggcgagaaagtcctcattcagtttgaggacttcgcgaatcataatgcttttaatttgcttgcaaaatatagcaagagccatcttgttttcaatgatgacatccagggcacagcatcagtggtccttgcaggtttgttagcagcactcaaggtggttggtaggaccttggcagagcacacttatttattccttggtgctggggaggctggaactggtattgcagaactcattgctcttgagatttcaaaacagacgtcggctccaattgaagagtgccgcaagaagatttggttggtggactcaaagggtttgattgttgactctcgtaaaaactccgttcagtcattcaaaaaaccttgggcacatgagcatgagcccttgacaaccttgtacgatgctgttcagtccatcaaacctacagttctgattgggacgtctggagttggaagaacattcacaaaagaagttgttgaggccatggcttccttcaatgagaggcctatcatcttttcactgtcaaatccaacctctcattctgaatgtactgctgaagaagcatataactggactcaggtcgtaatatttgccagtggcagtccatttgaccctgtggagtacgatgggaaggtttttgtacctggacagtcgaacaacgcctacattttccctggatttggcctcggtcttgttatctctggagccatccgtgtccacgaggacatgcttcttgccgcctcggaagcactagctgctcaggccacacaggagaacttcgacaagggatcaatcttcccacccttcaccaacattagaaagatctctgcgcgcattgccagagccgtggctgcaaaagcttatgaactcggtttggcgacccgtctgcctcccccaagggacctggtgaaatatgcacagagctgcatgtacactcctgtctaccgtaactaccggtag

SEQ ID NO: 5964 - protein, 662 aa, Zea mays
MISARTAAASPASLWKQGGRSEGGGSCDGCRTYRNTLRRAAAAKVRALPSRAVEAVKMGSAAEMEQEEAEVAAAAAGVVVEDHYGEDSATEELPILPWAFSVARYVSFSWLKKYAEESYFYISGYTLLRDPHHNKGLAFMEKERDAHHLRGLLPPAVVPQELQIKKIMHNLRQYQVPLQRYMAMMDLQERNERLFYKLLIDNVEELLPVVYTPTVGEACQKYGSIFRQPQGLYVSLRDKGKVLEVLRNWPHRNIQVICVTDGEAILGLGDLGSQGMGIPVGKLALYTALGGVRPSACLPITIDVGTNNEKLLNDEFYIGLRQKRATGEEYHELMEEFMAAVKQIYGEKVLIQFEDFANHNAFNLLAKYSKSHLVFNDDIQGTASVVLAGLLAALKVVGRTLAEHTYLFLGAGEAGTGIAELIALEISKQTSAPIEECRKKIWLVDSKGLIVDSRKNSVQSFKKPWAHEHEPLTTLYDAVQSIKPTVLIGTSGVGRTFTKEVVEAMASFNERPIIFSLSNPTSHSECTAEEAYNWTQVVIFASGSPFDPVEYDGKVFVPGQSNNAYIFPGFGLGLVISGAIRVHEDMLLAASEALAAQATQENFDKGSIFPPFTNIRKISARIARAVAAKAYELGLATRLPPPRDLVKYAQSCMYTPVYRNYR

SEQ ID NO: 5965 - DNA, 1758 bp, Aloe arborescens
  CDS (1)..(1758)
atgacaagcgatagtgcgtcggtgctcgatctcgatactaaaaccaccgttgggggtggagttgaggacgcgtacggtgaagatcaggcgactgaggagcagctcgtcacgccgtggaccatttcagttgccagtggctactctttgttgcgggatccacaccacaacaaagggcttgccttcacggagaaagagagagatgcccactacttgcgaggccttttgccacctgtttgcatcagtcaagagcttcaggagaagaagctcatgcgcagcctccgccagtatcaggtccccctccagcgttacatggcgatgatggatcttcaggaaagaaatgaaagacttttctacaagcttctgatcgataatgttgaggagttgcttccggttgtttacacgccaacagttggtgaggcttgccagaagtatggttgtatctttaggcgtccacaaggtctttatataagcttaaaagagaagggaaagattcttgaggtgttgaagaactggcctgagagaagcattcaagttatagtggttactgatggtgagcgaattttggggcttggagatcttggttctcaggggatgggaattcctgtaggaaagctctctctttacactgcccttggaggaattcatccatcttcctgcttacccgttacaattgatgtgggaacaaacaatgagcaattattgaatgatgagttctatattggattgaggcaaaagcgtgctactggccaggaatatgctgaattactacatgagttcatgactgccgtcaaacagaactatggagagaaagtcattgttcaatatgaagactttgccaaccacaatgcatttgaattgcttgcaaaatacagtaaaagccatcttgtatttaatgatgatattcagggtacagcatctgttgtccttgcaggtcttgttgcagcactgaaagtggttggcagaactttagcagaacacactttcttgtttcttggtgctggagaggctggtaccggaattgcagaactcatagctcttgaaatgtcaagacagacaaaagctccaatcgaggagactcggaagaagatttggcttgtagattctaagggtttgattgtgagctcacgcaaggaatcattgcagcactttaaaaaaccatgggcacatgaacatgaacctgtgaaaactcttttagatgctgtaaagaccatcaagccaacggtgttgataggatcatctggggtggggcaaactttcacaaaggaggttgctgaggccatgccctctttcaatgagaaaccagttattcttgctctatcaaatccaacatcacaatctgagtgtactgctgaacaagcatatagttggagcgagggccgggccatttttgccagtgggagtccatttgatccagttgaatacaatgggaagctcttcgtgccaggccaggcaaacaatgcatacattttccctggactcggtcttggtctggtgatctcaggagcaatacgtgtacatgatgaaatgcttcttgctgcttctgaagctctggctcagcaggtgacagaagagaatttcgctaatggactgatttatccacccttcaccataatcagaaagatctccgcccacattgcagctaatgtagctgctaaagcatatgaactaggtcttgctactcatctccctcgcccagcgaatcttgtgaaatatgcagaaagccgcatgtacagtccgctatatcgcagttacagataa

SEQ ID NO: 5966 - protein, 585 aa, Aloe arborescens
MTSDSASVLDLDTKTTVGGGVEDAYGEDQATEEQLVTPWTISVASGYSLLRDPHHNKGLAFTEKERDAHYLRGLLPPVCISQELQEKKLMRSLRQYQVPLQRYMAMMDLQERNERLFYKLLIDNVEELLPVVYTPTVGEACQKYGCIFRRPQGLYISLKEKGKILEVLKNWPERSIQVIVVTDGERILGLGDLGSQGMGIPVGKLSLYTALGGIHPSSCLPVTIDVGTNNEQLLNDEFYIGLRQKRATGQEYAELLHEFMTAVKQNYGEKVIVQYEDFANHNAFELLAKYSKSHLVFNDDIQGTASVVLAGLVAALKVVGRTLAEHTFLFLGAGEAGTGIAELIALEMSRQTKAPIEETRKKIWLVDSKGLIVSSRKESLQHFKKPWAHEHEPVKTLLDAVKTIKPTVLIGSSGVGQTFTKEVAEAMPSFNEKPVILALSNPTSQSECTAEQAYSWSEGRAIFASGSPFDPVEYNGKLFVPGQANNAYIFPGLGLGLVISGAIRVHDEMLLAASEALAQQVTEENFANGLIYPPFTIIRKISAHIAANVAAKAYELGLATHLPRPANLVKYAESRMYSPLYRSYR

SEQ ID NO: 5967 - DNA, 1320 bp, Bacillus subtilis
  CDS (1)..(1320): transl_table=11
atgatagcgaaacacatgattcggacactgatgatcgaaacgccttcggttcccggaaatcttggaagggtggctacggccatcggccttctgggcggggatattggtgaagtggagacggtaaaagtcggacccaattacacaatgcggaatattaccgttcaagtggagaatgaagaacagcttcaggaagtgatcgcggctgtacaggccctcggagaagggatcaggcttcacaccgtatctgatgaagtcctgtccgcacatgaaggcggaaaaatccaaatgaaaagcaaaatgccgatccgttcactggcagagctgggacgtgtctacacaccaggtgttgcggacgtgtgccgactgatcgaaaaagaacctgaaaaagcttctatttatacaacgatcagcaattctgttgcaattgtaacggatggaaccgcaattttaggccttgggaatatcggctctgtggctggcatgcctgtcatggaaggaaaggctgctttatttgatcagctggcgggtattagcggcattccgatactgcttgatacgagtgatcctgaagaaatcatcaaaacagtaaaacatatttctccgggctttagcggcatccttcttgaggatatcggttcgccgcattgttttgaaatcgaggatcgcctaaaagaggagctgaacatccctgttatgcacgatgaccagcatggtacagctgtagtgacgctggcagctgccatttcggcatgcaggagtgcgggggttgacctgaaggaagcgaaagtggggcaaatcggccttggcgcagcaggcgtggccatctgccggatgttcatggcttatggtgtgaatgctgtatacggaacagacaaatcagagtcagcaatgaaccgtctcgaacaatacggcggacaggcagtttccagtattgaggagcttatggaaacatgtgatattgtcattgctacaacgggcgttccgggtttaataaaaccggcatttgtacgttctggtcaagtgattctggctttatcgaatccgaagccggaaattgagccggaggccgcactgcaggctggcgccgcatatgcagctgacgggcgttctgttaataatgtactcggttttccagggatttttagaggagcgcttaacgcaaaaagcacggagattaatcatgatatgcttgtcgcagcagcagaggccatcgcagcttgcactaaacaaggtgatgttgtccctcagccgcttgattcaaaagtccatcatgcggtagcagcagctgtcgagcatgcagctcttacagcagtgaaataa

SEQ ID NO: 5968 - protein, 439 aa, Bacillus subtilis
MIAKHMIRTLMIETPSVPGNLGRVATAIGLLGGDIGEVETVKVGPNYTMRNITVQVENEEQLQEVIAAVQALGEGIRLHTVSDEVLSAHEGGKIQMKSKMPIRSLAELGRVYTPGVADVCRLIEKEPEKASIYTTISNSVAIVTDGTAILGLGNIGSVAGMPVMEGKAALFDQLAGISGIPILLDTSDPEEIIKTVKHISPGFSGILLEDIGSPHCFEIEDRLKEELNIPVMHDDQHGTAVVTLAAAISACRSAGVDLKEAKVGQIGLGAAGVAICRMFMAYGVNAVYGTDKSESAMNRLEQYGGQAVSSIEELMETCDIVIATTGVPGLIKPAFVRSGQVILALSNPKPEIEPEAALQAGAAYAADGRSVNNVLGFPGIFRGALNAKSTEINHDMLVAAAEAIAACTKQGDVVPQPLDSKVHHAVAAAVEHAALTAVK

SEQ ID NO: 5969 - DNA, 2313 bp, Rhizobium meliloti
  CDS (1)..(2313): transl_table=11
atgaacacgggcgataaagcgaaatcccaggccgttcccgccagcggagacatcgatcagcaggcactcttcttccatcgctatccccgccccggcaagctcgagattcagccgaccaagccgctcgggaaccaacgcgacctggcgctcgcctattcgcccggggtcgccgcaccgtgcctcgccatcaaggacaatcccgagaccgcagccgatttcaccgcccgcgccaatctcgtcgccgtggtatcgaacggcaccgccgtcctcggcctcggcaatatcggtcccctcgcctccaaacccgtgatggaaggtaaggctgttctcttcaagaagttcgcagggatcgacgtcttcgacatcgagatcgacgcaccgacggtcgatcggatggtcgacgtcatctcggcgctggagccgaccttcggcggcatcaatctcgaggacatcaaagctcccgaatgtttcgaggtggagcggcgtctgcgcgagaaaatggaaataccggtcttccacgacgaccagcacgggaccgcgatcatcgtcgcggccgccgtcctgaacggcctggaactcgccggcaaggacattgccgaggccaagatcgtggcctccggtgccggggcggcggcgcttgcctgcctcaacctcctcgtcacgctgggcgccaggcgcgaaaacatctgggtccacgacatcgaaggtctcgtctacaaagggcgcgaggccctgatggacgagtggaaagccgtctacgcgcaggagagcgacaatcgcgtgctcgccgacagcatcggcggggcggacgtgtttctggggctctcggccgccggcgtcctcaagcctgaactgttggcccggatggccgaaaagccgctgatcatggcgctggccaatcctacgccggagatcatgccagaggtggcccgcgccgcgcggcccgatgccatgatctgcaccggacgctcggacttcccgaaccaggtcaacaatgttctctgtttcccgcatatcttccgtggcgcgctcgattgcggcgcacgcaccatcaacgaagaaatgaagatggcggcggtccgcgcgatcgccggccttgcccgcgaggaaccgtcggatgtcgccgcgcgcgcctattccggcgaaacgccggtcttcggccccgactatctgatcccttcgcccttcgatcagcggctgatcctgcgcattgcgccggccgttgcaaaggccgcggccgaaagcggcgtcgccacgcgtccgatccaggacttcgacgcctatctcgacaagctcaaccgtttcgtcttccgctccggcttcatcatgaagccggtctttgctgcagcgaagaacgcggcgaagaaccgcgtcatcttcgccgagggcgaagatgagcgggtgctgcgcgccgcccaggtgctgctggaagaaggcacggccaagccgatcctgatcggccgcccgcaaatcatcgagacccgcctgcggcgctacggcctcagaatccgccccgatgtcgatttcgaggtcgtcaatcccgagggcgacccgcgctatcgcgactatgtcgatgattatttcgccctcgtcgggcggctcggcgtcattcccgaggcggcccgcacgatcgtgcgcacgaatacgacggtcatcggcgcgctcgccgtcaagcgcggcgaggcggacgcgctgatctgcggggtcgagggacgctacagcaggcatttgcgcgatgtatcgcagatcatcggcaagcgttcgggcgtactcgacttctcggcgctcagcctcctgatctcacaacgcggcgcgaccttcttcaccgatacctatgtgagcttcagcccgagcgcggaggagatcgctcagacgacagtgatggcggcaaacgaaatccgccgcttcggcatcacgccgcgtgctgccctcgtctcccactcgaacttcggctcgcgcgattccgagagcgctttcaagatgcgcaccgcactgcagctcgtgcgcgagctcgcccccgatctcgaggtggacggagagatgcacggcgattccgccatctccgaggtcctgcgccaacgcgtgatgccggacagcacgctgaacggcgaagcgaacctgctcgtcttccccaatctcgacgcggccaatatcacgctcggcgtggtcaaaaccatgacggacagcctgcatgtcggcccgatccttctgggctcggcgctgccggcgcatattctgtcgccgtccgtcacctcgcgtggcgtcgtcaacatggcagcgctggccgtcgtcgaatcaagccatcccgtctga

SEQ ID NO: 5970 - protein, 770 aa, Rhizobium meliloti
MNTGDKAKSQAVPASGDIDQQALFFHRYPRPGKLEIQPTKPLGNQRDLALAYSPGVAAPCLAIKDNPETAADFTARANLVAVVSNGTAVLGLGNIGPLASKPVMEGKAVLFKKFAGIDVFDIEIDAPTVDRMVDVISALEPTFGGINLEDIKAPECFEVERRLREKMEIPVFHDDQHGTAIIVAAAVLNGLELAGKDIAEAKIVASGAGAAALACLNLLVTLGARRENIWVHDIEGLVYKGREALMDEWKAVYAQESDNRVLADSIGGADVFLGLSAAGVLKPELLARMAEKPLIMALANPTPEIMPEVARAARPDAMICTGRSDFPNQVNNVLCFPHIFRGALDCGARTINEEMKMAAVRAIAGLAREEPSDVAARAYSGETPVFGPDYLIPSPFDQRLILRIAPAVAKAAAESGVATRPIQDFDAYLDKLNRFVFRSGFIMKPVFAAAKNAAKNRVIFAEGEDERVLRAAQVLLEEGTAKPILIGRPQIIETRLRRYGLRIRPDVDFEVVNPEGDPRYRDYVDDYFALVGRLGVIPEAARTIVRTNTTVIGALAVKRGEADALICGVEGRYSRHLRDVSQIIGKRSGVLDFSALSLLISQRGATFFTDTYVSFSPSAEEIAQTTVMAANEIRRFGITPRAALVSHSNFGSRDSESAFKMRTALQLVRELAPDLEVDGEMHGDSAISEVLRQRVMPDSTLNGEANLLVFPNLDAANITLGVVKTMTDSLHVGPILLGSALPAHILSPSVTSRGVVNMAALAVVESSHPV

SEQ ID NO: 5971 - DNA, 1749 bp, Bacillus subtilis
  CDS (1)..(1749): transl_table=11
atgggttattacttaacttggttaactatttcaagaaagaaggagatttgcttgaataacataaaaaaaacgaaagaaggccacttagaaacaactcttagaggaaaagaagttttatctattcctactttaaataaaggcgttgctttttcactagaagaaagacaagaactcggcttagaagggcttctgccgccaactgtactttctcttgatcaacaagcacaacgcgcgtacgagcaattccaagcgcagcctgaccgccttcgtcaaaatgtttacttaagtgatcttgcaaaccgtaacgaagttcttttctataaattgctgaaaaaccatcttcgcgaaatgcttcctgttgtgtacacgccaacagttggtgaagcgattcaggaatacagccatgaatatagaagacctcaaggaatctacttgtcaatcgataacattgacggtattgaaaaagcgtttgaaaaccttcatgcgacagcaggcgatattgatcttatcgttgctactgactccgaaagcattctcggtatcggtgactggggtgtaggcggtattaatattgcaatcggtaaattggctgtctacactgctgcagctggtattgaccctagccgtgttatcccggttgtgcttgatgtcggtacgaacaacgaaaaacttctaaacgatcctttatatattggtaacaagcatgaacgtgttcaaggtgaacgctacgaagctttcattgacgcttatgtaaaagctgcattgaaattcttccctaaagcgcttcttcactgggaagaccttggcaacaaaaatgcacgcaacatcatgaaaaaatacaatcatgaaatcctgacatttaatgatgatattcaaggtactggcgcgattacacttgcaggtgtgcttgccgctatgaagaaaaccggcgcttctattaaagatcagcgtgttgttatcttcggtgctggttctgctggtatcggtattgctgaccaaatccgtgacacaatggtgctagccggattatctgaagaagaagctaacaaacgtttctacacacttgattacagaggcttgctgactgaagacatcgaaggcatccttgatttccaaaaaccttaccttcgcaatgcggatgaagtgaaagactggaagcgcgatgaaaaaggtcaaattccattcgatgaagttgttcgtcaagcgaaaccaacaatcttgattggtacttcaggggtttcaggtgcattcacagaggaaattgtaaaagaaatggcatctcacgtagaccgtccggttatcatgccgatgtctaacccgactcaccttgctgaagctgttcctgaagatctgttcaaatggactgacggaaaagtgcttattgcaacaggaagcccatttgacaatgtagaatacaacggtgtttcttatgaaatcggacaatctaacaacgcattcgcgttccctggtcttggacttggttcaattgtagctgaagcgcgtatcattacacctgctatgtttgctgcaactgctgatgcgattgctgaaatggttgatcttgaaacacctggagcaggattgcttccaagcattgataagcttcaagaggtttctatccaagttgcgattgccgttgctgaagcagcaattaaagacggcgtggcaaatcgtcagcctgaagatgtgaaacaagcggtacttgatgcaatgtggacacctgaatacaaaaaagtcatcgcgaaataa

SEQ ID NO: 5972 - protein, 582 aa, Bacillus subtilis
MGYYLTWLTISRKKEICLNNIKKTKEGHLETTLRGKEVLSIPTLNKGVAFSLEERQELGLEGLLPPTVLSLDQQAQRAYEQFQAQPDRLRQNVYLSDLANRNEVLFYKLLKNHLREMLPVVYTPTVGEAIQEYSHEYRRPQGIYLSIDNIDGIEKAFENLHATAGDIDLIVATDSESILGIGDWGVGGINIAIGKLAVYTAAAGIDPSRVIPVVLDVGTNNEKLLNDPLYIGNKHERVQGERYEAFIDAYVKAALKFFPKALLHWEDLGNKNARNIMKKYNHEILTFNDDIQGTGAITLAGVLAAMKKTGASIKDQRVVIFGAGSAGIGIADQIRDTMVLAGLSEEEANKRFYTLDYRGLLTEDIEGILDFQKPYLRNADEVKDWKRDEKGQIPFDEVVRQAKPTILIGTSGVSGAFTEEIVKEMASHVDRPVIMPMSNPTHLAEAVPEDLFKWTDGKVLIATGSPFDNVEYNGVSYEIGQSNNAFAFPGLGLGSIVAEARIITPAMFAATADAIAEMVDLETPGAGLLPSIDKLQEVSIQVAIAVAEAAIKDGVANRQPEDVKQAVLDAMWTPEYKKVIAK

SEQ ID NO: 5973 - DNA, 2280 bp, Escherichia coli
  CDS (1)..(2280): transl_table=11
atggatgaccagttaaaacaaagtgcacttgatttccatgaatttccagttccagggaaaatccaggtttctccaaccaagcctctggcaacacagcgcgatctggcgctggcctactcaccaggcgttgccgcaccttgtcttgaaatcgaaaaagacccgttaaaagcctacaaatataccgcccgaggtaacctggtggcggtgatctctaacggtacggcggtgctggggttaggcaacattggcgcgctggcaggcaaaccggtgatggaaggcaagggcgttctgtttaagaaattcgccgggattgatgtatttgacattgaagttgacgaactcgacccggacaaatttattgaagttgtcgccgcgctcgaaccaaccttcggcggcatcaacctcgaagacattaaagcgccagaatgtttctatattgaacagaaactgcgcgagcggatgaatattccggtattccacgacgatcagcacggcacggcaattatcagcactgccgccatcctcaacggcttgcgcgtggtggagaaaaacatctccgacgtgcggatggtggtttccggcgcgggtgccgcagcaatcgcctgtatgaacctgctggtagcgctgggtctgcaaaaacataacatcgtggtttgcgattcaaaaggcgttatctatcagggccgtgagccaaacatggcggaaaccaaagccgcatatgcggtggtggatgacggcaaacgtaccctcgatgatgtgattgaaggcgcggatattttcctgggctgttccggcccgaaagtgctgacccaggaaatggtgaagaaaatggctcgtgcgccaatgatcctggcgctggcgaacccggaaccggaaattctgccgccgctggcgaaagaagtgcgtccggatgccatcatttgcaccggtcgttctgactatccgaaccaggtgaacaacgtcctgtgcttcccgttcatcttccgtggcgcgctggacgttggcgcaaccgccatcaacgaagagatgaaactggcggcggtacgtgcgattgcagaactcgcccatgcggaacagagcgaagtggtggcttcagcgtatggcgatcaggatctgagctttggtccggaatacatcattccaaaaccgtttgatccgcgcttgatcgttaagatcgctcctgcggtcgctaaagccgcgatggagtcgggcgtggcgactcgtccgattgctgatttcgacgtctacatcgacaagctgactgagttcgtttacaaaaccaacctgtttatgaagccgattttctcccaggctcgcaaagcgccgaagcgcgttgttctgccggaaggggaagaggcgcgcgttctgcatgccactcaggaactggtaacgctgggactggcgaaaccgatccttatcggtcgtccgaacgtgatcgaaatgcgcattcagaaactgggcttgcagatcaaagcgggcgttgattttgagatcgtcaataacgaatccgatccgcgctttaaagagtactggaccgaatacttccagatcatgaagcgtcgcggcgtcactcaggaacaggcgcagcgggcgctgatcagtaacccgacagtgatcggcgcgatcatggttcagcgtggggaagccgatgcaatgatttgcggtacggtgggtgattatcatgaacattttagcgtggtgaaaaatgtctttggttatcgcgatggcgttcacaccgcaggtgccatgaacgcgctgctgctgccgagtggtaacacctttattgccgatacatatgttaatgatgaaccggatgcagaagagctggcggagatcaccttgatggcggcagaaactgtccgtcgttttggtattgagccgcgcgttgctttgttgtcgcactccaactttggttcttctgactgcccgtcgtcgagcaaaatgcgtcaggcgctggaactggtcagggaacgtgcaccagaactgatgattgatggtgaaatgcacggcgatgcagcgctggtggaagcgattcgcaacgaccgtatgccggacagctctttgaaaggttccgccaatattctggtgatgccgaacatggaagctgcccgcattagttacaacttactgcgtgtttccagctcggaaggtgtgactgtcggcccggtgctgatgggtgtggcgaaaccggttcacgtgttaacgccgatcgcatcggtgcgtcgtatcgtcaacatggtggcgctggccgtggtagaagcgcaaacccaaccgctgtaa

SEQ ID NO: 5974 - protein, 759 aa, Escherichia coli
MDDQLKQSALDFHEFPVPGKIQVSPTKPLATQRDLALAYSPGVAAPCLEIEKDPLKAYKYTARGNLVAVISNGTAVLGLGNIGALAGKPVMEGKGVLFKKFAGIDVFDIEVDELDPDKFIEVVAALEPTFGGINLEDIKAPECFYIEQKLRERMNIPVFHDDQHGTAIISTAAILNGLRVVEKNISDVRMVVSGAGAAAIACMNLLVALGLQKHNIVVCDSKGVIYQGREPNMAETKAAYAVVDDGKRTLDDVIEGADIFLGCSGPKVLTQEMVKKMARAPMILALANPEPEILPPLAKEVRPDAIICTGRSDYPNQVNNVLCFPFIFRGALDVGATAINEEMKLAAVRAIAELAHAEQSEVVASAYGDQDLSFGPEYIIPKPFDPRLIVKIAPAVAKAAMESGVATRPIADFDVYIDKLTEFVYKTNLFMKPIFSQARKAPKRVVLPEGEEARVLHATQELVTLGLAKPILIGRPNVIEMRIQKLGLQIKAGVDFEIVNNESDPRFKEYWTEYFQIMKRRGVTQEQAQRALISNPTVIGAIMVQRGEADAMICGTVGDYHEHFSVVKNVFGYRDGVHTAGAMNALLLPSGNTFIADTYVNDEPDAEELAEITLMAAETVRRFGIEPRVALLSHSNFGSSDCPSSSKMRQALELVRERAPELMIDGEMHGDAALVEAIRNDRMPDSSLKGSANILVMPNMEAARISYNLLRVSSSEGVTVGPVLMGVAKPVHVLTPIASVRRIVNMVALAVVEAQTQPL

SEQ ID NO: 5975 - DNA, 2271 bp, Haemophilus influenzae
  CDS (1)..(2271): transl_table=11
atgaccgaacaattacgtcaagcagccttagatttccacgaatttccaattcctggaaaaatcgaagttaccccaacaaaatcattagcaacccaacgtgatcttgccttagcttattcaccgggtgtggcagagccttgtttagaaattgaaaaagatcctgcagcctcttacaaatatacagcacgtggcaatttagtggcggtgatttccaatggtacagcggtgcttgggcttggcaatattggcgcgcttgccggcaaacctgtaatggaaggaaagggcgtgttgttcaaaaaattcgcaggcatcaacgtgtttgatattgaagtgaatgaacatgatcccgataaacttgtagatattattgcctcgttagagccaactttcggtggggtaaatcttgaagatattaaagcaccggaatgtttctatattgaacaaaaattgcgtgagagaatgaatattcctgtattccatgatgaccaacatggcacggcgatcatcagcgctgccgcgatcatcaattctcttcgtattgtaggtaaaaaaattgaagatgtacgcttagtggcttctggtgcgggtgctgcatctattgcgtgtttgaacttattgctttctttaggtatgaaacgtgaaaacatcacggtttgtgactcgaaaggcgtggtatataaaggccgtgatgacaaaatggatcaaaccaaaaaagagtatgcaattgaagataatggctggcgtaaacttgctgatgcgattccaaatgcagatattttcttaggttgttctgcggctggtgcgcttacacaagatatggttaaaagtatggctgcgcatccaattattcttgctttggctaatccaaatcctgaaattaccccgccagaagcaaaagcagttcgtcctgatgcgattgtatgtacaggccgctctgattatccaaaccaagtaaataacgtgctttgtttcccatttattttccgtggtgcattagatgtgggcgcaaccactattaatgaagaaatgaaacgtgcggcagtttatgctatcgcagaccttgcattagaagagcaaaacgaagtggtaacctctgcttacggtggcgaaggggcaacatttggtgcggattatgtgattcctcgtccatttgatcctcgcttgattgtgcgtattgcaccagcggtagcaaaagctgcaatggaatctggtgtggcaactcgtccaattcaaaattgggatgcttatgttgaaaaactcactcagtttgtttacaaaacgagcttgtttatgcgtcctattttcagccaagcaaaatcggcaaaacaacgcattattttagcggaaggggaagaaaataaagcattacatgccacccaagaagtgatttcaatgggcttggcaaatccaattttaattggtcgccgcagcgtgattgaagaaaaaattaaaaaacttggtttacgtttaactgcaggtgtagattttgaaattgtggataacgaagataatcctcgctatgaagaatgttggaaacactattacgaacttactaaacgtaaaggcattacacctgcaatcgcaaaacgtgtcgtgcgttctaacaccaccgtattagcttctacattgcttagcttaggttatgcagacgctttagtatgtggcttatttggttcatacggaaaacaccttgcctctattcgagatattattggcttaaaagacggtgtgaaaactgccgctgctttaaatagtcttgtattaccgacgggtaacgtattcttaacagatactcacgtaaacagtaatcctacagcagaagaattagctgaaattaccttaatggcagcagaagaaattcatcgttttggtattgaacctgcagttgcattgctttctcattctaattttggttcatctgattcattaggcgcaccaaaaatgcgcgaagtattacagatcgtcaaagagcgcaatccacatttaatgattgatggggaaatgcgtggcgatttagcgatgaatgaagcacacagaaaagaattaatgcctgatagcccattgaaaggaagcgcaaatttattagtgttccctgatttgagtgcatcacgtattagttatagcttattacgcggcactactacggcaattaccgttggcccgatcttaatgggaatgaataaatctgcgcatattcttaatccaggtgcatctgttcgtcgtattatcaatatgattgcctatgcagcagtgaaagcacaacaagagtaa

SEQ ID NO: 5976 - protein, 756 aa, Haemophilus influenzae
MTEQLRQAALDFHEFPIPGKIEVTPTKSLATQRDLALAYSPGVAEPCLEIEKDPAASYKYTARGNLVAVISNGTAVLGLGNIGALAGKPVMEGKGVLFKKFAGINVFDIEVNEHDPDKLVDIIASLEPTFGGVNLEDIKAPECFYIEQKLRERMNIPVFHDDQHGTAIISAAAIINSLRIVGKKIEDVRLVASGAGAASIACLNLLLSLGMKRENITVCDSKGVVYKGRDDKMDQTKKEYAIEDNGWRKLADAIPNADIFLGCSAAGALTQDMVKSMAAHPIILALANPNPEITPPEAKAVRPDAIVCTGRSDYPNQVNNVLCFPFIFRGALDVGATTINEEMKRAAVYAIADLALEEQNEVVTSAYGGEGATFGADYVIPRPFDPRLIVRIAPAVAKAAMESGVATRPIQNWDAYVEKLTQFVYKTSLFMRPIFSQAKSAKQRIILAEGEENKALHATQEVISMGLANPILIGRRSVIEEKIKKLGLRLTAGVDFEIVDNEDNPRYEECWKHYYELTKRKGITPAIAKRVVRSNTTVLASTLLSLGYADALVCGLFGSYGKHLASIRDIIGLKDGVKTAAALNSLVLPTGNVFLTDTHVNSNPTAEELAEITLMAAEEIHRFGIEPAVALLSHSNFGSSDSLGAPKMREVLQIVKERNPHLMIDGEMRGDLAMNEAHRKELMPDSPLKGSANLLVFPDLSASRISYSLLRGTTTAITVGPILMGMNKSAHILNPGASVRRIINMIAYAAVKAQQE

SEQ ID NO: 5977 - DNA, 2286 bp, Rhizobium meliloti
  CDS (1)..(2286): transl_table=11
atgccgggtatcgacaagaccgaccgcgcaatgaccagcgtcacggcgcaggaagcgctcgattttcattctcaaggtcgccccggaaaactggaaatctcgccgaccaagccgatggcgacgcagcgcgacctttcgctcgcctattcgcccggcgtcgccgttccggtgaaggcgatcgccgacgatccggcaacggcgtacgactacacggcgcgcggcaacatggttgcggtgatttccaacggtacggcaatcctcggcctcggcaatctaggcgcactcgcctcgaagcccgtcatggagggcaaggccgtcctcttcaagcgcttcgccgacgtcgattcgatcgacctcgaggtggataccgaaaacgtcgacgaattcgtcaactgcgtccgctttctcggcccttccttcggcggaatcaatctcgaggacatcaaggccccggactgcttcatcatcgagcagcggctgcgcgaagtcatggacattcccgtcttccatgacgaccagcacggcaccgcgatcatcgccgcggcaggcctcgtcaacgcgctgaccctgaccggccgcgacttcaagacggccaagctcgtctgcaacggcgcgggcgcggcggcgatcgcctgcatcgagctcatcaaggcgatgggcttcaacccggaaaacatcatcctctgcgataccaagggggtcatctacaagggccgtaccgacggcatgaaccagtggaagtcggcgcatgcggtcgagaccgaccgcaggacgctcgccgaggctcttgacggcgccgacgtgttcttcggcctttcggccaagggcgcgctttccgcggacatggtccgctccatgggcgcacggccgatcatcttcgccatggccaatcccgatccggaaatcacgcccgaagaagtggccctgatccgcgacgacgcgatcgtcgcgaccggccgctcggactatccgaaccaggtcaacaacgttctcggctttccctatatcttccgcggcgcgctcgacgtgcgcgcctcgaccatcaacgacgcgatgaagatcgccgcggcggaagcgctcgccaatctcgccaaggaagacgttccggacgacgtcgccgctgcctatcagggcaaccggccgcgcttcgggccgcaatatatcattcccgtccccttcgatccgcgcctcatctcggcgatcccgatggccgtcgcaaaggcagctatggagaccggcgtcgcccgcaagccgatcgaggacctcaaggcctatgggcagcagctttcggcgcggcgcgacccgatcgcctcgacgctgcagcgcatcgtcgagcgcgttcgccgccagccgaagcggatcgtcttcgcggaaggcgaggaagtgcagatgatgcgctcggcgatcgcctatgccaaccagcagctcggcacggcgctcctgctcgggcgcgaggaagtgatgcgcgaaaccgccgagcgcgaaggcatcgacctcgaccgcgccggcatccagatcgtcaatgcgcgcctgtcgaagcgcgtcggcgcctataccgatttcctctattcgcgcctgcagcgaaagggctatctcttccgcgacgttcagcgtctgatcaataccgaccgcaaccatttcgccgcctcgatggtggcgctcggcgatgccgacggcatggttacgggccttacgcgcaactattcgaccgcgctcgaagacgtgcgccgctgcatcgatccaaagcccggccaccgggtgatcggcgtgtccattgcgctctgccgcggccgtacggtgctcgtcgccgataccgctgtgcacgacatgccgacctccgaggagctggcggatatcgccgaggaagcggccggcctcgccaagcggctgggctacgtgccgcgggtggcgatgctcgcctattcgaccttcggccacccttccggcgaacgctcggagcgggtacgcgaggcggtaaagatcctcgaccggcgccgtgtggatttcgagtatgacggcgaaatggccgccgacgtggcactcaatgcccgggtgatggagcaatatccgttctgcaggctttccggcaccgcgaacgtgctcgtcatgcccgcgttccactcggcctcgatctcgacgaagatgctccaggaactgggcggctcgaccgtgatcggcccgctgctggtcggtctcgacaagtcggtccagatcgcctcgatgtcggcaaaggactcggacctcgtcaacctggccgctatcgcggcctataacgcggggacgtga

SEQ ID NO: 5978 - protein, 761 aa, Rhizobium meliloti
MPGIDKTDRAMTSVTAQEALDFHSQGRPGKLEISPTKPMATQRDLSLAYSPGVAVPVKAIADDPATAYDYTARGNMVAVISNGTAILGLGNLGALASKPVMEGKAVLFKRFADVDSIDLEVDTENVDEFVNCVRFLGPSFGGINLEDIKAPDCFIIEQRLREVMDIPVFHDDQHGTAIIAAAGLVNALTLTGRDFKTAKLVCNGAGAAAIACIELIKAMGFNPENIILCDTKGVIYKGRTDGMNQWKSAHAVETDRRTLAEALDGADVFFGLSAKGALSADMVRSMGARPIIFAMANPDPEITPEEVALIRDDAIVATGRSDYPNQVNNVLGFPYIFRGALDVRASTINDAMKIAAAEALANLAKEDVPDDVAAAYQGNRPRFGPQYIIPVPFDPRLISAIPMAVAKAAMETGVARKPIEDLKAYGQQLSARRDPIASTLQRIVERVRRQPKRIVFAEGEEVQMMRSAIAYANQQLGTALLLGREEVMRETAEREGIDLDRAGIQIVNARLSKRVGAYTDFLYSRLQRKGYLFRDVQRLINTDRNHFAASMVALGDADGMVTGLTRNYSTALEDVRRCIDPKPGHRVIGVSIALCRGRTVLVADTAVHDMPTSEELADIAEEAAGLAKRLGYVPRVAMLAYSTFGHPSGERSERVREAVKILDRRRVDFEYDGEMAADVALNARVMEQYPFCRLSGTANVLVMPAFHSASISTKMLQELGGSTVIGPLLVGLDKSVQIASMSAKDSDLVNLAAIAAYNAGT

SEQ ID NO: 5979 - DNA, 2280 bp, Salmonella typhimurium
  CDS (1)..(2280): transl_table=11
atggatgagcagttaaaacaaagcgcccttgatttccacgaatttccggtacccggtaaaattcaggtttctccgactaagccccttgccacccaacgcgatctggcgttggcttactcgccaggcgtggcggcgccctgcctggaaatcgaaaaagatccgctggcagcctacaaatacaccgcgcgcggcaaccttgtcgcggtcatttccaacggtacagcggtactggggttaggcaacattggcgcgctggccggcaagccggtcatggaaggcaaaggcgttctgtttaaaaaattcgccggcatcgatgtgtttgacattgaagtcgatgagcttgatccggacaaatttatcaatgtggtcgcagcgctggagccgacctttggcggcattaacctcgaagacattaaagcgccggaatgtttctatattgaacagaaactgcgcgagcgcatgaacatcccggttttccatgacgatcagcacggaacggcgatcatcagtacggccgccattcttaatggtctgcgagtcgtagagaaaaatatttccgacgtacggatggtcgtctccggcgcaggggcggcggcaatcgcttgtatgaacctgctggtcgcgttggggatgcaaaagcacaacatcgtggtgtgcgactctaagggcgttatttacaaaggccgtgagccgaatatggcggagaccaaagcggcctatgcggtagacgacagcggcaagcgcacgctggatgaggtcattgacggcgcggatattttcctcggctgttcaggcccgaaagtgctgactcaggagatggtgaagaaaatggcccgcgcgccaatgattctggcgctggccaacccggaaccggaaattctgccgccgctggcgaaagaagtgcgtccggacgccatcatctgtaccggtcgttccgactatccgaaccaggtgaacaacgtattgtgcttcccgtttatcttccgcggcgcactggacgtcggcgcgacggcgatcaacgaagagatgaaactggcggcggtccgtgcgattgccgagctggcgcacgccgaacagagcgaagtggtggcctcggcctatggcgatcaggacctgagctttgggccggaatacattattccgaaaccgtttgacccgcgtctaattgtcaaaatcgctccggcggtcgcgaaagcggcaatggattccggcgtggcgacgcgcccgattgctgactttgatgcctatatcgataaactgaccgagtttgtctacaaaaccaacctgttcatgaagccgatcttctcgcaggcacgcaaagatccgaagcgcgtagtgctgccggaaggggaagaggcgcgcgtgctgcacgcaacccaggagttgataaccctgggactggcgaagcccatcctgatcggacgtccgagcgtgatcgaaatgcgtatccagaaactggggctacagatcaaagcgggcgttgatttcgagatcgtgaataatgaatccgatccgcgcttcaaagagtactggagcgagtattaccagatcatgaagcgtcgcgggataactcaggaacaggcgcagcgtgcgatgatcggcaaccatacggccattggcgcgatcatggtgcagcgtggggaagcggatgcgatgatctgcggcaccatcggcgactaccatgagcatttcagcgtcgtgaaagccgtctttggctaccgtgacggcgtgcatacggcaggggcgatgaacgccttactgctgccaagcggcaacacttttatcgccgatacttatgttaacgaagatcccacgccggaacagttggcggagatcgccgtaatggcggcggaaaccgttcgccgctttggtattgagccgaaagtcgcgctgttgtcgcactctaactttggttcctcaaattcgctgtccgccagcaaaatgcgcgaaacccttgagcgggtacgcgaacgagcgcccgatctgatgattgacggtgagatgcacggtgatgcggcgttggtggaaagtattcgtaatgaccggatgccggatagcccgctgaagggagccgccaatattctggtgatgccgaatatggaagccgctcgcattagttacaacttactccgcgtctccagttccgaaggcgtcacggtcggcccggtcctgatgggcgtgtctaaaccggtacatgtattaacgccgatcgcctctgtacgccgtatcgtgaatatggtggcgttagcggtagttgaagcgcaaaccacgccgctttaa

SEQ ID NO: 5980 - protein, 759 aa, Salmonella typhimurium
MDEQLKQSALDFHEFPVPGKIQVSPTKPLATQRDLALAYSPGVAAPCLEIEKDPLAAYKYTARGNLVAVISNGTAVLGLGNIGALAGKPVMEGKGVLFKKFAGIDVFDIEVDELDPDKFINVVAALEPTFGGINLEDIKAPECFYIEQKLRERMNIPVFHDDQHGTAIISTAAILNGLRVVEKNISDVRMVVSGAGAAAIACMNLLVALGMQKHNIVVCDSKGVIYKGREPNMAETKAAYAVDDSGKRTLDEVIDGADIFLGCSGPKVLTQEMVKKMARAPMILALANPEPEILPPLAKEVRPDAIICTGRSDYPNQVNNVLCFPFIFRGALDVGATAINEEMKLAAVRAIAELAHAEQSEVVASAYGDQDLSFGPEYIIPKPFDPRLIVKIAPAVAKAAMDSGVATRPIADFDAYIDKLTEFVYKTNLFMKPIFSQARKDPKRVVLPEGEEARVLHATQELITLGLAKPILIGRPSVIEMRIQKLGLQIKAGVDFEIVNNESDPRFKEYWSEYYQIMKRRGITQEQAQRAMIGNHTAIGAIMVQRGEADAMICGTIGDYHEHFSVVKAVFGYRDGVHTAGAMNALLLPSGNTFIADTYVNEDPTPEQLAEIAVMAAETVRRFGIEPKVALLSHSNFGSSNSLSASKMRETLERVRERAPDLMIDGEMHGDAALVESIRNDRMPDSPLKGAANILVMPNMEAARISYNLLRVSSSEGVTVGPVLMGVSKPVHVLTPIASVRRIVNMVALAVVEAQTTPL

SEQ ID NO: 5981 - DNA, 1233 bp, Bacillus subtilis
  CDS (1)..(1233): transl_table=11
atgtcattaagagaagaagcattacacctgcataaagtcaaccaggggaaactggagtctaaatcaaaagtagaggtcagaaatgcgaaagatttaagcctcgcgtattctccgggtgttgcagaaccgtgtaaggatattcatgaagacattaacaaagtatatgattatacaatgaaggggaacatggtagcagttgtaactgacggtacagctgtgcttggccttggaaacatcggccctgaagcggcgcttcctgttatggaagggaaagcagttcttttcaaaagctttgcgggcgtagatgcgttcccgattgctttaaacacaaacgatgttgataaaatcgttgaaactgtaaaattgctggaaccgacatttggcggcgtcaaccttgaagatattgcagcgccaaactgctttatcattgaagagcgcctcaaaaaagaaacaaacatcccggttttccatgatgatcagcacggtactgccattgtaaccgtagcaggtcttgtgaacgcgctgaaactgtctggaaaatccatgtcatccattaaagttgtcgcaaacggcgcgggtgcggctggcattgcgattatcaagcttcttcatcattatggcgttcgcgacattgtgatgtgcgattccaaaggggccatttatgaagggcgcccgaacggcatgaacgatgtcaaaaatgaagtggcgaagttcacgaaccaagatcgcaaagacggttctctgaaagatgttatcgttgatgctgacgtatttatcggtgtctctgtagcaggcgcgttaacaaaagaaatggttcaaagcatggcaaaagatccgattatctttgcaatggcaaatccaaatccggaaatcatgccggaagatgcgcgtgaagccggagcaagcgttgtcggaactggccgttctgacttcccgaaccaagtaaacaatgttcttgcattccctggtattttccgcggagcgcttgatgtgcgtgccactcatattaacgaggaaatgaaaatcgcagcggttgaagccattgcttcactggtttcagaagatgagcttagcgcagactatgtcatccctgcaccgtttgataaacgtgttgcgcctgctgttgcgaaggctgtggcaaaagctgcgatggaaacaggtgttgcaagaatcactgttgaccctgaggaagtcgcagaaaaaacaagaaaacttacgattattggtgaataa

SEQ ID NO: 5982 - protein, 410 aa, Bacillus subtilis
MSLREEALHLHKVNQGKLESKSKVEVRNAKDLSLAYSPGVAEPCKDIHEDINKVYDYTMKGNMVAVVTDGTAVLGLGNIGPEAALPVMEGKAVLFKSFAGVDAFPIALNTNDVDKIVETVKLLEPTFGGVNLEDIAAPNCFIIEERLKKETNIPVFHDDQHGTAIVTVAGLVNALKLSGKSMSSIKVVANGAGAAGIAIIKLLHHYGVRDIVMCDSKGAIYEGRPNGMNDVKNEVAKFTNQDRKDGSLKDVIVDADVFIGVSVAGALTKEMVQSMAKDPIIFAMANPNPEIMPEDAREAGASVVGTGRSDFPNQVNNVLAFPGIFRGALDVRATHINEEMKIAAVEAIASLVSEDELSADYVIPAPFDKRVAPAVAKAVAKAAMETGVARITVDPEEVAEKTRKLTIIGE

SEQ ID NO: 5983 - DNA, 1944 bp, Flaveria pringlei
  CDS (1)..(1944)
atgatgtcgttaaacagctcatctgttgtgaagagctcgatttcgggggtttcatggacgcaatcgcagtcggtgaggttatcggtgaggcgtcctatggtggtggctatggtgaattctaatggtaggcctgagagaagcgtcggtgtttcggtggacggtgctgtgaaggatgtgaatgctccggtggctgttgaagtggcggattctgagagtaagaagccgactgcggttgttggtggtggtgttgaagatgtgtacggagaggatagcgccactgaggatcatttcatcactccttggtccgtttctgttgctagtggctattcgttgttgcgggacccacaccacaacaaaggtctggcctttaccgagaaagagagagatgctcactatttacgtggtcttcttcctccagttgttgtcaatcatgatcttcaggtgaaaaagatgatgcataatatccgtcagtatgaagtaccactacaaagataccaagccatgatggatctccaggagagaaacgagagactgttctacaagctattgattgaaaacatcgaggaacttctcccaattgtatacactccaaccgttggtgaagcatgccaaaaatatgggaccattttcaagaacccacagggtctatatattagtttaaaagacaaggggaaagtccttgagatattgaagaattggcctcagaaaaaaatccaagttatagttgttactgatggtgagcgaatcttaggcctaggagaccttggctgccagggaatgggcatacctgtgggcaagctctctctttacacagctctcggaggaatccgtccttcagcttgcttgccaataaccattgacgtcgggaccaataatgagaagatgttgaacgatgaattctacattggtctaaggcaaaggagggcgagtgggaaggagtatgccgaacttatgaacgagttcatgtctgctgtcaagcagaactatggggaaaaggtcctcattcagtttgaagattttgcaaaccacaatgcctttgatcttcttgaaaagtatagaaccacccatcttgtctttaacgacgatatacaggggacagcatcggtggtgcttgcagggcttatttctgcactaaaattagttggtggatccttggcagatcataagtttcttttccttggagctggagaggctggtacaggcattgctgaactcatagctctcgagatatcaaaacagaccaatgctccattagaagagacccggaagaagatttggcttgtggactcgaagggtttgatcgttagatcccgcctagattcacttcagcactttaagaagccttgggcccatgatcatgaaccggttaataagttcttggatgctgtgaaggcaatcaagccaacagtgttgattggatcatcaggggcaggacagacttttaccaaagaagttgttgaagctatgtcgtcttttaatgagaaacctattattcttgctctttccaacccaacttcccaatccgaatgtactgctgagcaagcttatacctggagtgagggacgtacaatatttgcgagtggtagtccgttcgctcctgttgaatataatggaaaagtttatgtatctggccagtccaacaatgcatatatcttccctgggtttggtctgggcttgataatatctggtgcaatccgtgttcatgatgagatgcttttagcagcctctgaggctctggccgaacaagtcacacaggagcattttgacaacgggctaatatacccaccattcaccaacatccgcaagatttctgctcacattgcagccaaggtggcagccaaagcatatgaacttggtttggcgagtcgtcttccccagccagaaaaccttgtagcgtatgccgagagctgcatgtacagccccaaataccgcaactaccgttaa

SEQ ID NO: 5984 - protein, 647 aa, Flaveria pringlei
MMSLNSSSVVKSSISGVSWTQSQSVRLSVRRPMVVAMVNSNGRPERSVGVSVDGAVKDVNAPVAVEVADSESKKPTAVVGGGVEDVYGEDSATEDHFITPWSVSVASGYSLLRDPHHNKGLAFTEKERDAHYLRGLLPPVVVNHDLQVKKMMHNIRQYEVPLQRYQAMMDLQERNERLFYKLLIENIEELLPIVYTPTVGEACQKYGTIFKNPQGLYISLKDKGKVLEILKNWPQKKIQVIVVTDGERILGLGDLGCQGMGIPVGKLSLYTALGGIRPSACLPITIDVGTNNEKMLNDEFYIGLRQRRASGKEYAELMNEFMSAVKQNYGEKVLIQFEDFANHNAFDLLEKYRTTHLVFNDDIQGTASVVLAGLISALKLVGGSLADHKFLFLGAGEAGTGIAELIALEISKQTNAPLEETRKKIWLVDSKGLIVRSRLDSLQHFKKPWAHDHEPVNKFLDAVKAIKPTVLIGSSGAGQTFTKEVVEAMSSFNEKPIILALSNPTSQSECTAEQAYTWSEGRTIFASGSPFAPVEYNGKVYVSGQSNNAYIFPGFGLGLIISGAIRVHDEMLLAASEALAEQVTQEHFDNGLIYPPFTNIRKISAHIAAKVAAKAYELGLASRLPQPENLVAYAESCMYSPKYRNYR

SEQ ID NO: 5985 - DNA, 1947 bp, Flaveria trinervia
  CDS (1)..(1947)
atgatttccttgaactcttcatttcttgagaggagctccgttaccggaggctcgaggacgcaatcgcagtcgttgaggttgtcggcgaggcgtcctgtggtgacgtctatgctgaattccaacagtctaccggagagaaacgtcagcgtttcggtggatagtgctgtgagggatgtgaatgctccggtggcggtggaagttgatcgttctgttggtgaaaaaccatttgcagctgttggtggtggtgttgaggatatgtacggtgaggataccgccaccgaggatcattatatcactccgtggtctgtttctgtcgccagcggctattcgttgttgcgggacccacaccacaataaaggtctggcctttactgagaaagaacgagatgcccattttctacgtggtcttcttcctccggttgttgttaatcacgatcttcaggtaaaaaagatgatgcataatatccgccaatatcaagtacctctacagaggtaccaagccatgatggatcttcagcaaagaaatgagaggttattctacaagctattaattgagaatgttgaggagcttctcccaattgtatatacaccaaccgttggtgaagcatgccaaaaatacgggagcattttcgagaactcacagggtttatttattagtttaaaagacaagggtagaattcttgagatattgaagaattggccacataaaaaaattcaagttatagttgtcacagacggtgaacgaatcttaggtctaggagaccttggctgtcagggaatgggcatacctgtgggaaagcttgctctgtacacagctcttggaggagttcgcccttcagcttgtttgccgataaccattgatgttggcaccaataacgagaagttgttgaacgatgatgaattctacattggtttaaagcaaaagagagctgctgggcaggagtatgctgaacttatgaatgagttcatgtctgctgtcaagcagaattatggggaaaacctcctcattcagtttgaggattttgcaaaccacaacgcctttgatcttcttgaaaagtacagaaccacccatcttgtgtttaacgatgatatacaggggacagcttctgtggtgcttggagggcttatttctgcactaaaattagttggtggatctttggcagaccaaaaatttttattccttggagctggagaggctggcacaggcattgctgaactcatagctctggagatatcaaaacagacaaatattccattagaagagagccgcaagaaggtttggcttgtggactcaaagggtttgattgttagatcccgcctagattcactacagcatttcaagaagccctgggcccatgatcatgaacctgttaatgaattcttggatgctatcaagacaatcaggccaacagtgttaattggatcatcagggacaggacagactttcacaaaagaagttgttgaaactatgtcatcacttaatgagaaacctattattcttgctctttccaacccaacttcacaatctgaatgtactgctgagcaagcttatacctggagtgagggtcgtgctatattcgccagtgggagtccttttaagcctgttgaatataatggaaagctctatgtgtcaggccaggccaacaatgcatacattttccctggatttggtctgggcttgatcatttctggtgcaatccgtgttcatgatgacatgcttttagcagcctccgaggctccagctgaacaggtgacacaggaacattttgacaaagggctaatattcccaccattcaccagcatccgcaagatttctgctcatattgctgccaaggtggcagccaaagcatatgaacttggtttggcgagtcgtcttccccaaccagaaaatctagtagcttatgctgagagctgcatgtacagccccaaataccgcatctaccgttaa

SEQ ID NO: 5986 - protein, 648 aa, Flaveria trinervia
MISLNSSFLERSSVTGGSRTQSQSLRLSARRPVVTSMLNSNSLPERNVSVSVDSAVRDVNAPVAVEVDRSVGEKPFAAVGGGVEDMYGEDTATEDHYITPWSVSVASGYSLLRDPHHNKGLAFTEKERDAHFLRGLLPPVVVNHDLQVKKMMHNIRQYQVPLQRYQAMMDLQQRNERLFYKLLIENVEELLPIVYTPTVGEACQKYGSIFENSQGLFISLKDKGRILEILKNWPHKKIQVIVVTDGERILGLGDLGCQGMGIPVGKLALYTALGGVRPSACLPITIDVGTNNEKLLNDDEFYIGLKQKRAAGQEYAELMNEFMSAVKQNYGENLLIQFEDFANHNAFDLLEKYRTTHLVFNDDIQGTASVVLGGLISALKLVGGSLADQKFLFLGAGEAGTGIAELIALEISKQTNIPLEESRKKVWLVDSKGLIVRSRLDSLQHFKKPWAHDHEPVNEFLDAIKTIRPTVLIGSSGTGQTFTKEVVETMSSLNEKPIILALSNPTSQSECTAEQAYTWSEGRAIFASGSPFKPVEYNGKLYVSGQANNAYIFPGFGLGLIISGAIRVHDDMLLAASEAPAEQVTQEHFDKGLIFPPFTSIRKISAHIAAKVAAKAYELGLASRLPQPENLVAYAESCMYSPKYRIYR

SEQ ID NO: 5987 - DNA, 1911 bp, Zea mays
  CDS (1)..(1911)
atgctgtccacgcgcaccgccgccgtcgccgcctccgcgtcccccgcctccccgtggaagctgggaggacggagcgagggcggcgccagctgcgacggatgccggacctacaggaacaccctgcggaggagggccgcgcccgccaaggtgcgcgccttgccgcccaggcgggtggacgcggtcgcgatggtctccaacgcggagacggagacggagaaggagcaggaggaggcggcggccgccagcgaggagctgcccgtcatgccctgggccacctccgtcgcaagcggttacacccttttgagggatccacaccacaacaagggtcttgctttcacagaggaggaaagggatggacactacttgcgtggactgcttcctccggcagtactatctcaggaactccaaattaagaagttcatgaacaccctgcggcagtaccagacccctttgcagcggtatatagctatgatgaaccttcaggaaacggacgagaggcttttctacaagcttttaattgataatgtggtggagctgcttccttttgtttacacaccaactgtaggtgaggcctgccagaagtatgggtccatctttggacgaccacagggtctgtatgtcagcctgaaggacaaggggaaggtcctagaagttctaaggaactggccacataggaacattcaagttatctgtgttactgatggtgagcgaatcttgggacttggagatttgggttgtcagggaatgggaattcctgtaggcaaacttgctctatacactgctctaggaggagttgacccatcagtttgcttgcctatcacaattgatgttggtacaaataacgagtttctgcttaatgatgagttctacattggactccggcaaaaacgtgcgactggcgaggagtatgatgagcttattgaagagttcatgtctgctgttaagcaattctatggtgagaaagtcctcattcagtttgaggactttgccaatcacaatgcctttgatttgcttgaaaaatatagcaagagccatcttgttttcaatgatgatatccagggcacagcatcagtggtccttgcaggtttgttagcagcactcaagatggttggtgggaccctggcagagcagacgtatttgttccttggtgctggggaggctggaactggtattgcagaacttattgctcttgagatttcgaaacagacgaatgctccaattgaagagtgccgcaagaaggtttggctggtggactcaaagggtttgattgttgactctcgtaaaggctcccttcagccattcaagaaaccttgggcgcatgagcacgagcccttgaaaaccttgtatgatgctgttcagtccatcaaacctacagttctgatcgggacatctggagttggaagaacattcacaaaagaaatcattgaggccatgtcttccttcaacgagaggcctatcatcttttcactgtcaaacccaacctcgcattctgaatgcactgctgaacaagcatatacatggagtcagggccgttcaatctttgccagtggcagtccatttgcccccgtggagtacgaaggaaagacttttgtgcctgggcagtcgaacaatgcctacattttccctggactcggcctcggtcttgtgatctctggagccgtccgtgtccacgaggacatgcttctcgccgcctcgaaagcgctagctgatcaggccacacaggacaacttcgagaagggctccatcttcccacccttcaccagcatcagaaagatctctgcgcacatcgctgcagccgtggctggaaaagcctacgagctcggtctggcgacccgtctgcctccccccagcgacctggtgaaatatgcagagaactgcatgtacactcccgtctaccgcaactaccggtag

SEQ ID NO: 5988 - protein, 636 aa, Zea mays
MLSTRTAAVAASASPASPWKLGGRSEGGASCDGCRTYRNTLRRRAAPAKVRALPPRRVDAVAMVSNAETETEKEQEEAAAASEELPVMPWATSVASGYTLLRDPHHNKGLAFTEEERDGHYLRGLLPPAVLSQELQIKKFMNTLRQYQTPLQRYIAMMNLQETDERLFYKLLIDNVVELLPFVYTPTVGEACQKYGSIFGRPQGLYVSLKDKGKVLEVLRNWPHRNIQVICVTDGERILGLGDLGCQGMGIPVGKLALYTALGGVDPSVCLPITIDVGTNNEFLLNDEFYIGLRQKRATGEEYDELIEEFMSAVKQFYGEKVLIQFEDFANHNAFDLLEKYSKSHLVFNDDIQGTASVVLAGLLAALKMVGGTLAEQTYLFLGAGEAGTGIAELIALEISKQTNAPIEECRKKVWLVDSKGLIVDSRKGSLQPFKKPWAHEHEPLKTLYDAVQSIKPTVLIGTSGVGRTFTKEIIEAMSSFNERPIIFSLSNPTSHSECTAEQAYTWSQGRSIFASGSPFAPVEYEGKTFVPGQSNNAYIFPGLGLGLVISGAVRVHEDMLLAASKALADQATQDNFEKGSIFPPFTSIRKISAHIAAAVAGKAYELGLATRLPPPSDLVKYAENCMYTPVYRNYR

SEQ ID NO: 5989 - DNA, 1806 bp, Solanum tuberosum
  CDS (1)..(1806)
atgtggagagtggctcgatctgcggcgtcgactttccgccgtacgcggcggttatcgacggcgatttcagctccatgtatcgtacacaagcgcggtgctgatattcttcatgatccttggttcaataaggacacgggattcccaatgacggaaagagatcgattgggtctgcgcggtctcctcccacctcgtgtaatatcatttgaacagcaatatgaccgcttcatggagtcatttcggtcacttgagaaaaatactgagggtcaaccagacagtgttgtttcgttagcaaaatggaggatcttaaacaggctgcatgacaggaatgagacactgtactaccgagttctaattgacaatatcaaagattttgctcccataatatacactccaacagtaggattggtttgccaaaactactctggtttgtttagacgtccacgtggcatgtatttcagtgccaaagataagggagagatgatgtcaatgatcttcaactggccttctactcaggtagacatgattgtgctgacagatggaagtcgtattcttggccttggcgatcttggagttcaggggataggtataccaattggaaaacttgacatgtatgtagcagctgctggtatcaacccacaaagagtgctcccagttatgcttgacgtcgggaccaacaatcagaagcttctagaagatcctctttatcttggactgcgacaacctaggttggaaggagaagaatatttgtcaatagttgatgaatttgtggaagctgttcatgctcgttggccaaaggctgttgtgcagtttgaggattttcaagcaaagtgggcttttgagacactggatcgctatcggaaaaagttttgcatgttcaatgatgatatacagggaacagctggtgttgctcttgctgggctattaggaactgttagggcacagggccggccactgactgattttgccaaccaaaagatagtggtagttggagcaggaagtgcggggcttggtgttcttaagatggcattacaagccgtttcaagaatgactggaccatcagcagatccccacttttttcttctggataaaaatggtcttatcacaaaggataggaaagatattgatccagcagcattaccatttgctaaagcccatcacgagattgaggggctaggactacaggagggagcagggctcgctgaagtggtcaaaaaggtgaagcctcatgtacttcttggtttgtcaggagttggaggcatatttcatgaggaggtgctgagggccatgaaagagtcagattctgttagacctgcaattttcgccatgtcaaatcctacaaacaatgctgaatgctgtcctgttgatgctttcaagcttgctggagaagatattgtttttgctagtgggagtccctttgcaaatgttgatctagggaatggtaagataggccatgtaaatcaagcgaataacatgtatctcttccctggcattgggctaggagctcttctttctggcgctcgaaacataagtgatacaatgttagaagctgctgctgagtgccttgcttcttacatgtccgatgatgaaatcaatagaggaatcttgtatccatccattgatgatattcgggatattacagcagaggtgggagctgcagttttacgggctgctgtggctgaagacctggcagaaggtcatggtgatgttggggtaaaagagttgcagcatatgtcaaaggaagagaccattgaacacgtgagacaaaatatgtggtatcccgtctatggccctcttgttcacgaatag

SEQ ID NO: 5990 - protein, 601 aa, Solanum tuberosum
MWRVARSAASTFRRTRRLSTAISAPCIVHKRGADILHDPWFNKDTGFPMTERDRLGLRGLLPPRVISFEQQYDRFMESFRSLEKNTEGQPDSVVSLAKWRILNRLHDRNETLYYRVLIDNIKDFAPIIYTPTVGLVCQNYSGLFRRPRGMYFSAKDKGEMMSMIFNWPSTQVDMIVLTDGSRILGLGDLGVQGIGIPIGKLDMYVAAAGINPQRVLPVMLDVGTNNQKLLEDPLYLGLRQPRLEGEEYLSIVDEFVEAVHARWPKAVVQFEDFQAKWAFETLDRYRKKFCMFNDDIQGTAGVALAGLLGTVRAQGRPLTDFANQKIVVVGAGSAGLGVLKMALQAVSRMTGPSADPHFFLLDKNGLITKDRKDIDPAALPFAKAHHEIEGLGLQEGAGLAEVVKKVKPHVLLGLSGVGGIFHEEVLRAMKESDSVRPAIFAMSNPTNNAECCPVDAFKLAGEDIVFASGSPFANVDLGNGKIGHVNQANNMYLFPGIGLGALLSGARNISDTMLEAAAECLASYMSDDEINRGILYPSIDDIRDITAEVGAAVLRAAVAEDLAEGHGDVGVKELQHMSKEETIEHVRQNMWYPVYGPLVHE

SEQ ID NO: 5991 - DNA, 1437 bp, Bacillus stearothermophilus
  CDS (1)..(1437): transl_table=11
atggcattaccaggcggggcagccatgaacattacgattcgtctccagttcgaaaaagatatcgtctcattcagcgatatcgccgccgcgattggcaaagcgggcggggacattgtcgggattgacgtcatttcgtcaagcaaagttcacacggtgcgcgatattaccgtcagcgccctcgatacgaagcagtgcgacttgatcattgaggcgctgaaaaaaattcgcggcgtcaaaattgtgaacgtttccgaccgcacgtttttgatgcacatcggggggaaaattgaaacaaattcaaaaatcccagtgaaaacacgcgacgacttgtcgcgggtatacacgccgggcgtggcgcgcgtctgcacggcgattgccgaagatccgcgaaaggcgtattcgctgacgattaaacggaatacggtcgccgttgtctcggacggcacggcggtgcttgggcttggcgacatcggtccgtacgcggcgatgccagtcatggaagggaaagcgatgctgtttaaggaatttgccggagtggacgcgttcccgatttgtttggatacgaaagacacggaagaaatcattcaaattgtgaaagcgatcgccccggcgtttggcggcattaacctggaggacatttccgccccacgttgttttgaaattgaaaagcggctgaaagaagagctggatattcccgtgtttcatgatgaccagcatggcacggcggtcgtgctcttggcgggactgcttaacgcgctgaaaatcgttgacaaaaagctcgaagacattaaagtcgtcttaaccggcatcggtgcggccggcatcgcctgcacgaaaattttgcttgcggccggcgtgcgcaacattatcggggtcgaccgccatggcgccatccaccgcgatgaaacgtacgaaaatccgtactggcaagagtatgcgcaactcacgaacccggataatctgaaaggaagcttgtccgatgtcatcgccggcgcagatgtatttatcggcgtttcggctccgggcattttaaaagtggaagatgtgaaaaaaatggcgcgcgatccgatcgtgtttgcgatggccaacccgattccggaaattgatccggagctggccgaaccgtacgtgcgcgtcatggcgaccgggcgttccgactatccgaaccaaatcaacaacgtcctttgcttcccgggcattttccgcggggcgcttgactgccgggcgagagaaattaacgaggaaatgaagctcgctgccgcgaaggcgattgcctctgtcgtgacggaggatgaattgaacgaaacatacatcatcccgagcgtcttcaacagcaaagtcgtcgaacgcgtcagacaagcggtcgtcgaagcggcttaccgcactggggtggcgcggaaggacaatatcccggttggcggatatacagggcagtaa

SEQ ID NO: 5992 - protein, 478 aa, Bacillus stearothermophilus
MALPGGAAMNITIRLQFEKDIVSFSDIAAAIGKAGGDIVGIDVISSSKVHTVRDITVSALDTKQCDLIIEALKKIRGVKIVNVSDRTFLMHIGGKIETNSKIPVKTRDDLSRVYTPGVARVCTAIAEDPRKAYSLTIKRNTVAVVSDGTAVLGLGDIGPYAAMPVMEGKAMLFKEFAGVDAFPICLDTKDTEEIIQIVKAIAPAFGGINLEDISAPRCFEIEKRLKEELDIPVFHDDQHGTAVVLLAGLLNALKIVDKKLEDIKVVLTGIGAAGIACTKILLAAGVRNIIGVDRHGAIHRDETYENPYWQEYAQLTNPDNLKGSLSDVIAGADVFIGVSAPGILKVEDVKKMARDPIVFAMANPIPEIDPELAEPYVRVMATGRSDYPNQINNVLCFPGIFRGALDCRAREINEEMKLAAAKAIASVVTEDELNETYIIPSVFNSKVVERVRQAVVEAAYRTGVARKDNIPVGGYTGQ

SEQ ID NO: 5993 - DNA, 1758 bp, Mesembryanthemum crystallinum
  CDS (1)..(1758)
atgggtggtagcaatgcattgaatgagatgaccaatggatctgatggtattactgggggtgttgctgatgtctatggtgaagagtttgccacccaggatcagcttgtcaccccttggagcttctctgttgcttgtggtcattcattgttgagagatccccagcacaacaaagggcttgcttttacagagaaagagagagatgcccacttcttgcgcggtctgttaccccctgtagttctgtcacaagagctccaggagaagaagttcttgacgactcttcgtcaatatcaagttcccttgcagaaatacatggccatgatggatcttcaggagaggaatgagaaactgttctacaaacttcttgttgaccatgtcgaagaactgcttcctcttgtttatacgccaactgttggtgagggatgccaaaagtatggaagtatttttagacgtccccaggggctattcatcagtttgaaggataagggaagaatccttgagcttttgagaaactggcctgaaaagaaaattcaagttattgtagttactgatggtgaacgcatactggggctaggagaccttggctgtcagggaatgggaatacctgttggaaaactttccttgtattcagcccttggtggagtctgcccatcagcatgcttgcctataacccttgatgttggcaccaacaatcagaagttgttagatgatgaattttacattggattgaagcagaagcgggctactggagaggaatatgctgagtttgtccaagaattcatgtctgcagttaagcaaaactatggggagaagatccttgtacagtttgaagattttgccaaccataacgcatttgagttgctggagaaataccgcaccactcacctcgtcttcaatgatgacattcagggtactgcttctgttgttcttgcaggacttattgcttctttaaaactactagggggaaccttggctgaccataaatttttgttcctcggtgctggagaagctggaacgggtattgcagagcttatagcccttgagatgtcaaagaagacaaaggctccagtagagcagatgaggaaaaagatttggcttgtcgactccaagggacttgttgttagctctaggaaggagacacttcagcagttcaaactaccttgggctcacgaacatgaacccattacaactcttatagatgctgtccaggcaatcaagcccacagtgttgattggtacttctggaaaagggaaacaatttaccaaggaggtcgttgaagccatggcaaatatcaatgcgaaacctctcattcttgctctatcaaatcctacttcacagtcagaatgtactgccgaagaagcctacacatggagtcagggacatgcaatatttgccagtggaagcccatttgaccctgttgaatatgaaggaagaacttttgtccctggccaggcaaataatgcttacattttccctgggtttggtttgggtctgatcatgtgtggtgcaatccgtgtccatgatgacatgctattggctgcctctgaggcactggcttcacaagttacaggagaacatttcataaagggacttatctacccaccattcaaggacatcagaaagatatcagctcacattgctgccggagtagctgcaaaagcttatgaacttggtttggctagtcggcttcctcaaccagccgatcttgttaagtttgccgagagctgcatgtacaaccctacttaccggagtttccgttga

SEQ ID NO: 5994 - protein, 585 aa, Mesembryanthemum crystallinum
MGGSNALNEMTNGSDGITGGVADVYGEEFATQDQLVTPWSFSVACGHSLLRDPQHNKGLAFTEKERDAHFLRGLLPPVVLSQELQEKKFLTTLRQYQVPLQKYMAMMDLQERNEKLFYKLLVDHVEELLPLVYTPTVGEGCQKYGSIFRRPQGLFISLKDKGRILELLRNWPEKKIQVIVVTDGERILGLGDLGCQGMGIPVGKLSLYSALGGVCPSACLPITLDVGTNNQKLLDDEFYIGLKQKRATGEEYAEFVQEFMSAVKQNYGEKILVQFEDFANHNAFELLEKYRTTHLVFNDDIQGTASVVLAGLIASLKLLGGTLADHKFLFLGAGEAGTGIAELIALEMSKKTKAPVEQMRKKIWLVDSKGLVVSSRKETLQQFKLPWAHEHEPITTLIDAVQAIKPTVLIGTSGKGKQFTKEVVEAMANINAKPLILALSNPTSQSECTAEEAYTWSQGHAIFASGSPFDPVEYEGRTFVPGQANNAYIFPGFGLGLIMCGAIRVHDDMLLAASEALASQVTGEHFIKGLIYPPFKDIRKISAHIAAGVAAKAYELGLASRLPQPADLVKFAESCMYNPTYRSFR

SEQ ID NO: 5995 - DNA, 1770 bp, Phaseolus vulgaris
  CDS (1)..(1770)
atgtcgagcatttccttgaaggagaacggtggtgaggtttctgtgaagaaggattatagcaatggtgggggtgtgagggacttgtatggcgaggacagtgccacagaggatcatcttatcactccatggaccttctctgtagccagtggatgcagtttgctgagagatccacgttacaacaaagggctggcctttactgagggagagagagatgctcattacttgcgtggccttttgcccccatctgtcttcaatcaggaacttcaggaaaagaggttgatgcacaatcttcgccagtatgaggttcctctgcataggtacatggccttgatggatcttcaggagaggaatgaaaggctgttctacaagcttctgatcgataatgttgcggaactgcttcctgttgtttacactccaacggttggagaagcatgccagaaatacggaagcatttttaggcgtcctcagggtctttatatcagtttgaaagaaaaaggcaagatccttgaagtactgaaaaactggccagaaaagagtattcaagttattgttgtgaccgatggtgagcgtatattaggactgggagatcttggctgccagggaatgggaattccggttgggaaactttctctctatactgctttaggaggtgttcgcccttcgtcttgcttgcctgttaccattgatgttggcacaaacaatgagaagttgctgaatgatgagttttacattgggcttagacaaaggcgtgcaactgggcaggaatatgcgacgtttctagacgagtttatgcgtgcagttaagcagaactatggagagaaagttctcgtacagtttgaggatttcgccaatcataatgcatttgatctgctggaaaaatacagctcatctcatcttgttttcaacgatgatatccagggtacagcgtctgttgtattagcaggattgcttgcatccctgaaattagttgggggaaccttagctgaccacaccttcttattcttgggtgctggagaggctggaactggtatagcagagctgattgctgttgaggtctcaaagcagacaaaagctccagtggaagagacccgcaagaagatatggcttgtggattcaaagggacttattgtcagctctcgtctggaatcacttcagcaattcaaaaagccttgggctcatgagcatgaacctgtgaagggacttctagaggctgtcaaggcaatcaagccaaccgttttgattggatcatctggagcagggaagacatttaccaaggaagtggttgaaaccatggcatccttgaatgagaaaccactcattcttgctctctccaacccaacttcacaatctgagtgcacagctgaagaggcttacacatggagcaagggtagagcaatctttgctagtggaagcccatttgaccctgttgaatatgaaggaaaactttttgttcctggacaggccaacaatgcttacatatttcccggttttggcttgggtttgatcatgtctggtgcaatccgtgtgcgtgatgagatgctcttggcagcctctgaagctttggctgcacaagtgtcagaggagaactatgataagggactgatttatcctccattcacaaacatcaggaagatatcagccaacattgctgctaaagtggcggctaaggcatatgatctaggtctggcttctcatctgaaaaggcctaaggatcttgtcaaatatgcagaaagttgcatgtacagcccaggctaccgaagctaccgttga

SEQ ID NO: 5996 - protein, 589 aa, Phaseolus vulgaris
MSSISLKENGGEVSVKKDYSNGGGVRDLYGEDSATEDHLITPWTFSVASGCSLLRDPRYNKGLAFTEGERDAHYLRGLLPPSVFNQELQEKRLMHNLRQYEVPLHRYMALMDLQERNERLFYKLLIDNVAELLPVVYTPTVGEACQKYGSIFRRPQGLYISLKEKGKILEVLKNWPEKSIQVIVVTDGERILGLGDLGCQGMGIPVGKLSLYTALGGVRPSSCLPVTIDVGTNNEKLLNDEFYIGLRQRRATGQEYATFLDEFMRAVKQNYGEKVLVQFEDFANHNAFDLLEKYSSSHLVFNDDIQGTASVVLAGLLASLKLVGGTLADHTFLFLGAGEAGTGIAELIAVEVSKQTKAPVEETRKKIWLVDSKGLIVSSRLESLQQFKKPWAHEHEPVKGLLEAVKAIKPTVLIGSSGAGKTFTKEVVETMASLNEKPLILALSNPTSQSECTAEEAYTWSKGRAIFASGSPFDPVEYEGKLFVPGQANNAYIFPGFGLGLIMSGAIRVRDEMLLAASEALAAQVSEENYDKGLIYPPFTNIRKISANIAAKVAAKAYDLGLASHLKRPKDLVKYAESCMYSPGYRSYR

SEQ ID NO: 5997 - DNA, 1776 bp, Populus trichocarpa
  CDS (1)..(1776)
atggagagcacgctgaaggagatgagagacggagcttcggtgctcgacatggaccccaaatccactgtcggtggtggtgttgaggacgtttatggcgaggatcgtgccactgaggaccagcttgttactccctggaccatctccgttgccagtggatatactttgttgagggatccacatcacaacaaagggcttgctttcactgagaaagaaagagatgcacactacctgcgtggtcttcttcctccaacaactatctctcaacagcttcaggaaaagaaattgatgaacaccattagacaatatcaacttcctcttcaaaaatatacggccatgatggaacttgaggaaaggaatgaaaggttgttttataagcttttgatcgataatgttgaggaattgcttccggttgtttatacaccgacggttggggaagcttgccagaagtatggaagtattttcaagcgtcctcagggtctatatataagtttaaaagagaaggggaaagttcttgatgtgctgaaaaactggcctcagaagagtattcaagttattgttgttactgatggtgaaagaattttgggacttggggatcttggctgtcagggaataggcattcctgttgggaagttgtctctttacactgcacttggaggagttcgtccttcagcttgtttgcccgtaaccattgatgtgggtacgaacaacgagcaattgctgaaggatgaattctacattggactgagacaaaggagggcaactggccaggaatactctgaacttctccatgagttcatgactgctgtaaaacaaaattatggggagaaagttctgatacagtttgaagattttgctaaccacaatgcttttgatctgcttgcaaagtatggcacaactcatttagtcttcaatgatgatatacaggggacggctgctgttgttcttgcagggcttatttcagcactgaagttgctaggtggttccctggctgatcacactttcttgttccttggtgctggtgaagctggaactggtatagcagagcttatagctcttgagatgtcaagacggtcaaaaactcctttggaagagactcgcaagaagatttggctgacagattcaaagggtttgattgttagttctcgcaaggagtcattacaacacttcaagaaaccatgggctcatgaacatgaacccgttaaaggactcctagaagttgtcaaggcaatcaaaccaatagtcttgattggaacatccggagtgggaaaaacgtttactaaggaagtgattgaggccatggcttctttcaatgagaaacctctaattttggctctctccaacccaacctcacaatctgaatgtacagctcaagaagcctacacttggactaagggcaaagcaatttttgctagtggaagtccatttgatcctgttgagtacgagggaaaagtttttgttcctggccagtccaacaatgcttacattttccctggccttggcctgggtttggtcatctctggagctattcgtgttcatgatgatatgcttctggcagccgcggaagccttggctgggcaaattaaagaagagtacttggcaaaggggctgatttacccacctctatctaacatcagaaaaatctcagtccaaattgctgctaacgtagctgccaaggcatatgaacttggcctggctacacgtctcccccgtccagaaaaccttgtgaagcacgcagagagttgcatgtacagtcccgcctatagatattaccggtga

SEQ ID NO: 5998 - protein, 591 aa, Populus trichocarpa
MESTLKEMRDGASVLDMDPKSTVGGGVEDVYGEDRATEDQLVTPWTISVASGYTLLRDPHHNKGLAFTEKERDAHYLRGLLPPTTISQQLQEKKLMNTIRQYQLPLQKYTAMMELEERNERLFYKLLIDNVEELLPVVYTPTVGEACQKYGSIFKRPQGLYISLKEKGKVLDVLKNWPQKSIQVIVVTDGERILGLGDLGCQGIGIPVGKLSLYTALGGVRPSACLPVTIDVGTNNEQLLKDEFYIGLRQRRATGQEYSELLHEFMTAVKQNYGEKVLIQFEDFANHNAFDLLAKYGTTHLVFNDDIQGTAAVVLAGLISALKLLGGSLADHTFLFLGAGEAGTGIAELIALEMSRRSKTPLEETRKKIWLTDSKGLIVSSRKESLQHFKKPWAHEHEPVKGLLEVVKAIKPIVLIGTSGVGKTFTKEVIEAMASFNEKPLILALSNPTSQSECTAQEAYTWTKGKAIFASGSPFDPVEYEGKVFVPGQSNNAYIFPGLGLGLVISGAIRVHDDMLLAAAEALAGQIKEEYLAKGLIYPPLSNIRKISVQIAANVAAKAYELGLATRLPRPENLVKHAESCMYSPAYRYYR

SEQ ID NO: 5999 - DNA, 1698 bp, Schizosaccharomyces pombe
  CDS (1)..(1698)
atgcctgcaggaaccaaagaacaaatcgagtgtcctttaaaaggagtaactttgttaaactctcctcgctacaataaggacactgcttttacacctgaggagcgtcaaaaatttgagatttcatcacgtcttccccccattgttgaaactttgcaacaacaagtggatcgctgttatgaccagtacaaagcaatcggtgatgagcccttacagaagaatttgtatctttctcaattaagcgtcaccaaccaaactctgttttacgcactcatcagccaacatttgatcgaaatgattcctatcatctatacacctaccgaaggcgatgccatcaagcagttttccgatatatatcgttatcctgagggttgttatttggatattgatcataacgatttgtcttatatcaagcaacagctttccgagtttggaaaatccgatagtgtcgaatacattatcattaccgattctgaaggtattttgggtatcggcgatcaaggtgttggtggtgtcttaatttcagttgccaagggacatttaatgactttatgcgcgggtttagaccctaatcgattcttgcccattgttctcgatgttggcaccaacaatgaaacccatcgtaaaaatcatcaatacatgggtttgagaaaggatcgtgttcgtggtgaacagtatgacagctttttggacaatgttataaaggccattcgtgaagtctttcctgaggcctttattcattttgaggattttggtcttgccaacgccaagcgcattttagaccactatcgtcctgacattgcctgctttaacgatgatatccagggaaccggtgccgtagcattggccgccattattggcgcccttcacgttacgaaatctcccttaaccgagcagcgcatcatgatctttggtgcaggtactgctggtgttggtatcgccaaccaaattgttgccggtatggtgacagatggcctttcattagataaggctagaggtaatcttttcatgattgatcgttgcggtttgcttttggagagacatgctaagattgctactgatggacaaaagccatttttgaagaaggactctgactttaaggaagtcccttctggagacattaatttagagagtgctattgcactcgtcaagcccaccattcttttgggatgttccggtcaaccgggtaaatttacagagaaagccattcgtgaaatgagcaagcacgtcgagcgccccatcattttcccaatctctaatcccactactcttatggaagcgaagcccgatcaaattgacaaatggtcagatggaaaggctttgatagccactggttccccacttcctcctctcaatcgcaatggtaaaaaatacgtgatttcccaatgcaacaatgccctcctttaccctgctcttggtgttgcatgtgtgttatcccgttgcaagttattgagtgatggtatgctgaaagcagcttccgatgctttggccactgttcccagatctttatttgctgctgatgaagccctcttgccagatttgaacaatgctcgcgaaatttctcgtcacattgtttttgcagtcttgaagcaagctgtttctgagggaatgagcactgtggatttacccaaagatgatgctaaattgaaggaatggattattgaacgtgaatggaatcccgaatacaagccttttgtataa

SEQ ID NO: 6000 - protein, 565 aa, Schizosaccharomyces pombe
MPAGTKEQIECPLKGVTLLNSPRYNKDTAFTPEERQKFEISSRLPPIVETLQQQVDRCYDQYKAIGDEPLQKNLYLSQLSVTNQTLFYALISQHLIEMIPIIYTPTEGDAIKQFSDIYRYPEGCYLDIDHNDLSYIKQQLSEFGKSDSVEYIIITDSEGILGIGDQGVGGVLISVAKGHLMTLCAGLDPNRFLPIVLDVGTNNETHRKNHQYMGLRKDRVRGEQYDSFLDNVIKAIREVFPEAFIHFEDFGLANAKRILDHYRPDIACFNDDIQGTGAVALAAIIGALHVTKSPLTEQRIMIFGAGTAGVGIANQIVAGMVTDGLSLDKARGNLFMIDRCGLLLERHAKIATDGQKPFLKKDSDFKEVPSGDINLESAIALVKPTILLGCSGQPGKFTEKAIREMSKHVERPIIFPISNPTTLMEAKPDQIDKWSDGKALIATGSPLPPLNRNGKKYVISQCNNALLYPALGVACVLSRCKLLSDGMLKAASDALATVPRSLFAADEALLPDLNNAREISRHIVFAVLKQAVSEGMSTVDLPKDDAKLKEWIIEREWNPEYKPFV

SEQ ID NO: 6001 - DNA, 1776 bp, Vitis vinifera
  CDS (1)..(1776)
atggagagcacgttgaaggacataagagatggcgcttcggtgctggacctggacccaaaggccaccgtgggtggtggcgttgaggacttgtacggggaggattttgccactgaggaccagctcgtcaccccttggactgtttccgttgccagtgggtattcgttgttgagggatcctcgccataacaagggtcttgcattcaatgataaagagagggatgcgcactacttatgtggtcttctacctccagtagtttccacccaagaacttcaggagaggaaattgatgaactctattcgtcaatatcaagttcctttgcaaaagtacatggccatgatggaccttcaggaaaggaatgaaaggctgttctacaagcttctcattgataatgttgaggaattgctcccggttgtctacactccaactgttggtgaggcttgccagaaatatgggagcatcttcaggcgcccacagggtctttacataagtttgaaagaaaagggaaagattctggaggtattgaagaactggcctgagaggagaattcaagttattgtcgtcactgatggtgagaggattctgggacttggggaccttggttgccaggggatggggatacctgtagggaaactttctctgtatacagcacttggaggtgttcgtccttcagcatgcttgcccataaccattgacgtgggaacaaacaatgaaaagctattggcgaatgagttctatattggtctcaaacaacggagagcaactgggaaggaatactctgaatttctgcaagagttcatgtcccctgtcaagcagaactatggagaaaaagttcttatacagtttgaagattttgcaaaccataatgcttttgacctgcttgcaaaatacggcacaactcatctcgctttcaatgatgatatacagggaacagcatctgtggttcttgcagggatagtttcagcactgcggttacttggtggtactttggccgatcacaaatttttgttccttggtgctggagaagctggaactgggatagcagagcttatagctcttgagatgtcgaaacagacaaaatgtcctatagaagagaccagaaagaagatttggcttgtggactcaaagggtttaattgttggctcccgtaaggattcacttcaacaatttaagaagccatgggctcatgaacatgaacctgttaaggatcttttagatgctgtcaaggtgatcaagccaaccgtcttgattggatcatctggagtaggaaaagcatttacaaaggaggttattgaggccatggcatcctgcaatgagaaacctctcattctggctctctccaacccaacctcacaatcagagtgtacagctgaagaagcttacacttggactcagggtcgtgcaatttttgctagcggaagtccatttgaccccgttgaatacaatggcaaaacttttgttcctggacaggctaacaatgcttacatctttcctggattgggtatgggcttggttatttctggtgctatccgtgttcatgacgagatgcttcttgcagcctcggaagccttggccaggcaagtaacacaagaaaactttgacaagggcttgatttacccaccattctccaatatcaggaaaatatcagcccacattgctgctaatgtagctgcaaaggcatatgaacttggtttggcgacccggctccctcaacctgagaatcttgtgaagtatgctgagagctgcatgtactctcctgtgtaccgcagttaccggtga

SEQ ID NO: 6002 - protein, 591 aa, Vitis vinifera
MESTLKDIRDGASVLDLDPKATVGGGVEDLYGEDFATEDQLVTPWTVSVASGYSLLRDPRHNKGLAFNDKERDAHYLCGLLPPVVSTQELQERKLMNSIRQYQVPLQKYMAMMDLQERNERLFYKLLIDNVEELLPVVYTPTVGEACQKYGSIFRRPQGLYISLKEKGKILEVLKNWPERRIQVIVVTDGERILGLGDLGCQGMGIPVGKLSLYTALGGVRPSACLPITIDVGTNNEKLLANEFYIGLKQRRATGKEYSEFLQEFMSPVKQNYGEKVLIQFEDFANHNAFDLLAKYGTTHLAFNDDIQGTASVVLAGIVSALRLLGGTLADHKFLFLGAGEAGTGIAELIALEMSKQTKCPIEETRKKIWLVDSKGLIVGSRKDSLQQFKKPWAHEHEPVKDLLDAVKVIKPTVLIGSSGVGKAFTKEVIEAMASCNEKPLILALSNPTSQSECTAEEAYTWTQGRAIFASGSPFDPVEYNGKTFVPGQANNAYIFPGLGMGLVISGAIRVHDEMLLAASEALARQVTQENFDKGLIYPPFSNIRKISAHIAANVAAKAYELGLATRLPQPENLVKYAESCMYSPVYRSYR

SEQ ID NO: 6003 - DNA, 1920 bp, Oryza sativa
  CDS (1)..(1920)
atgctgtccgcgcgcgccgccgccaccgccgccgccgccgccgcctccccgctgtggaagcgcggcgagggtggcagcagcgggagcgggagcggatgcacgagctgcagggaggtgcggaggagggccgcggcggtgagggtccgtgcggcggcgccgaggagggtggaggcggtcgcgatggagtccgcggcggagaccgagaagaaggaggaggttgcggcggccggcggcggggttgaggacatggctaccgaggaggtgcccgtcacgccatgggccttctccgtcgcgagtggttacacccttttgagggatccacatcacaacaagggccttgcctttagtgagaaggagcgggatgctcattacttacgtggccttcttcctccggcagttgtgtctcaggatcttcaagtgaagaagatcatgcataatcttcgccagtacagtgtacctttgcagcgttacatggccatgatggatctccaggagaggaacgagaggctcttctacaagcttttgattgataatgtggaggagcttctccctgtggtgtatacaccaacagtaggtgaggcctgccagaagtatgggagcatatttagacaaccacagggtctctatgtcagcttgaaggacaagggaaaggttcttgatgtgctaaggaactggccagagagaaacattcaagttattgttgttactgatggtgagcgcattttggggcttggagatttgggttgtcagggaatgggtattcctgttggtaaactttctctgtacactgcccttggaggagttcgcccgtcagcttgtttacctatcacgattgatgttggtacaaacaatgagcaattgttgaatgatgaattctacattgggctccggcaaaggcgtgctactggcaaggagtaccatgagctcatggaagaatttatgagtgccgttaagcaaatctatggtgagaaagttctgatacagtttgaggacttcgccaatcacaacgcatttgatttgcttgcaaaatacagcaagagtcatcttgttttcaatgatgatatccagggaacagcatctgtggtccttgcaggtcttttatcatcactaaaggtggttggtggaaccctggctgaacacacttatttgttccttggtgctggtgaggctggaactggtattgcagaactcattgctcttgagatttcaaaacagacaaaggctccaattgaggagtgccgcaagaaggtttggctgctggattcaaaggggttgatcgttaactcacgaaaagaatccctccaggcatttaaaaagccttgggcacatgagcatgaacctgtaacgacactgttagatgctgtccagtccatcaaacctactgtgctgattggaacatccggagttggcaaaacttttactaaagaagttattgaggccatggcttcctttaacgagcgacccgtcattttctctctgtcaaaccccacatcacactctgagtgtactgctgaagaagcatataattggagccagggtcgtgcagtatttgccagcggcagtccgtttgaccctgtggagtacaatggaaagatacatgtgccaggccagtcgaacaatgcctacattttccctggattcggcctcggtgtcgtaatctctggagctgtccgtgttcacgaggatatgcttctagctgcctcggaaacactagctgatcaggccactcaggagaactttgagaagggatcgatcttcccgcccttcacaaacatcagaaagatttctgctcgcattgccgcaagcgtggctgcaaaagcctatgaacttggactggcgacccggctgcctcaacccagggatctggagaaatacgcagagagctgcatgtacacccccgtataccgcagctaccggtaa

SEQ ID NO: 6004 - protein, 639 aa, Oryza sativa
MLSARAAATAAAAAASPLWKRGEGGSSGSGSGCTSCREVRRRAAAVRVRAAAPRRVEAVAMESAAETEKKEEVAAAGGGVEDMATEEVPVTPWAFSVASGYTLLRDPHHNKGLAFSEKERDAHYLRGLLPPAVVSQDLQVKKIMHNLRQYSVPLQRYMAMMDLQERNERLFYKLLIDNVEELLPVVYTPTVGEACQKYGSIFRQPQGLYVSLKDKGKVLDVLRNWPERNIQVIVVTDGERILGLGDLGCQGMGIPVGKLSLYTALGGVRPSACLPITIDVGTNNEQLLNDEFYIGLRQRRATGKEYHELMEEFMSAVKQIYGEKVLIQFEDFANHNAFDLLAKYSKSHLVFNDDIQGTASVVLAGLLSSLKVVGGTLAEHTYLFLGAGEAGTGIAELIALEISKQTKAPIEECRKKVWLLDSKGLIVNSRKESLQAFKKPWAHEHEPVTTLLDAVQSIKPTVLIGTSGVGKTFTKEVIEAMASFNERPVIFSLSNPTSHSECTAEEAYNWSQGRAVFASGSPFDPVEYNGKIHVPGQSNNAYIFPGFGLGVVISGAVRVHEDMLLAASETLADQATQENFEKGSIFPPFTNIRKISARIAASVAAKAYELGLATRLPQPRDLEKYAESCMYTPVYRSYR

SEQ ID NO: 6005 - DNA, 1713 bp, Oryza sativa
  CDS (1)..(1713)
atggccggcggcggcgtggaggacacgtacggcgaggacagggccaccgaggatcagctcatcaccccatggtccttctccgtcgccagcgggtacacgctgctgagagacccgcggcacaacaagggtttggccttctcggaggcggagcgcgacgcgcactacctccgcggcctcctcccgccatccatcgtctcgcaggagctccaggagaagaagctcatgcacaacctccgcaactacaccgtccccctccagcgctacatcgccatgatggacctccaggagaggaatgagaggctgttctacaagctcctgatcgacaacgtggaggagctgctgccggtggtgtacacgccgacggtcggggaggcctgccagaagtacggcagcatctacaggcggccacagggcctgtacatcagcctcaaggacaaggggaagatccttgaggtgctcaagaactggccggagaggagcatccaggtgatcgtcgtcaccgacggcgagcgcattcttggccttggagatcttggttgtcagggaatgggtattcctgtcggcaaactgtctctgtacactgcccttggaggagttcgcccatcagcttgccttccaatcacaattgatgttggtaccaacaatgagtcactgctcaacgacgaattctacattggactcaagcaacgccgtgctaccggagaggaataccacgagcttcttgaggagtttatgaccgcagttaagcaaaactacggcgagaaagtgctcgttcagtttgaagactttgccaaccacaatgcttttgacttgcttgcaaagtacagcaagagccaccttgtcttcaacgacgacattcagggaacagcatcagtggtcctcgcaggtctgattgcggcgctcaaggtggtcggtggaactcttgcagatcacacttacctgttccttggcgccggtgaggctggaactggcatcgcagagctcattgccctcgagatgtcaaagcagacggagattccgatcaatgattgccggaagaaggtgtggctggtggactcgagggggctgatcgtggagtcgaggaaggagtcgctgcagcacttcaagcagccattcgcgcacgagcacgagccggtgaagacgctgctggaggccgtgcagtccatcaagccgaccgtgctcatcggcacttccggcgtcggcaagacattcacccaggaggtcgtcgaggccatggccgccttcaacgagaaacctgtcatcttcgcgctctccaacccgacgtcgcactcggaatgcaccgcggaggaggcatacacctggaccaagggaagtgcggtgttcgcgagcgggagcccgttcgacgcggtggagtacgaggggaagacgtacgtgccggggcaatcgaacaacgcctacatcttcccggggttcgggctgggcgtggtgatctcgggcgccatccgcgtccacgacgacatgctgctggcggcgtcggaggcgctggcggagcaggtgagcgaggacaacttcgccagggggctcatcttcccgcccttcaccaacatccgcaagatctccgcacacatcgccgccaaggtcgccgccaaggcgtacgagctcggcctcgccagccgcctcccgcgccccgacgacctcgtcaagtacgccgagagctgcatgtacaccccggcctaccgctgctaccgctga

SEQ ID NO: 6006 - protein, 570 aa, Oryza sativa
MAGGGVEDTYGEDRATEDQLITPWSFSVASGYTLLRDPRHNKGLAFSEAERDAHYLRGLLPPSIVSQELQEKKLMHNLRNYTVPLQRYIAMMDLQERNERLFYKLLIDNVEELLPVVYTPTVGEACQKYGSIYRRPQGLYISLKDKGKILEVLKNWPERSIQVIVVTDGERILGLGDLGCQGMGIPVGKLSLYTALGGVRPSACLPITIDVGTNNESLLNDEFYIGLKQRRATGEEYHELLEEFMTAVKQNYGEKVLVQFEDFANHNAFDLLAKYSKSHLVFNDDIQGTASVVLAGLIAALKVVGGTLADHTYLFLGAGEAGTGIAELIALEMSKQTEIPINDCRKKVWLVDSRGLIVESRKESLQHFKQPFAHEHEPVKTLLEAVQSIKPTVLIGTSGVGKTFTQEVVEAMAAFNEKPVIFALSNPTSHSECTAEEAYTWTKGSAVFASGSPFDAVEYEGKTYVPGQSNNAYIFPGFGLGVVISGAIRVHDDMLLAASEALAEQVSEDNFARGLIFPPFTNIRKISAHIAAKVAAKAYELGLASRLPRPDDLVKYAESCMYTPAYRCYR

SEQ ID NO: 6007 - DNA, 1863 bp, Oryza sativa
  CDS (1)..(1863)
atgtggcgtcacgcggcgcggcggtcgtcggcgcagatccggcggagcggggtcatgtcgtcgtcgtcgtcgccggcggcccccgctgccgcggccggcgccgcggtgcccggcccctgcatcgtccacaagcgcggcaccgacatcctccacgacccatggttcaacaaggacacggcgttccccatgacggagcgggatcgccttggcctccgcggcctcctcccgccgcgggtcatgtcgttcgagcagcagtacgaccgcttcataaactcgttcaggtcgctggagcacaacacccggggagagcccgacaccatcgtcgcgctggccaagtggaggatcctcaacaggctgcacgaccggaacgagacgctgtactacagagttctaattgacaatatcaaggatttcgcgccgataatatacactccgactgttgggttggtctgcgagaattacagtggcttgttcaggcgcccccgtgggatgtatttcagcgccaaggataagggggagatgatgtcgatgatttacaactggccagccgagaaggttgacatgatagttgtgactgatgggagccgtattctaggtctaggtgatcttggagttcagggcataggtatacctatcggtaaacttgatgtttatgttgccgctgctggtatcaatccacaaaaggttcttccaattatgcttgacgttggaacaaataacacaaagcttctagaagacaagctatatttaggactgaggcaacctaggctggaaggagaagaatacttgtctgttgtagatgaattcatggaagctgttcatgcacgttggccgaaagcagttgtgcagtttgaagacttccaaatgaaatgggcctttgaaactcttcagaggtatcggaaccgattttgtatgttcaatgatgacgtgcaggggacagcaggagttgctctagctggcctacttggagctgtgagagcacaaggtcgacccctctctgattttactaagcagaagatagttgtggtgggagctggaagtgctgggataggtgtgcttaatatggctaaacaggcgatgctaaggatgccagggataaacaggagcggggaagggcataatcaattctgggttctggacaaagatggacttattaccaaatccagaaagggcctggatcctgcagttgctcgctatgccagaggttttggtcctgaagaggtgcaagatctccatgagggggctagtcttgttgaagtggtcaggaaagtgaagcctcatgtgcttttaggactttctggagttgggggcatatttaatgaggaggttctcaaggctatgaaagaatccgattcccctcgtcctgcaatttttgcaatgtccaacccaactactaaagccgaatgtactcctgaagatgtattcaaatatgttggagacaatgcagtatttgccagtggaagccctttcagtaatgtcactttaggcaatggtagacaagggtacgctaatcaagcaaacaatatgtatctgtttcctggtatcggtttaggagcccttctttcaggtgctcggcatattacagatggcatgctccaatcagcagctgagtgccttgcgtcatacatcacagacgatgaaattcgaaaaggcatcctctttccatcaatctcaagtatcaggcacatcaccgcacgtgtcggcgccgcagtcgtccgtgccgctgttgatgaagatctggccgaggggcgttgtgatgtagacgctagggacctcaagagcatgactgaggcggacacagtcgactttgtggctcggaagatgtggtaccctatttacagccccctcgtgaacgataagtga

SEQ ID NO: 6008 - protein, 620 aa, Oryza sativa
MWRHAARRSSAQIRRSGVMSSSSSPAAPAAAAGAAVPGPCIVHKRGTDILHDPWFNKDTAFPMTERDRLGLRGLLPPRVMSFEQQYDRFINSFRSLEHNTRGEPDTIVALAKWRILNRLHDRNETLYYRVLIDNIKDFAPIIYTPTVGLVCENYSGLFRRPRGMYFSAKDKGEMMSMIYNWPAEKVDMIVVTDGSRILGLGDLGVQGIGIPIGKLDVYVAAAGINPQKVLPIMLDVGTNNTKLLEDKLYLGLRQPRLEGEEYLSVVDEFMEAVHARWPKAVVQFEDFQMKWAFETLQRYRNRFCMFNDDVQGTAGVALAGLLGAVRAQGRPLSDFTKQKIVVVGAGSAGIGVLNMAKQAMLRMPGINRSGEGHNQFWVLDKDGLITKSRKGLDPAVARYARGFGPEEVQDLHEGASLVEVVRKVKPHVLLGLSGVGGIFNEEVLKAMKESDSPRPAIFAMSNPTTKAECTPEDVFKYVGDNAVFASGSPFSNVTLGNGRQGYANQANNMYLFPGIGLGALLSGARHITDGMLQSAAECLASYITDDEIRKGILFPSISSIRHITARVGAAVVRAAVDEDLAEGRCDVDARDLKSMTEADTVDFVARKMWYPIYSPLVNDK

SEQ ID NO: 6009 - DNA, 1767 bp, Brassica napus
  CDS (1)..(1767)
atgggaagtactccggctgaagtaccctgcgaggatgtcgccgataacagatccggcgtcggaggtggtatctccgacgtctacggtgaggatctagccaccttggatcagctcgtcactccttgggttacctccgtcgctagtggatactcgttgatgcgtgacccgagatacaacaagggacttgctttcactgataaagagagagatgctcattacttaactggtcttcttccccctgttgtcataagccaggaagttcaggagaggaagctgatgcacaatctccgccagtacactgttcctctacagcgttacatggccctcatggatcttcaggaaaggaacgagaggttgttctacaagcttctgattgacaacgtggaggagttgcttccagttgtgtacacaccaacagttggtgaggcttgccagaagtatggtagcattttcaggaagccacagggtctctacatcagcttgaaagagaagggaaagattcttgaagtgttgaagaactggcctcagagagggattcaagttattgttgttactgatggtgagcgcattctcggtctgggagatcttggttgccagggaatgggaattccagtggggaagctttctctttacacagctttgggaggaatccgtccatcagcttgccttccaatcactattgatgtgggtacaaacaaccagaagttgctgaatgatgaattctacattggccttaaacagagaagagcaactggccaggaatatgcagagtttctgcatgagttcatgtgtgctgtgaagcagaactacggagagaaagtgttggtgcagtttgaagattttgcaaaccacaatgcgtttgaccttctgtctaagtacagcgatactcatcttgtcttcaatgacgatatccagggtactgcatcagtggtgcttgctgggcttattgccgctcagaaagtgcttggtaaaagccttgctgaccataccttcttgttcttgggtgccggagaggctggaaccggtattgctgagctaattgctcttaagatttctaaagagactggagctcccatcgatgagaccaggaagaagatttggcttgtggactccaagggactgatcgttagctcacgcaaagaatcacttcagcacttcaagcagccatgggcgcatgagcacgaacctgtcaaggacctcattggtgctgtgaatgcaatcaaaccaactgttctcattggaacctctggtgtgggtcaaactttcacaaaggaagtagtcgaggccatggctaccaacaacgagaaaccgttgattcttgctctctcaaaccctacttctcaagctgagtgtaccgcagaacaggcttacacatggaccgagggtggtgcaatctttggaagtggaagcccgtttgatcccgttgagtacaacggcaaaacttacttgcctggccaggcaaacaactgttacattttcccgggtctcggtcttggtttgatcatgtccggtgccattcgtgtccgtgatgacatgctcctcgcagcttctgaagcattggccgctcaagtcactgaagagaacttcgccaacggtctgatctacccaccattctcaaacatcagagagatctctgctaacattgcagccagtgtggccgcaaaaacctatgacctcggattggcgtcgaacctcccacgtgcgaaggatctggtgaagtttgccgagagctgcatgtacagccctgtctacagaaactaccgttaa

SEQ ID NO: 6010 - protein, 588 aa, Brassica napus
MGSTPAEVPCEDVADNRSGVGGGISDVYGEDLATLDQLVTPWVTSVASGYSLMRDPRYNKGLAFTDKERDAHYLTGLLPPVVISQEVQERKLMHNLRQYTVPLQRYMALMDLQERNERLFYKLLIDNVEELLPVVYTPTVGEACQKYGSIFRKPQGLYISLKEKGKILEVLKNWPQRGIQVIVVTDGERILGLGDLGCQGMGIPVGKLSLYTALGGIRPSACLPITIDVGTNNQKLLNDEFYIGLKQRRATGQEYAEFLHEFMCAVKQNYGEKVLVQFEDFANHNAFDLLSKYSDTHLVFNDDIQGTASVVLAGLIAAQKVLGKSLADHTFLFLGAGEAGTGIAELIALKISKETGAPIDETRKKIWLVDSKGLIVSSRKESLQHFKQPWAHEHEPVKDLIGAVNAIKPTVLIGTSGVGQTFTKEVVEAMATNNEKPLILALSNPTSQAECTAEQAYTWTEGGAIFGSGSPFDPVEYNGKTYLPGQANNCYIFPGLGLGLIMSGAIRVRDDMLLAASEALAAQVTEENFANGLIYPPFSNIREISANIAASVAAKTYDLGLASNLPRAKDLVKFAESCMYSPVYRNYR

SEQ ID NO: 6011 - DNA, 1911 bp, Zea mays
  CDS (1)..(1911)
atgctgtccacgcgcaccgccgccgtcgccgcctccgcgtcccccgcctccccgtggaaggtgggaggacggagcgagggcggcgccagctgcgacggatgccggacctacaggaacaccctgcggaggagggccgcgcccgccaaggtgcgcgccttgccgcccaggcgggtggacgcggtcgcgatggtctccaacgcggagacggagacggagaaggagcaggaggaggcggcggccgccagcgaggagctgcccgtcatgccctgggccacctccgtcgcaagcggttacacccttttgagggatccacaccacaacaagggtcttgctttcacagaggaggaaagggatggacactacttgcgtggactgcttcctccggcagtactatctcaggaactccaaattaagaagttcatgaacaccctgcggcagtaccagacccctttgcagcggtatatagctatgatgaaccttcaggaaacggacgagaggcttttctacaagcttttaattgataatgtggtggagctgcttccttttgtttacacaccaactgtaggtgaggcctgccagaagtatgggtccatctttggacgaccacagggtctgtatgtcagcctgaaggacaaggggaaggtcctagaagttctaaggaactggccacataggaacattcaagttatctgtgttactgatggtgagcgaatcttgggacttggagatttgggttgtcagggaatgggaattcctgtaggcaaacttgctctatacactgctcttggaggagttgacccatcagtttgcttgcctatcacaattgatgttggtacaaataacgagaaactgcttaatgatgagttctacattggactccggcaaaaacgtgcgactggcgaggagtatgatgagcttattgaagagttcatggctgctgttaagcaattctatggtgagaaagtcctcattcagtttgaggactttgccaatcataatgcctttgatttgcttgaaaaatatagcaagagccatcttgttttcaatgatgatatccagggcacagcatcagtggtccttgcaggtttgttagcagcactcaagatggttggtgggaccctggcagagcagacttatttgttccttggtgctggggaggctggaactggtattgcagaacttattgctcttgagatttcgaaacagacgaatgctccaattgaagagtgccgcaagaaggtttggctggtggactcaaagggtttgattgttgactctcgtaaaggctctcttcagccattcaagaaaccttgggcgcatgagcacgagcccttgaaaaccttgtatgatgctgttcagtccatcaaacctacagttctgatcgggacatctggagttggaagaacattcacaaaagaaatcattgaggccatgtcttccttcaacgagaggcctatcatcttttcactgtcaaacccaacctcgcattctgaatgcactgctgaacaagcatatacatggagtcagggccgttcaatctttgccagtggcagtccatttgcccccgtggagtacgaaggaaagacttttgtgcctgggcagtcgaacaatgcctacattttccctggactcggcctcggtcttgtgatctctggagccgtccgtgtccacgaggacatgcttctcgccgcctcgaaagcgctagctgatcaggccacacaggacaacttcgagaagggctccatcttcccacccttcaccagcatcagaaagatctctgcgcacatcgctgcagccgtggctgcaaaagcctacgagctcggtctggcgacccgtctgcctccccccagcgacctggtgaaatatgcagagaactgcatgtacactcccgtctaccgcaactaccggtag

SEQ ID NO: 6012 - protein, 636 aa, Zea mays
MLSTRTAAVAASASPASPWKVGGRSEGGASCDGCRTYRNTLRRRAAPAKVRALPPRRVDAVAMVSNAETETEKEQEEAAAASEELPVMPWATSVASGYTLLRDPHHNKGLAFTEEERDGHYLRGLLPPAVLSQELQIKKFMNTLRQYQTPLQRYIAMMNLQETDERLFYKLLIDNVVELLPFVYTPTVGEACQKYGSIFGRPQGLYVSLKDKGKVLEVLRNWPHRNIQVICVTDGERILGLGDLGCQGMGIPVGKLALYTALGGVDPSVCLPITIDVGTNNEKLLNDEFYIGLRQKRATGEEYDELIEEFMAAVKQFYGEKVLIQFEDFANHNAFDLLEKYSKSHLVFNDDIQGTASVVLAGLLAALKMVGGTLAEQTYLFLGAGEAGTGIAELIALEISKQTNAPIEECRKKVWLVDSKGLIVDSRKGSLQPFKKPWAHEHEPLKTLYDAVQSIKPTVLIGTSGVGRTFTKEIIEAMSSFNERPIIFSLSNPTSHSECTAEQAYTWSQGRSIFASGSPFAPVEYEGKTFVPGQSNNAYIFPGLGLGLVISGAVRVHEDMLLAASKALADQATQDNFEKGSIFPPFTSIRKISAHIAAAVAAKAYELGLATRLPPPSDLVKYAENCMYTPVYRNYR

SEQ ID NO: 6013 - DNA, 1770 bp, Glycine max
  CDS (1)..(1770)
atgtcgagcgcttcgttgaaggagatgaggaacggtggtgaggattatagcaatggtcatggtggtggtggtgtgagggacttgtatggagaggattgtgccactgaggaccagcttatcactccatggactttctctgtggccagtggatgcagtttactgagagatccacgctacaacaaagggctggcctttaccgagggagagagagatgctcattacttgcgtggccttttgcctccagctatcttcaatcaagaacttcaggaaaagaggttgatgcacaatcttcgccagtatgaggttcctctgcataggtacatggcaatgatggatcttcaggagagaaatgaaaggctgttttacaagcttctgatcaataatgttgaggaactgcttcctgttgtttacactccaacggttggagaagcatgccagaaatacggaagcatttttaggcgtcctcagggtctatatataagtttgaaggagaaaggcaagatccttgaagtactgaaaaactggccagaaaagagtattcaagttattgttgtgactgatggtgagcgcatattaggacttggagatcttggttgccagggaatgggaattcctgttgggaaactttctctttatacagctttaggaggtgtccgcccgtcatcttgcttgccaataaccattgatgttggcacaaacaatgagaagttgctgaatgatgagttctacattgggcttaaacaaaagcgggcaactgggcaggaatatgcggagcttctagaggagttcatgcacgcagttaagcagaattatggggagaaagttctcgtacagtttgaggatttcgccaatcataatgcatttgatctgctggaaaaatacagctcatctcatcttgttttcaacgatgatatacagggtacagcatctgtggtattagcaggattgcttgcatccctgaaattagttggtggaaccttagttgaccataccttcttattcctgggtgctggagaggctggaactggtatagctgagctgatagctcttgagatttcaaagcagactaaagctccagtggaagagacccgcaagaagatctggctcgtggactcaaagggacttattgttagctctcgtttggaatcacttcagcagttcaaaaagccttgggcccatgagcatgaacctgttaagagtcttctggatgctgtcaaggcaatcaagccaaccgttttgattggatcatctggagcagggaagacatttactaaggaggtggttgaaaccatggcatccttgaatgagaaaccacttattcttgctctctccaacccaacttcacaatctgagtgcacagctgaagaagcttatacatggagcaagggtaaagcaatctttgctagtggaagcccatttgatcctgttgaatatgaaggaaaactttttgttcctggacaggctaacaatgcttacatatttcctggttttggcttgggtttgatcatctctggtgcaattcgtgtgcgtgatgagatgctcttggcagcctctgaagctttggctgcacaagtatcacaggaaaactatgataagggactgatttaccctccattctcaaacatcagaaagatatcagcccacattgctgctaaagtcgcggctaaggcatatgatcttggtctggcttctcatctgcctcgacctaaggatcttgtcaaatatgcagaaagttgcatgtacagcccaggctaccgaagctaccgttga

SEQ ID NO: 6014 - protein, 589 aa, Glycine max
MSSASLKEMRNGGEDYSNGHGGGGVRDLYGEDCATEDQLITPWTFSVASGCSLLRDPRYNKGLAFTEGERDAHYLRGLLPPAIFNQELQEKRLMHNLRQYEVPLHRYMAMMDLQERNERLFYKLLINNVEELLPVVYTPTVGEACQKYGSIFRRPQGLYISLKEKGKILEVLKNWPEKSIQVIVVTDGERILGLGDLGCQGMGIPVGKLSLYTALGGVRPSSCLPITIDVGTNNEKLLNDEFYIGLKQKRATGQEYAELLEEFMHAVKQNYGEKVLVQFEDFANHNAFDLLEKYSSSHLVFNDDIQGTASVVLAGLLASLKLVGGTLVDHTFLFLGAGEAGTGIAELIALEISKQTKAPVEETRKKIWLVDSKGLIVSSRLESLQQFKKPWAHEHEPVKSLLDAVKAIKPTVLIGSSGAGKTFTKEVVETMASLNEKPLILALSNPTSQSECTAEEAYTWSKGKAIFASGSPFDPVEYEGKLFVPGQANNAYIFPGFGLGLIISGAIRVRDEMLLAASEALAAQVSQENYDKGLIYPPFSNIRKISAHIAAKVAAKAYDLGLASHLPRPKDLVKYAESCMYSPGYRSYR

SEQ ID NO: 6015 - DNA, 1902 bp, Glycine max
  CDS (1)..(1902)
atgggacactggtgcttatcaaacttgggattttctggctgctgtggcactaattcttcaaagagaaaaatctcaaaggatcagcattataacactggtgaagataagaaagtaattggcagagaaatggagagcacactgaaggccttgagagatggagagtcggtgttggacctcagcccaagatccaccgtcagtggcggcgttgaggacatctacggcgaggatcgcgccaccgaggatcaacttgttaccccatggattttctcggttgccagtgggtactctttgctacgagatccacagtacaacaaagggctatctttcactgagaaagagagggatgcacactatttgcgtgggctcctgcctcccacagtcagcactcagcaacttcaggagaagaaactgatgaacagcatcaggcaatatcaggttcccttgcaaaagtacgtggccatgatggaccttcaggagaggaatgaaaggctattttacaaacttctcattgataatgttgaggaattgctccctgttgtatatactcctaccgttggtgaggcttgccagaaatatgggagcatcttcaagcgtcctcagggtcttttcataagtttgaaagagaaggggaagattcttgaagtattgaaaaactggcctgagaaaagtattcaagttattgttgtaacagatggtgaacgaattttgggacttggggatcttggatgtcaggggatgggaattcctgttggtaaattggccttgtacacagcactaggaggagttagaccatcagcatgtttgcctattacgatcgatgtggggacaaacaatgaaaaattactgaatgatgagttttacattgggctcagacaaaagagggcaactggacaggaatattctgaactcttgcaagagttcatgactgctgtcaagcaaaactatggagaaaaagttcttattcagtttgaagattttgcaaaccacaatgcttttgaattgcttgcaaaatatggcacaactcatcttgttttcaacgatgatattcaggggactgcatctgtcgttcttgctggggttgtggcagccttgaagctcattggaggtactctggctgaccacacattcttgtttcttggtgctggagaggcaggaactggaatagcagaactaatagctcttgagatgtcaaagcagacaaagacacctatagaggagactcgcaagaagatatggcttgtagactcaaagggtttgattgttggttcaagaaaggcttcacttcaacacttcaagcagccttgggctcatgagcatgagcctgtaggcagtctcttagaagctgttaaggtaatcaagcctacagttttgattgggtcatcaggagtgggaaaaacatttacaaaggaagtaattgaggctgtgacttctataaatgaaaaacctcttgtcctggctctctccaatccaacttcacagtctgagtgtacagctgaagaggcttatcaatggagtgagggtcgtgcaatttttgctagtggaagtccatttgatcctgtagaatacaagggcaaagtgtactattctggccaggccaacaatgcttacattttcccgggctttggtctggggttggtaatctcaggagcaatcagagtgcatgatgatatgcttctagcagcttcggaagccttggctaaactagtgtccaacgagaactacgaaaagggcttgatttatccaccattctctaacatcagagaaatttcagctaacatagcagcaagtgtagctggcaaggcatatgagctaggcttggctactcgtctccctcgtcctcagaatcttgtcaagtatgctgagagctgcatgtattctcctgtctacagaaactataggtga

SEQ ID NO: 6016 - protein, 633 aa, Glycine max
MGHWCLSNLGFSGCCGTNSSKRKISKDQHYNTGEDKKVIGREMESTLKALRDGESVLDLSPRSTVSGGVEDIYGEDRATEDQLVTPWIFSVASGYSLLRDPQYNKGLSFTEKERDAHYLRGLLPPTVSTQQLQEKKLMNSIRQYQVPLQKYVAMMDLQERNERLFYKLLIDNVEELLPVVYTPTVGEACQKYGSIFKRPQGLFISLKEKGKILEVLKNWPEKSIQVIVVTDGERILGLGDLGCQGMGIPVGKLALYTALGGVRPSACLPITIDVGTNNEKLLNDEFYIGLRQKRATGQEYSELLQEFMTAVKQNYGEKVLIQFEDFANHNAFELLAKYGTTHLVFNDDIQGTASVVLAGVVAALKLIGGTLADHTFLFLGAGEAGTGIAELIALEMSKQTKTPIEETRKKIWLVDSKGLIVGSRKASLQHFKQPWAHEHEPVGSLLEAVKVIKPTVLIGSSGVGKTFTKEVIEAVTSINEKPLVLALSNPTSQSECTAEEAYQWSEGRAIFASGSPFDPVEYKGKVYYSGQANNAYIFPGFGLGLVISGAIRVHDDMLLAASEALAKLVSNENYEKGLIYPPFSNIREISANIAASVAGKAYELGLATRLPRPQNLVKYAESCMYSPVYRNYR

SEQ ID NO: 6017 - DNA, 1959 bp, Zea mays
  CDS (1)..(1959)
atggcctcggtgtccgtcgtgctgctacagcgctcctcctcgcgcgtccgaggatatatacggctccagcgcatcgccagctcttcagttacgttggttttggagggcgaggggcattggtggtggagcaacagccgcggccgcgacgagaggtttggcgcaagaacggtgcaccatatggcgggatcaggagagggggaaaacggcggcgtgccggcgggtggtcaagttgcgatggcgccgggcgtggtgaccggcggtgtggaggatgcctatggcgaggaccgcgcgaccgaggaccagactgtcacaccgtgggccatctgcatcgcaagtggtcactccctgctgagggatccaaggcacaacaaagggctctctttcacggagaaagagcgggacacgcactacctgcgaggattattgcctccggtagtgctatctcaggacctccaggagaagaggatgttgcagaatgttaggcagttccagatcccgttgcagcgctacactgcgctaatggaccttcaggagagaaatgagaggctattttacaagctcttgattgacaatgtcgaagaactgcttcctgttgtgtatacaccaacagtgggggaagcttgccagaagtatgggtcaatcttcagacgaccacagggtttatacatcagcctcaaggagaagggaaggatcttggaggtactgaggaactggacagagaagagtattcaggttattatggtcactgatggtgagcgcattttaggcctgggagatcttggttgccagggcatgggaattcctgtggggaagcttgcactgtatactgctcttggaggtgtacggccatccgcttgcttacctattaccattgatgtgggaacaaataatgaagacctactgaaggatgaattctacattggcttaaagcaaagaagagcaactggccaggaatactctgaatttctggatgagtttatggccgcagttaggcagaactatggacaaaaagttcttgtccagtttgaggacttcgcaaaccacaatgcatttacacttcttgagaagtacaggacaaaccatcttgtatttaatgatgatatccagggcacggctgctgtagttcttgcagggattgttgctgctctgaagtctgttggtggaactctagctgatcatacattcttgttcttcggtgcaggagaggctggtacgggcattgctgaactagttgctctcgagatatccagacaggcaaatgtttcagtagaagaggctcgcaaaaagatctggctggttgattcaaagggactaattgtggcctcacgtgaagagactctccagccatttaagaagcgatatgcacatgagcatgaacctgtcaaagatcttttaggtgctgttaaggctatcagaccaactgcactcataggatcagctggtgtaggtcaaagtttcactaaagaggtgattgaggttatgtcttcgattaatgagagacccattgtccttgctctatcgaacccgacgtcacagtctgaatgtactgctgaacaagcatatacatggagtcaggggcgtgccatatttggcagtggaagcccatttgatccggtgaaatataatgacaagctgtttgtgcctgcccaggcaaacaatgcatacattttccctgggtttggtctaggggtggtgatctcaggagccgtccgggtgtcagacgatatggttcttgctgctgctgaagcactagcggaacaggtaaccccggagcatattgagaaaggcctgatctacccgcccttctccatcatcaggaagatttcagctaacatagctgcccatgtcgccgcaaaagcttatgatctcggaatggctacccagctccctcggccaaaagacctggtgaagtacgctgagagctgcatgtacagccccgtctaccgatcgtacaggtga

SEQ ID NO: 6018 - protein, 652 aa, Zea mays
MASVSVVLLQRSSSRVRGYIRLQRIASSSVTLVLEGEGHWWWSNSRGRDERFGARTVHHMAGSGEGENGGVPAGGQVAMAPGVVTGGVEDAYGEDRATEDQTVTPWAICIASGHSLLRDPRHNKGLSFTEKERDTHYLRGLLPPVVLSQDLQEKRMLQNVRQFQIPLQRYTALMDLQERNERLFYKLLIDNVEELLPVVYTPTVGEACQKYGSIFRRPQGLYISLKEKGRILEVLRNWTEKSIQVIMVTDGERILGLGDLGCQGMGIPVGKLALYTALGGVRPSACLPITIDVGTNNEDLLKDEFYIGLKQRRATGQEYSEFLDEFMAAVRQNYGQKVLVQFEDFANHNAFTLLEKYRTNHLVFNDDIQGTAAVVLAGIVAALKSVGGTLADHTFLFFGAGEAGTGIAELVALEISRQANVSVEEARKKIWLVDSKGLIVASREETLQPFKKRYAHEHEPVKDLLGAVKAIRPTALIGSAGVGQSFTKEVIEVMSSINERPIVLALSNPTSQSECTAEQAYTWSQGRAIFGSGSPFDPVKYNDKLFVPAQANNAYIFPGFGLGVVISGAVRVSDDMVLAAAEALAEQVTPEHIEKGLIYPPFSIIRKISANIAAHVAAKAYDLGMATQLPRPKDLVKYAESCMYSPVYRSYR

SEQ ID NO: 6019 - DNA, 1713 bp, Zea mays
  CDS (1)..(1713)
atggcgggcggcggcgttgaggacgtgtacggcgaggaccgcgctaccgaggagcagctgatcacgccgtgggccttctccgtcgcaagcggctacaccctgctgcgcgacccgcggcacaacaagggcctggccttctcggaggcggagcgcgacgcgcactacctccggggcctgctgccgccggcgctggcgtcgcaggagctgcaggagaagaagctcatgcagaacctgcgccggtacgagcagccgctgcaccgctacatcgccatgatggacctgcaggagcgcaacgagaggctcttctacaagctcctcatcgacaacgtcgaggagctgctccccgtcgtctacacgcccaccgtcggcgaggcatgccagaagtacggcagcatctaccgccgcccgcaggggctgtacatcagcctcagagacaagggcaagatcctcgaggtgctcaagaactggcccgagaggagcatccaggtcatcgtcgtcaccgacggcgagcgcatcctcggcctcggtgatctcggttgccaggggatgggaattcccgttggcaagctctccctctacactgccctcggaggtgttcgaccgtcagcttgcctgcccatcacaattgatgtcggcaccaacaacgaggccttgctcaaggacgagttctacatcggcctccgccagaggcgtgccaccggcgaggagtaccatgaacttcttgaagagttcatgaccgccgtcaagcaaaactacggcgagaaggtcctcacccagttcgaagacttcgccaaccacaacgcctttgacctgctcgagaagtacagggagagccatctcgtcttcaacgacgatatccagggaacagcctccgttgtcctcgctggcctcctggcggcgctcaaggtggtcggcgggacacttgcggaccacacttacctgttcctcggcgccggcgaggccgggactggcattgccgagctcattgctctcgagatgtccaaacatactgggtctccgatcgaagagtgccgcccgaagatctggctgatggactccaagggcctgatcgtggcgtcacggaaggactcgctgcaggcgttcaagaagccatgggcgcacgagcacgagcccgtggcgaccctgctggaggccgtgcagtccctgaagccgacggtgctgatcggcacctcgggcaagggcggcaccttcaccaaggaggtggtggaggcgatggcgtcccagaacgagaagccggtcatcttcgcgctgtcgaacccgacctcgcactcggagtgcacggcggagcaggcctacacctggaccaagggccgcgcggtgttcgcgagcggcagccccttcgacagcgtggagctggacggcaaggtgctggtgccggggcagtccaacaacgcctacatcttcccggggttcggcctcggcgtcgtcatctccggcgccatccgcgtccgcgacgacatgctgctggccgcctcggaggcgctggcggagcaggtcaccgaggagcacttcgccaaggggctcatcttcccgcccttcaccaacatccgcgccatctccgcgcgcatcgccgccaaggtggccgccaaggcctacgagctcggcctcgccagccgcctgccacgccctgacgatctcgtcaagtacgctgagagctgcatgtacacccccatctaccgcagctaccggtaa

SEQ ID NO: 6020 - protein, 570 aa, Zea mays
MAGGGVEDVYGEDRATEEQLITPWAFSVASGYTLLRDPRHNKGLAFSEAERDAHYLRGLLPPALASQELQEKKLMQNLRRYEQPLHRYIAMMDLQERNERLFYKLLIDNVEELLPVVYTPTVGEACQKYGSIYRRPQGLYISLRDKGKILEVLKNWPERSIQVIVVTDGERILGLGDLGCQGMGIPVGKLSLYTALGGVRPSACLPITIDVGTNNEALLKDEFYIGLRQRRATGEEYHELLEEFMTAVKQNYGEKVLTQFEDFANHNAFDLLEKYRESHLVFNDDIQGTASVVLAGLLAALKVVGGTLADHTYLFLGAGEAGTGIAELIALEMSKHTGSPIEECRPKIWLMDSKGLIVASRKDSLQAFKKPWAHEHEPVATLLEAVQSLKPTVLIGTSGKGGTFTKEVVEAMASQNEKPVIFALSNPTSHSECTAEQAYTWTKGRAVFASGSPFDSVELDGKVLVPGQSNNAYIFPGFGLGVVISGAIRVRDDMLLAASEALAEQVTEEHFAKGLIFPPFTNIRAISARIAAKVAAKAYELGLASRLPRPDDLVKYAESCMYTPIYRSYR

SEQ ID NO: 6021 - DNA, 1815 bp, Glycine max
  CDS (1)..(1815)
atgtggaaactcgtgcgatatgccgccgcctccaacctcgcccgatcgcggcggttctccgccgcgattcctggtccgtgcattgttcacaagcgcggtgccgacatactccatgacccctggttcaacaaggatacagggtttcctttgactgaaagggataggttggggcttcggggcctcttacctcctcgtgttatatcctttgagcagcaatatgatcgctttatgaattcattccgatctttggagaataatactcaggggcaaccagataaagttgtttccttggcaaaatggaggatcttaaatagactgcatgataggaatgagactttgtactacagagttcttattgataatattaaagagtttgctccaataatatatactcctacagttggattagtgtgtcaaaattattcagggttatttaggcgtccacgtggaatgtattttagtgccaaagataaaggagagatgatgtcaatgatctataactggccagctcacgaggtagacatgattgtcttaacagatggaagtcgaattcttggcttaggtgaccttggagttcagggaattggaatccccataggaaaacttgatgtgtatgttgctgctgctggtatcaacccacaaagaatacttccagttatgctggatgttggtaccaacaatcaaaagttacttgaagatcgcctttatttaggacttcgacaaccaaggttggaaggtgaagagtatctatcaattatagatgaattcatggaagctgttcatgctcgatggcccaaggctattgtgcagtttgaggattttcaaatgaagtgggcttttgaaaccctgaaaagatatcagaaaaagttttgcatgtttaatgatgatatacagggcactgcaggtgttgcacttgctggactattgggaactgtaagagcccaaggccggccattgactgattttgtgaaccaaaagatagttgtggttggagctgggagtgcaggacttggggttctaaaaatggccatccaagcagttgcaaagatatctgggtgcagtgaattagctgccaaaagccaattctatttgattgataaagatggtctagttacaacagagaggaacaatctagacccagctgcagctccatttgctaaaaatccaagagacatagaagggcttactgagggtgctagtataattgaagtggttaagaagattaggccacatgtgctccttggtttgtctggcgttggtggtattttcaatgaggaggtgcttaaggcaatgagagaatctgtttcaacaaaacctgctatctttgccatgtctaaccccaccatgaatgctgagtgcactgctattgatgcttttaagcatgctggggaaaatatggtgtttgcaagtggaagccctttcgaaaacgtagatcttggtaatggaattgtgggtcatgtaaatcaagcaaacaacatgtacctcttcccaggaattggtttgggaacccttctgtcaggtgctcaccttataacagatggaatgttgcaggcagctgctgaatgccttgcttcatacatggccgaggaagatatcttaaaaggaattttatatccatccgttgatagcatacgagatgttacggcagaggttggggctgctgtgcttcgagcagcagttgaagaagaactggcagaaggaaatggtgatgtggggcccaaagaactttcccatatgtcgaaagatgagactgtggagtatgtgcgaagcaatatgtggtatcctgtgtattctcctctcgttcatgaaaaatga

SEQ ID NO: 6022 - protein, 604 aa, Glycine max
MWKLVRYAAASNLARSRRFSAAIPGPCIVHKRGADILHDPWFNKDTGFPLTERDRLGLRGLLPPRVISFEQQYDRFMNSFRSLENNTQGQPDKVVSLAKWRILNRLHDRNETLYYRVLIDNIKEFAPIIYTPTVGLVCQNYSGLFRRPRGMYFSAKDKGEMMSMIYNWPAHEVDMIVLTDGSRILGLGDLGVQGIGIPIGKLDVYVAAAGINPQRILPVMLDVGTNNQKLLEDRLYLGLRQPRLEGEEYLSIIDEFMEAVHARWPKAIVQFEDFQMKWAFETLKRYQKKFCMFNDDIQGTAGVALAGLLGTVRAQGRPLTDFVNQKIVVVGAGSAGLGVLKMAIQAVAKISGCSELAAKSQFYLIDKDGLVTTERNNLDPAAAPFAKNPRDIEGLTEGASIIEVVKKIRPHVLLGLSGVGGIFNEEVLKAMRESVSTKPAIFAMSNPTMNAECTAIDAFKHAGENMVFASGSPFENVDLGNGIVGHVNQANNMYLFPGIGLGTLLSGAHLITDGMLQAAAECLASYMAEEDILKGILYPSVDSIRDVTAEVGAAVLRAAVEEELAEGNGDVGPKELSHMSKDETVEYVRSNMWYPVYSPLVHEK

SEQ ID NO: 6023 - DNA, 1989 bp, Zea mays
  CDS (1)..(1989)
atgatctccgcgcgcaccgccgcagcttcccccgcttccctgtggaagcagggaggacgaagcgagggcggcggcagctgcgacggatgtcggacttacaggaacactttgcggagggccgcagcagcgaaggtgcgtgccttgccgtcgagggcggtggaggcggtcaaaatgggctccgccgcggagatggagcaggaggaggcggaggtggccgcggccgcggccggcgtcgtcgtcgaggaccactacggcgaggacagcgccaccgaggagctgcccatcctgccctgggccttctccgtcgcaagatatgtttccttcagttggttgaaaaaatacgctgaggagtcttatttctacatcagcggttacaccctcttgagggatccacatcacaacaagggtcttgctttcatggagaaggagagggatgcacaccacttgcgggggctgcttcctcctgcagttgtgcctcaagaactccaaattaagaagatcatgcacaacctgcggcagtaccaggtccctttgcagcgctatatggccatgatggaccttcaggagaggaacgagaggcttttctacaagcttttaattgataacgtggaggagctgcttcctgtggtttatacaccaactgtaggtgaggcctgccagaagtatgggtccatctttcgacaaccacagggtctgtatgtcagcttgagggacaaggggaaggtcctagaagttctaaggaactggccacataggaacattcaagttatctgtgttactgatggtgaggcaatcttgggacttggagatttgggttctcagggaatgggaattcctgtaggcaaacttgctctatacactgctcttggaggagttcgtccatcagcttgtttgcctatcacaatcgatgttggcacaaataatgagaaactgcttaatgatgagttttacattggactccggcaaaaacgtgcaactggcgaggagtatcatgagcttatggaagagttcatggctgctgttaagcaaatctacggcgagaaagtcctcattcagtttgaggacttcgcgaatcataatgcttttaatttgcttgcaaaatatagcaagagccatcttgttttcaatgatgacatccagggcacagcatcagtggtccttgcaggtttgttagcagcactcaaggtggttggtaggaccttggcagagcacacttatttattccttggtgctggggaagctggaactggtattgcagaactcattgctcttgagatttcaaaacagacgtcggctccaattgaagagtgccgcaagaagatttggttggtggactcaaagggtttgattgttgactctcgtaaaaactccgttcagtcattcaaaaaaccttgggcacatgagcatgaacccttgacaaccttgtacgatgctgttcagtccatcaaacctacagttctgattgggacgtctggagttggaagaacattcacaaaagaagttgttgaggccatggcttccttcaatgagaggcctatcatcttttcactgtcaaatccaacctctcattctgaatgtactgctgaagaagcatataactggactcaggtcgtaatatttgccagtggcagtccatttgaccctgtggagtacgatgggaaggtttttgtacctggacagtcgaacaacgcctacattttccctggatttggcctcggtcttgttatctctggagccatccgtgtccacgaggacatgcttcttgccgcctcggaagcactagctgctcaggccacacaggagaacttcgacaagggatcaatcttcccacccttcaccaacattagaaagatctctgcgcgcattgccagagccgtggctgcaaaagcttatgaactcggtttggcgacccgtctgcctcccccaagggacctggtgaaacatgcacagagctgcatgtacactcctgtctaccgtaaataccggtag

SEQ ID NO: 6024 - protein, 662 aa, Zea mays
MISARTAAASPASLWKQGGRSEGGGSCDGCRTYRNTLRRAAAAKVRALPSRAVEAVKMGSAAEMEQEEAEVAAAAAGVVVEDHYGEDSATEELPILPWAFSVARYVSFSWLKKYAEESYFYISGYTLLRDPHHNKGLAFMEKERDAHHLRGLLPPAVVPQELQIKKIMHNLRQYQVPLQRYMAMMDLQERNERLFYKLLIDNVEELLPVVYTPTVGEACQKYGSIFRQPQGLYVSLRDKGKVLEVLRNWPHRNIQVICVTDGEAILGLGDLGSQGMGIPVGKLALYTALGGVRPSACLPITIDVGTNNEKLLNDEFYIGLRQKRATGEEYHELMEEFMAAVKQIYGEKVLIQFEDFANHNAFNLLAKYSKSHLVFNDDIQGTASVVLAGLLAALKVVGRTLAEHTYLFLGAGEAGTGIAELIALEISKQTSAPIEECRKKIWLVDSKGLIVDSRKNSVQSFKKPWAHEHEPLTTLYDAVQSIKPTVLIGTSGVGRTFTKEVVEAMASFNERPIIFSLSNPTSHSECTAEEAYNWTQVVIFASGSPFDPVEYDGKVFVPGQSNNAYIFPGFGLGLVISGAIRVHEDMLLAASEALAAQATQENFDKGSIFPPFTNIRKISARIARAVAAKAYELGLATRLPPPRDLVKHAQSCMYTPVYRKYR

SEQ ID NO: 6025 - DNA, 1947 bp, Zea mays
  CDS (1)..(1947)
atgctgtccacgcgcaccgccgccgtcgccgcctccgcgtcccccgcttccctgtggaagctgggaggacggagcgagggcggcggcagctgcgacggatgtcggacttacaggaacactttgcggagggccgcagcagcgaaggtgcgtgccttgccgtcgagggcggtggaggcggtcaaaatgggctccgccgcggagatggagcaggaggaggcggaggtggccgcggccgcggccggcgtcgtcgtcgaggaccactacggcgaggacagcgccaccgaggagctgcccatcctgccctgggccttctccgtcgcaagcggttacaccctcttgagggatccacatcacaacaagggtcttgctttcatggagaaggagagggatgcacaccacttgcgggggctgcttcctcctgcagttgtgcctcaagaactccaaattaagaagatcatgcacaacctgcggcagtaccaggtccctttgcagcgctatatggccatgatggaccttcaggagaggaacgagaggcttttctacaagcttttaattgataacgtggaggagctgcttcctgtggtttatacaccaactgtaggtgaggcctgccagaagtatgggtccatctttcgacaaccacagggtctgtatgtcagcttgagggacaaggggaaggtcctagaagttctaaggaactggccacataggaacattcaagttatctgtgttactgatggtgagcgaatcttgggacttggagatttgggttctcagggaatgggaattcctgtaggcaaacttgctctatacactgctcttggaggagttcgtccatcagcttgtttgcctatcacaatcgatgttggcacaaataatgagaaactgcttaatgatgagttttacattggactccggcaaaaacgtgcaactggcgaggagtatcatgagcttatggaagagttcatggctgctgttaagcaaatctacggcgagaaagtcctcattcagtttgaggacttcgcgaatcataatgcttttaatttgcttgcaaaatatagcaagagccatcttgttttcaatgatgacatccagggcacagcatcagtggtccttgcaggtttgttagcagcactcaaggtggttggtgggaccttggcagagcacacttatttattccttggtgctggggaggctggaactggtattgcagaactcattgctcttgagatttcaaaacagacgtcggctccaattgaagagtgccgcaagaagatttggttggtggactcaaagggtttgattgttgactctcgtaaaaactccgttcagtcattcaaaaaaccttgggcacatgagcatgagcccttgacaaccttgtacgatgctgttcagtccatcaaacctacagttctgattgggacgtctggagttggaagaacattcacaaaagaagttgttgaggccatggcttccttcaatgagaggcctatcatcttttcactgtcaaatccaacctctcattctgaatgtactgctgaagaagcatataactggactcagggtcgtgtaatatttgccagtggcagtccatttgaccctgtggagtacgatgggaaggtttttgtacctggacagtcgaacaacgcctacattttccctggatttggcctcggtcttgttatctctggagccatccgtgtccacgaggacatgcttcttgccgcctcggaagcactagctgctcaggccacacaggagaacttcgacaagggatcaatcttcccgcccttcaccaacattagaaagatctctgcgcgcattgccgcagccgtggctgcaaaagcttatgaactcggtttggcgacccgtctgcctcccccaagggacctggtgaaatatgcacagagctgcatgtacactcctgtctaccgtaactaccggtag

SEQ ID NO: 6026 - protein, 648 aa, Zea mays
MLSTRTAAVAASASPASLWKLGGRSEGGGSCDGCRTYRNTLRRAAAAKVRALPSRAVEAVKMGSAAEMEQEEAEVAAAAAGVVVEDHYGEDSATEELPILPWAFSVASGYTLLRDPHHNKGLAFMEKERDAHHLRGLLPPAVVPQELQIKKIMHNLRQYQVPLQRYMAMMDLQERNERLFYKLLIDNVEELLPVVYTPTVGEACQKYGSIFRQPQGLYVSLRDKGKVLEVLRNWPHRNIQVICVTDGERILGLGDLGSQGMGIPVGKLALYTALGGVRPSACLPITIDVGTNNEKLLNDEFYIGLRQKRATGEEYHELMEEFMAAVKQIYGEKVLIQFEDFANHNAFNLLAKYSKSHLVFNDDIQGTASVVLAGLLAALKVVGGTLAEHTYLFLGAGEAGTGIAELIALEISKQTSAPIEECRKKIWLVDSKGLIVDSRKNSVQSFKKPWAHEHEPLTTLYDAVQSIKPTVLIGTSGVGRTFTKEVVEAMASFNERPIIFSLSNPTSHSECTAEEAYNWTQGRVIFASGSPFDPVEYDGKVFVPGQSNNAYIFPGFGLGLVISGAIRVHEDMLLAASEALAAQATQENFDKGSIFPPFTNIRKISARIAAAVAAKAYELGLATRLPPPRDLVKYAQSCMYTPVYRNYR

SEQ ID NO: 6027 - DNA, 1857 bp, Zea mays
  CDS (1)..(1857)
atgatctcgccggcgatgtgtcgttcggcgccgcggcgggccgcgcaggtccggcgcctcctgtcgtcggccgcgcccccggcgcacgccggcgctgccgtgcctgggccctgcatcgtgcacaagcgcggcaacgacatcctccacgatccgtggtacaacaaggatacggcgttccccatgacggagcgcgaccgcctcggtctccgcggcttgctcccgccgcgggtcatgtccttcgagcagcagtacgagcgatttataaactctttccggtcgctggagcacaatacccgcggcgagcctgactccatcgtcgcgctggccaaatggaggatcctcaacaggttgcacgaccggaacgagacattgtactacagggtgctaattgacaatatcaaggattttgccccgataatatacactcccactgttggcttggtctgtgaaaattacagcggtctgttcagacgaccccgtgggatgtatttcagtgcaaaggataagggggagatgatgtcaatgatttacaactggccagcagagaaggttgacatgatagttgtgactgatgggagtcgcattctaggcttaggtgaccttggtgttcagggcataggtatacctattggtaaactggatgtttatgttgcagctgctggtattaacccacagaaggttcttccaataatgcttgatgtgggaacaaataatgaaaagcttctggaggacaagctatatttaggactgaggcaacctcggctggaaggagaagaatacttggctgttgtagatgaattcatggaggctgtccatgcacgttggcctaaagcagttgtgcagtttgaagacttccaaatgaaatgggcctttgagactcttcagaggtatcggaaccgattttgcatgttcaatgatgacgtacaggggacagctggagttgctctagcaggcctacttggtgctgttagagcacagggccgtcctctccaggattttacgaatcaaaagatagtcgttgtgggagctggaagtgctgggataggtgtgcttagcatggctaaacaggcaatgttaaggatgcctgggatccacagaaccggggaagggcataatcaattctgggttctggacaaagatggccttattacgaaagctaggaaggacctggattctgcagtggcgcgttttgccagaggctttggtcctgatgaggtcccagatctctatgagggggctagtcttgttgaagtggtcaagaaagttaagccccatgtgcttttaggactatctggagttgggggcatatttaatgaggaggttctcaaagctatgaaagaatccgattcccctcggcctgcagtttttgcaatgtccaaccctactactaaagctgaatgcactcccgatgatgtattcaagcatgttggagataaagcgatatttgctagtggaagcccttttagtaatgtttctttaggaaatggtaaatctggttatgctaatcaagcaaacaacatgtatctatttcctgggattggtttaggtgcccttctttcaggtgcccggcatgtttcagatggcatgcttcaagcagcagctgagtgcctggcatcatacatcacagacgacgaaattcgaaaaggaatcctcttcccttcggtctccagtattaggcacatcaccgcacgtgtcggcgcagcagtcgtccgtgccgctgttgctgaagacctggctgaggggtgctgtgatgtgggtcctagggagcttgggagtatgtcagagtcggaagcagtggactacgtcgctcggaagatgtggtaccctatttacagccctcttgtgagcgacaaataa

SEQ ID NO: 6028 - protein, 618 aa, Zea mays
MISPAMCRSAPRRAAQVRRLLSSAAPPAHAGAAVPGPCIVHKRGNDILHDPWYNKDTAFPMTERDRLGLRGLLPPRVMSFEQQYERFINSFRSLEHNTRGEPDSIVALAKWRILNRLHDRNETLYYRVLIDNIKDFAPIIYTPTVGLVCENYSGLFRRPRGMYFSAKDKGEMMSMIYNWPAEKVDMIVVTDGSRILGLGDLGVQGIGIPIGKLDVYVAAAGINPQKVLPIMLDVGTNNEKLLEDKLYLGLRQPRLEGEEYLAVVDEFMEAVHARWPKAVVQFEDFQMKWAFETLQRYRNRFCMFNDDVQGTAGVALAGLLGAVRAQGRPLQDFTNQKIVVVGAGSAGIGVLSMAKQAMLRMPGIHRTGEGHNQFWVLDKDGLITKARKDLDSAVARFARGFGPDEVPDLYEGASLVEVVKKVKPHVLLGLSGVGGIFNEEVLKAMKESDSPRPAVFAMSNPTTKAECTPDDVFKHVGDKAIFASGSPFSNVSLGNGKSGYANQANNMYLFPGIGLGALLSGARHVSDGMLQAAAECLASYITDDEIRKGILFPSVSSIRHITARVGAAVVRAAVAEDLAEGCCDVGPRELGSMSESEAVDYVARKMWYPIYSPLVSDK

SEQ ID NO: 6029 - DNA, 1782 bp, Zea mays
  CDS (1)..(1782)
atggagagcacgctcaaggggatacgcggcagcgatgcgccgtgcgttctggacctggacgacgcggccaccgtggcgggcggcgtcgaggacacctacggcgaggatcgcgccaccgaggagcagctcgtcacgccctggaccgtctccgtcgccagcggttacaatctgcttagggatccccgttacaacaagggacttgcgttcacagagagggaacgtgagacgcactacctccgtggccttctgccaccagctattgtatcccaggagctccaggagagaaagatcatgaataatattcgacaataccagttgcctttgcagcgctacatggcactcatggatctccaggaagggaacgagaggcttttctacaagttgctcattgacaacgtcgaggagttacttccaatcgtgtacactccaaccgttggcgaggcctgccaaaaatatggatccatatttagtcgccctcagggtctttatatcagtttgaaggagaagggaaagatccttgaggtgttgaagaactggccagagaggagcattcaggttatagttgttactgatggtgaacgtattttggggcttggagatctcggatgccaggggatggggattcctgttggtaaactttccctttacactgccctgggaggagttcgtccatctgcttgcttgccgatcacattggatgttggtacaaataacgaggagctgcttaatgacgaattttacattggcttgagacaaagaagagccactggccaggagtacactgattttctgcaagaatttatgactgctgtgaaacaaaactatggggagaaagttcttattcagtttgaggattttgccaaccataatgcttttgatcttcttgcaagatatggcaccactcaccttgtattcaatgatgatattcagggaacagcttctgtggttcttgctgggcttattgcagcacaaacattacttggtggttcattggcagatcacacttaccttttccttggtgctggagaggctgggacaggtatagctgaacttatagctcttgagatctcacgtcagacgaaagctcctatagaggagtgccgcaagaaaatctggcttgttgattcaaagggcttgattgtcagtacacgaaaggagtcccttcaacacttcaagaaaccatgggctcatgagcataaaccactcagcaacctcttagatgctgttaatgctatcaaaccaacagtgttgattggcacatccgggaaggggcaaactttcacaaaagacgttgttgaagcaatctcctcatttaacgagagaccaatcattcttgccctatcgaacccaacatcacaatctgaatgcacagctgagcaagcttacacatggagcaagggacaagcagtgtttgcgactgggagtccatttgatcctgtggagtacaatggcaagatacatgttcccggacaggcaaacaatgcctatatcttcccagggtttggcctcggcgtggtgatgtctggagctatccgcgttcatgatgacatgcttctggcagcatcggaggctctggcccagcaggtcacagaagaaaattttgagaaggggctgatttatcctcccttctcaaacataaggaagatctctgcccacattgcagccagcgttgcagcaaaggcatatgaacttggtttggcaagtaggcgccctcggccaaaggacctggtgaaatatgcagagagctgcatgtacagccccatctaccgcaactaccgttga

SEQ ID NO: 6030 - protein, 593 aa, Zea mays
MESTLKGIRGSDAPCVLDLDDAATVAGGVEDTYGEDRATEEQLVTPWTVSVASGYNLLRDPRYNKGLAFTERERETHYLRGLLPPAIVSQELQERKIMNNIRQYQLPLQRYMALMDLQEGNERLFYKLLIDNVEELLPIVYTPTVGEACQKYGSIFSRPQGLYISLKEKGKILEVLKNWPERSIQVIVVTDGERILGLGDLGCQGMGIPVGKLSLYTALGGVRPSACLPITLDVGTNNEELLNDEFYIGLRQRRATGQEYTDFLQEFMTAVKQNYGEKVLIQFEDFANHNAFDLLARYGTTHLVFNDDIQGTASVVLAGLIAAQTLLGGSLADHTYLFLGAGEAGTGIAELIALEISRQTKAPIEECRKKIWLVDSKGLIVSTRKESLQHFKKPWAHEHKPLSNLLDAVNAIKPTVLIGTSGKGQTFTKDVVEAISSFNERPIILALSNPTSQSECTAEQAYTWSKGQAVFATGSPFDPVEYNGKIHVPGQANNAYIFPGFGLGVVMSGAIRVHDDMLLAASEALAQQVTEENFEKGLIYPPFSNIRKISAHIAASVAAKAYELGLASRRPRPKDLVKYAESCMYSPIYRNYR

SEQ ID NO: 6031 - DNA, 1860 bp, Zea mays
  CDS (1)..(1860)
atgtcgtccatctcgcggaatctccggcgatccctcgccccggaccgcctgcgccgcctctcccagcacccgcgagagtatgtgacgtcggagtgccaccgccccgtcgtcctccacaagcgcggccccgacatcctccacgacccctggttcaaccggggcacggcgttctcgatgaccgagagggaccgcctcggcctccgcggcctgctcccgcccaacgtcgtctcctcgcagcagcagatcgacagattcatgcttgatctgaaacggctgcagagatatgcaagagatggcccgtctgatacttatccattggcaaaatggcgcatccttaacagattgcatgacagaaatgaaacgatgtactacaaggtactaatagataacattgaggagtatgcacctatcgtttacacaccaaccgttggacttgtttgccaaaactacagtggtctgtttcgacgccctaggggaatgtactttagtgcagaagatcgtggggagatgatgtccatggtgtacaattggccagctgatcaggttgacatgatagtggtgactgatggaagcaggatattgggtcttggtgatcttggggtgcatggtattggcattgctattggaaaattggatttatatgttgctgctgctggaataaatcctcaaagggttcttcctgttatgattgatgtcggaacgaacaacgagaagctccttaaggatcctctttatcttgggctacaagagcaccgtcttgagggagatgaatatgtttcagttattgatgaattcatggaagctgtttttactcgctggcctaatgttattgtacagtttgaagatttccaaagtaaatgggcctttaggttgttgcagcgttacagaaagacttatcgcatgtttaatgatgatgttcagggaactgctggtgtcgcaatagcaggccttttaggagctgtacgggcacaagggaggccaatgatagattttccaaagcaaaggattgttgttgctggcgctggcagtgctggtattggagtggtgaatgctgcaagcagaaccatggcaagaatgttgggaaacaatgacgttgcttttgagagtgcgaggagtcaattctggatagtggatgcccatggcctaataacagaagaccgagaagatatcgatccagatgcacggccttttgctagaagaaagagtgagcttggtcaccagggcctaagtgagggggcaagcttagttgaagtggttaaaaaggtgaagcctgatgtcatacttggattatctgctgttggtggtttgttctcgaaggaggttctagaggcactaaaagattcgtcctcgtcaaggccagcaatttttgcaatgtccaatccaactaagaatgctgagtgtacacctggggaagcattttcaattctaggtgaaaaggtcatctttgctagtgggagcccatttcatgatgtggatcttggtgatgggaagattggccattccaatcaagggaacaacatgtacctctttcctggaatagggcttggaacccttctgtctggtgctcgggttatctctgatggaatgctgcaggctgcagctgaacgtttggcttcatacatgaaagaggaggaggttctcgaagggataatttatcctccaatttccagaatacgtgacatcactaaggaggtggcagcagcagttgtgagggaggcagtagcagaggatctagctgagggataccgtgacatggatgcacgtgagcttgcacgactcagtgaggaagaaactaatgaatatgtcaagacgaacatgtggagtcctgtctatccaacaataatatacaagaaggactag

SEQ ID NO: 6032 - protein, 619 aa, Zea mays
MSSISRNLRRSLAPDRLRRLSQHPREYVTSECHRPVVLHKRGPDILHDPWFNRGTAFSMTERDRLGLRGLLPPNVVSSQQQIDRFMLDLKRLQRYARDGPSDTYPLAKWRILNRLHDRNETMYYKVLIDNIEEYAPIVYTPTVGLVCQNYSGLFRRPRGMYFSAEDRGEMMSMVYNWPADQVDMIVVTDGSRILGLGDLGVHGIGIAIGKLDLYVAAAGINPQRVLPVMIDVGTNNEKLLKDPLYLGLQEHRLEGDEYVSVIDEFMEAVFTRWPNVIVQFEDFQSKWAFRLLQRYRKTYRMFNDDVQGTAGVAIAGLLGAVRAQGRPMIDFPKQRIVVAGAGSAGIGVVNAASRTMARMLGNNDVAFESARSQFWIVDAHGLITEDREDIDPDARPFARRKSELGHQGLSEGASLVEVVKKVKPDVILGLSAVGGLFSKEVLEALKDSSSSRPAIFAMSNPTKNAECTPGEAFSILGEKVIFASGSPFHDVDLGDGKIGHSNQGNNMYLFPGIGLGTLLSGARVISDGMLQAAAERLASYMKEEEVLEGIIYPPISRIRDITKEVAAAVVREAVAEDLAEGYRDMDARELARLSEEETNEYVKTNMWSPVYPTIIYKKD

SEQ ID NO: 6033 - DNA, 20 bp, Artificial sequence
  primer
atgtctgatctcaagaccgc

SEQ ID NO: 6034 - DNA, 21 bp, Artificial sequence
  primer
tcagctgttgaacacctcttc

SEQ ID NO: 6035 - protein, 507 aa, Artificial sequence
  consensus sequence
  Variant (2)..(4): Xaa in position 2 to 4 is any amino acid
  Variant (6)..(6): Xaa in position 6 is any amino acid
  Variant (8)..(8): Xaa in position 8 is any amino acid
  Variant (10)..(31): Xaa in position 10 to 31 is any amino acid
  Variant (32)..(65): Xaa in position 32 to 65 is any or no amino acid
  Variant (67)..(67): Xaa in position 67 is any amino acid
  Variant (69)..(71): Xaa in position 69 to 71 is any amino acid
  Variant (73)..(75): Xaa in position 73 to 75 is any amino acid
  Variant (80)..(81): Xaa in position 80 to 81 is any amino acid
  Variant (83)..(90): Xaa in position 83 to 90 is any amino acid
  Variant (91)..(91): Xaa in position 91 is any or no amino acid
  Variant (94)..(95): Xaa in position 94 to 95 is any amino acid
  Variant (97)..(129): Xaa in position 97 to 129 is any amino acid
  Variant (130)..(130): Xaa in position 130 is any or no amino acid
  Variant (132)..(155): Xaa in position 132 to 155 is any amino acid
  Variant (156)..(185): Xaa in position 156 to 185 is any or no amino acid
  Variant (188)..(188): Xaa in position 188 is any amino acid
  Variant (191)..(192): Xaa in position 191 to 192 is any amino acid
  Variant (196)..(199): Xaa in position 196 to 199 is any amino acid
  Variant (201)..(205): Xaa in position 201 to 205 is any amino acid
  Variant (207)..(221): Xaa in position 207 to 221 is any amino acid
  Variant (222)..(224): Xaa in position 222 to 224 is any or no amino acid
  Variant (228)..(228): Xaa in position 228 is any amino acid
  Variant (229)..(230): Xaa in position 229 to 230 is any or no amino acid
  Variant (232)..(250): Xaa in position 232 to 250 is any amino acid
  Variant (251)..(264): Xaa in position 251 to 264 is any or no amino acid
  Variant (266)..(267): Xaa in position 266 to 267 is any amino acid
  Variant (269)..(271): Xaa in position 269 to 271 is any amino acid
  Variant (272)..(273): Xaa in position 272 to 273 is any or no amino acid
  Variant (275)..(277): Xaa in position 275 to 277 is any amino acid
  Variant (278)..(285): Xaa in position 278 to 285 is any or no amino acid
  Variant (287)..(289): Xaa in position 287 to 289 is any amino acid
  Variant (290)..(292): Xaa in position 290 to 292 is any or no amino acid
  Variant (294)..(294): Xaa in position 294 is any amino acid
  Variant (295)..(313): Xaa in position 295 to 313 is any or no amino acid
  Variant (315)..(343): Xaa in position 315 to 343 is any amino acid
  Variant (344)..(362): Xaa in position 344 to 362 is any or no amino acid
  Variant (364)..(366): Xaa in position 364 to 366 is any amino acid
  Variant (368)..(369): Xaa in position 368 to 369 is any amino acid
  Variant (372)..(373): Xaa in position 372 to 373 is any amino acid
  Variant (374)..(375): Xaa in position 374 to 375 is any or no amino acid
  Variant (377)..(381): Xaa in position 377 to 381 is any amino acid
  Variant (383)..(391): Xaa in position 383 to 391 is any amino acid
  Variant (392)..(394): Xaa in position 392 to 394 is any or no amino acid
  Variant (396)..(397): Xaa in position 396 to 397 is any amino acid
  Variant (398)..(414): Xaa in position 398 to 414 is any or no amino acid
  Variant (416)..(416): Xaa in position 416 is any amino acid
  Variant (418)..(418): Xaa in position 418 is any amino acid
  Variant (421)..(423): Xaa in position 421 to 423 is any amino acid
  Variant (426)..(429): Xaa in position 426 to 429 is any amino acid
  Variant (431)..(435): Xaa in position 431 to 435 is any amino acid
  Variant (437)..(442): Xaa in position 437 to 442 is any amino acid
  Variant (444)..(445): Xaa in position 444 to 445 is any amino acid
  Variant (448)..(449): Xaa in position 448 to 449 is any amino acid
  Variant (451)..(451): Xaa in position 451 is any amino acid
  Variant (453)..(461): Xaa in position 453 to 461 is any amino acid
  Variant (462)..(481): Xaa in position 462 to 481 is any or no amino acid
  Variant (483)..(491): Xaa in position 483 to 491 is any amino acid
  Variant (492)..(496): Xaa in position 492 to 496 is any or no amino acid
  Variant (498)..(498): Xaa in position 498 is any amino acid
  Variant (499)..(500): Xaa in position 499 to 500 is any or no amino acid
  Variant (502)..(503): Xaa in position 502 to 503 is any amino acid
  Variant (504)..(504): Xaa in position 504 is any or no amino acid
  Variant (506)..(506): Xaa in position 506 is any amino acid
LXXXYXPXVXXXXXXXXXXXXXXXXXXXXXXXXXXXXXXXXXXXXXXXXXXXXXXXXXXXXXXXXVXVXXXGXXXLGLGXXGXXXXXXXXXGKXXLXXXXXXXXXXXXXXXXXXXXXXXXXXXXXXXXXXGXXXXXXXXXXXXXXXXXXXXXXXXXXXXXXXXXXXXXXXXXXXXXXXXXXXXXXVFXDDXXGTAXXXXAXXXXXLXXXXXXXXXXXXXXXXXXGAGXXXAXXXXXXXXXXXXXXXXXXXXXXXXXXXXXXXXXDXXGXXXXXRXXXXXXXXXXXKXXXXXXAXXXXXXXXXXXXXXXXXXXXLXXXXXXXXXXXXXXXXXXXXXXXXXXXXXXXXXXXXXXXXXXXXXXXXPXXXAXXNPXXXXEXXXXXAXXXXXXXXXXXXGXXXXXXXXXXXXXXXXXXXPXQXNNXXXFPXXXXGXXXXXAXXXXXXMXXAAXXAXAXXXXXXXXXXXXXXXXXXXXXXXXXXXXXPXXXXXXXXXXXXXXVXXXAXXXGXA

SEQ ID NO: 6036 - protein, 24 aa, Artificial sequence
  protein pattern
  Variant (2)..(5): Xaa in position 2 to 5 is any amino acid
  Variant (6)..(6): Xaa in position 6 is Ala, Asn, Pro or Ser
  Variant (7)..(7): Xaa in position 7 is Gly or Asn
  Variant (9)..(9): Xaa in position 9 is any amino acid
  Variant (12)..(14): Xaa in position 12 to 14 is any amino acid
  Variant (17)..(17): Xaa in position 17 is any amino acid
  Variant (18)..(18): Xaa in position 18 is any or no amino acid
  Variant (20)..(20): Xaa in position 20 is any amino acid
  Variant (21)..(21): Xaa in position 21 is any or no amino acid
  Variant (23)..(23): Xaa in position 23 is any or no amino acid
GXXXXXXQXNNXXXFPXXFXXGXL

SEQ ID NO: 6037 - protein, 18 aa, Artificial sequence
  protein pattern
  Variant (3)..(3): Xaa in position 3 is any or no amino acid
  Variant (5)..(5): Xaa in position 5 is any or no amino acid
  Variant (9)..(9): Xaa in position 9 is any amino acid
  Variant (10)..(10): Xaa in position 10 is Ile or Val
  Variant (11)..(11): Xaa in position 11 is Ala, Ser, Thr or Val
  Variant (12)..(12): Xaa in position 12 is any amino acid
  Variant (14)..(14): Xaa in position 14 is Ala or Gly
  Variant (15)..(15): Xaa in position 15 is Ile, Leu, Met or Val
  Variant (16)..(16): Xaa in position 16 is any amino acid
  Variant (17)..(17): Xaa in position 17 is Ala, Gly or Asn
  Variant (18)..(18): Xaa in position 18 is Ala, Gly, Ser or Thr
DDXQXGTAXXXXAXXXXX

SEQ ID NO: 6038 - protein, 15 aa, Artificial sequence
  protein pattern
  Variant (2)..(2): Xaa in position 2 is Ile or Val
  Variant (3)..(3): Xaa in position 3 is Ser or Thr
  Variant (4)..(4): Xaa in position 4 is Asp or Asn
  Variant (6)..(6): Xaa in position 6 is Glu, Ser or Thr
  Variant (7)..(7): Xaa in position 7 is any amino acid
  Variant (8)..(8): Xaa in position 8 is Ile or Val
  Variant (13)..(13): Xaa in position 13 is Asp or Asn
  Variant (14)..(14): Xaa in position 14 is Ile or Leu
VXXXGXXXLGLGXXG

SEQ ID NO: 6039 - protein, 16 aa, Artificial sequence
  protein pattern
  Variant (3)..(4): Xaa in position 3 to 4 is any or no amino acid
  Variant (7)..(7): Xaa in position 7 is any amino acid
  Variant (8)..(8): Xaa in position 8 is any or no amino acid
  Variant (10)..(10): Xaa in position 10 is Phe or Tyr
  Variant (11)..(12): Xaa in position 11 to 12 is any amino acid
  Variant (13)..(13): Xaa in position 13 is Phe or Leu
  Variant (14)..(14): Xaa in position 14 is Ala or Gly
  Variant (15)..(15): Xaa in position 15 is Asp or Gly
  Variant (16)..(16): Xaa in position 16 is Ile, Leu or Val
PVXXGKXXLXXXXXXX

SEQ ID NO: 6040 - DNA, 825 bp, Azotobacter vinelandii
  CDS (1)..(825): transl_table=11
atgcataaacgccttacatatcgccgactcggctcattcattccggtaaggaggtactacgtgggacagaccaaagaagagatcgccgtggagcccaaacgcaaacgaaagcatcgtcccagcgtcgccatcggcttctggatcatcaagcgcctggagaacctgatcagacgctattcgatcctcggcaatccgccgttcttcgatacccgcgacttctcctgggtccccacgctggaggccaactgggaggtcgtgcgccgcgaactcgaacaggttctccaggatcgggaacgcttgccgaacttccaggacatctccaaggatcagcgcagcctcacccaggacgacctctggaagaccttcttcctctacggctacggctacaagatggaaggcaactgcaagctgtgcccggagacgaccaggctggtcgagtcgatcccggggatgtacaccgccttcttctcgatcttggcgcccggcaagaccatccgcgagcaccgcggcccctataacggtctgctgcgtgcccacctggggctgatagtgccggaacccagggaaaactgccggatccgggtgggcgaccagatccgccagtgggaacccggcaagtgcatgatcttcgacgacacctaccggcatcaggtgtggaacgaaaccgacggcacccgcgtcgtgctgttcctcgacgtgcagcggccgctggcctggccgggcaggctgctcaacaagctggttctccagctcatccgctggtcgcccttcatccaggacgcgcggcgcaaccaccgcgcctgggaagagggactggagcgctaa

SEQ ID NO: 6041 - protein, 274 aa, Azotobacter vinelandii
MHKRLTYRRLGSFIPVRRYYVGQTKEEIAVEPKRKRKHRPSVAIGFWIIKRLENLIRRYSILGNPPFFDTRDFSWVPTLEANWEVVRRELEQVLQDRERLPNFQDISKDQRSLTQDDLWKTFFLYGYGYKMEGNCKLCPETTRLVESIPGMYTAFFSILAPGKTIREHRGPYNGLLRAHLGLIVPEPRENCRIRVGDQIRQWEPGKCMIFDDTYRHQVWNETDGTRVVLFLDVQRPLAWPGRLLNKLVLQLIRWSPFIQDARRNHRAWEEGLER

SEQ ID NO: 6042 - DNA, 909 bp, Salmonella typhimurium LT2
  CDS (1)..(909): transl_table=11
atgttcgcagcaatcattatcggtatttttattatcagcgtcatttatgcgcattcacgcggggtggaaaaacaaaaactttcccgtcagctctttgaccactcgacgtttatggcgccgatcaatatgttcatgactcgcttctcaacgttaccggcaaagcagccgtactttgataccacggcatttccagagctgcagaagctgacggaaaactggcaggtgattcgtgaagaggcactacagcttcagcatcacataaaagccgcgcaggccaataacgacgccggattcaatacctttttcaagcgcggctggaaacggttttaccttaaatggtattccgatgcccacccgtcggcggaaacgttatgcccgataacgacaaagctggtcaacagcatcccctctattaaagcggcgatgttcgccgagttgcctcccggggcctatctgggaaaacatcgcgacccctatgccggttcagtacgttaccatcttggattaagcacaccgaatgacgaccgctgttttattgaagttgatcgacagcgccatagctggcgcgacggcaaagccgtcatcttcgacgaaacctacgttcattgggcggaaaataaaactgagcagacgcgtattatcctcttttgcgatattgagcgcccaatgaaatggcgctgggcgcagagcgtaaaccactgggtcggcgcatcgttgatgtccgccgccagttcgccaaacgacgagaacgatcgcaccggtgcgattaatcgcatctttaaatacgttcacgcagcacgcgatgccgggcaacgtctgaaaaagaaaaaccgcactctctattacgcgctgaaatatctcgttattgctgctatttttgccgcgataatccttttcagcctcctctga

SEQ ID NO: 6043 - protein, 302 aa, Salmonella typhimurium LT2
MFAAIIIGIFIISVIYAHSRGVEKQKLSRQLFDHSTFMAPINMFMTRFSTLPAKQPYFDTTAFPELQKLTENWQVIREEALQLQHHIKAAQANNDAGFNTFFKRGWKRFYLKWYSDAHPSAETLCPITTKLVNSIPSIKAAMFAELPPGAYLGKHRDPYAGSVRYHLGLSTPNDDRCFIEVDRQRHSWRDGKAVIFDETYVHWAENKTEQTRIILFCDIERPMKWRWAQSVNHWVGASLMSAASSPNDENDRTGAINRIFKYVHAARDAGQRLKKKNRTLYYALKYLVIAAIFAAIILFSLL

SEQ ID NO: 6044 - DNA, 921 bp, Chromobacterium violaceum ATCC 12472
  CDS (1)..(921): transl_table=11
atgccttatttcaagatcctggtggtggccgttttcgtgctgtccacgctttacgtgcacttccgcggccgcgtgcggctggggttctggcgccagttgagcgaccactccaccatcatggccccgatcaactgtttcatgtacctgttttccaaggtgccgcccaaaccctatctgccggtggagcgcttccccgaactgcaggcgctgaccgccaattgggagaagatccgcgaagaggcggtggccctgtacgaccgcggcaacatcaaggcctcggacaagtacgacgatctgggcttcaattccttcttcaagaccggctggaagcgcttctacctgaagtggtacggccaggaccacccgtccgcccaggcgttgtgcccgtacaccaccgagctgttgaagcagtttcccaacatcaaggcggcgatgttcaccgcgctgccgcccggcagccgcctggtgcgccaccgcgacccgttcgccggatcggtgcgctaccacctgggcctgatcacgcccaacgacgaccgctgctatatcgacgtggacggccagcagtacagctggcgcgacggcgaggcggtgatcttcgacgaaacctacctgcactacgcggagaacaccaccgaccaaaaccgcatcatcctgttctgcgacgtggagcggccgatgtggttctggccggcgcgggtggtcaaccgcatcgtcagccgggtgctggtgggcgcggccaattcgccgaacgaggccggcgaccgcgtcggcgcgctgaatcgcgccttccgctacatccagcaggtgcgattgctgggcaagaagatcaaggcgcaaagccgtttcgtctattacctgctgaagtggctgatcctgggcggccccatcgtgctgtggttgttctggggcgcgtggcgctga

SEQ ID NO: 6045 - protein, 306 aa, Chromobacterium violaceum ATCC 12472
MPYFKILVVAVFVLSTLYVHFRGRVRLGFWRQLSDHSTIMAPINCFMYLFSKVPPKPYLPVERFPELQALTANWEKIREEAVALYDRGNIKASDKYDDLGFNSFFKTGWKRFYLKWYGQDHPSAQALCPYTTELLKQFPNIKAAMFTALPPGSRLVRHRDPFAGSVRYHLGLITPNDDRCYIDVDGQQYSWRDGEAVIFDETYLHYAENTTDQNRIILFCDVERPMWFWPARVVNRIVSRVLVGAANSPNEAGDRVGALNRAFRYIQQVRLLGKKIKAQSRFVYYLLKWLILGGPIVLWLFWGAWR

SEQ ID NO: 6046 - DNA, 543 bp, Gloeobacter violaceus PCC 7421
  CDS (1)..(543): transl_table=11
atgtttctcgataccaaagattacccttttgcagcgcacctggaggccaactggcgggtcatcctggccgaactgcagcaactggacaatcaaaacttttttgcctggcccgaaaagcagtactacggcgaggggtgggacatctttgcgctctacacctacggggtgcccctcggcaaaaattgcaaactctgtccgcaaacagccgcgctggtcaagaaaatccccggcatgatgacggcggtgttctcccgaatggcccccggcttgcacatcgccccgcaccggggcgaaccggcggggctattgcgctaccacatgggccttatcatcccccccggctgtggtttgcgcgtcggccccgagacgcgcagcgtccaggaaggcggcagcattgtcttcgacgacaccaccgaacacgaggcctggaaccgcagcgaccgcgaacgcatcgtcctgctggtggattttaaatcccccaacgccaagcagggcttcaccctcgccagcatgttccaacgcctcaggggcagcaaaggttag

SEQ ID NO: 6047 - protein, 180 aa, Gloeobacter violaceus PCC 7421
MFLDTKDYPFAAHLEANWRVILAELQQLDNQNFFAWPEKQYYGEGWDIFALYTYGVPLGKNCKLCPQTAALVKKIPGMMTAVFSRMAPGLHIAPHRGEPAGLLRYHMGLIIPPGCGLRVGPETRSVQEGGSIVFDDTTEHEAWNRSDRERIVLLVDFKSPNAKQGFTLASMFQRLRGSKG

SEQ ID NO: 6048 - DNA, 714 bp, Gloeobacter violaceus PCC 7421
  CDS (1)..(714): transl_table=11
atggacaaacgcgctttgcgacttgataaatcactgggtcggcttcaaggcaacttgatcaatcgcttcagttgcgatgcagatacccgtttttttgaaccgaaccagtttccttgggtagcagatctcgaatcgaattggaaaataattcggcgcgacctggacgaagcgctcctggagcaggagcaaataccatatttttcagatttatcacagcggcagtcccggttttccggcacagcatggaaatctgtaatgttctacgtttacggtcgcagggttgacgaaaactgcagacgctttgtgcagacagcggctctgctgcaacgggttccgggcctgaaccttgcaatgttctctatcctgggcggacacgcacacattcctcctcacctcgggccatgcaagggtgtgctgcgctatcacctgggtctcatcattccggtagaagatgagcggtgcgccattcgcgtcgacaacgaagtccgttcgtggaaagagggcaaaagcctgctctttgacgacacgtttgagcacgaagtctggaaccgtgacccgcgctgccgtgcggtactgatgctcgactttctcaggccgcttcctccatggctttcggcaatcaaccgcggcattatcgctgctgctgggcaatttaaagcagtcaaagacttccagggcaatgccaatcgctacgcgcggggtaaagtacaatga

SEQ ID NO: 6049 - protein, 237 aa, Gloeobacter violaceus PCC 7421
MDKRALRLDKSLGRLQGNLINRFSCDADTRFFEPNQFPWVADLESNWKIIRRDLDEALLEQEQIPYFSDLSQRQSRFSGTAWKSVMFYVYGRRVDENCRRFVQTAALLQRVPGLNLAMFSILGGHAHIPPHLGPCKGVLRYHLGLIIPVEDERCAIRVDNEVRSWKEGKSLLFDDTFEHEVWNRDPRCRAVLMLDFLRPLPPWLSAINRGIIAAAGQFKAVKDFQGNANRYARGKVQ

SEQ ID NO: 6050 - DNA, 558 bp, Gloeobacter violaceus PCC 7421
  CDS (1)..(558): transl_table=11
ttgtactacgacgcgggacaattcggattcgttgcgcaactggagacccactggcaggctatccgccaggaacttgaacatttaggtgacggcgactttatcgcctggcccgaaaaatatttgtatggtcagggctgggacatttttggcctctatgccttcgggatcaaagtcggcgccaactgcaaactttgtcccgagacgacccggctggtcaatcagatccccggtctgatgagcgccggtttttcttcgctcaagccgggcacccatatcgccccgcacaccggttatccggacggtctgttgcggtgtcatctgggactgatcgtcccggacgagagcgcgctgcgggtgggggaggcggtgcgaagctggcaggaaggccgctgtctggtttttgacgacaccaccgagcacgaagcctggaatcggggaagctttacccgtattgtgctgctgctggatttcaaggctccggcaggtttgctctttgcgccggtaaaacccgaaagcaagggtctagcttcgttgttcgggttgctgaaaaaaaaatag

SEQ ID NO: 6051 - protein, 185 aa, Gloeobacter violaceus PCC 7421
MYYDAGQFGFVAQLETHWQAIRQELEHLGDGDFIAWPEKYLYGQGWDIFGLYAFGIKVGANCKLCPETTRLVNQIPGLMSAGFSSLKPGTHIAPHTGYPDGLLRCHLGLIVPDESALRVGEAVRSWQEGRCLVFDDTTEHEAWNRGSFTRIVLLLDFKAPAGLLFAPVKPESKGLASLFGLLKKK

SEQ ID NO: 6052 - DNA, 915 bp, Acinetobacter sp. ADP1
  CDS (1)..(915): transl_table=11
atgattaagtggatcatattagcgatttttgtgatatcagccttgtatatccagcatcgcggcaaagttcgtcattcgttttatcgtcagttctttgatcattcgacgttacttgcgcccatcaattttctgatgtacatgttttcaaaagtgcctaatcagccttatattgaaactcaacatttcaaggatttgaaaatactggatgaaaattgggaaatgattcgcgatgaagccagagcattgtatgatcagggcgggatcaaggcttcaagtacttataacgatcttggtttcaattcattttttaaaactggctggaaacgattttatctaaaatggtacgactctgcgcatccttctgcggctgagctctgtccaaaaacaacggcactattaaaaacattgccatctattaaggcggcgatgtttaccgagcttgcacccaatagtcgtctggttcgtcatcgtgatccttatgcaggttcattacgctatcatttgggtttgatcacgcccaatgatgatcgttgctttatcgatgtagatggacagcgttattcatggcgtgatggggaaagtgtggtgtttgatgaaacgtatattcattatgctgaaaataccacagaccaaaaccggattattttctttgctgacgttgaacgtcctttaaaaacaaggcttatggaaaagtttaaccactggtttggtaaaaatgtaatgacggctgcaagttctccaaacgagacaggtgataaaactggtggtcttaataaagcctttggttatatttatcagattcgtatcaaagccaaagcattaaaagccaaaaaccgtaaactgtattacttcttgaagtggtttctcatgcttggaatctttttcctgatttttgtacgtccttatgtgttttaa

SEQ ID NO: 6053 - protein, 304 aa, Acinetobacter sp. ADP1
MIKWIILAIFVISALYIQHRGKVRHSFYRQFFDHSTLLAPINFLMYMFSKVPNQPYIETQHFKDLKILDENWEMIRDEARALYDQGGIKASSTYNDLGFNSFFKTGWKRFYLKWYDSAHPSAAELCPKTTALLKTLPSIKAAMFTELAPNSRLVRHRDPYAGSLRYHLGLITPNDDRCFIDVDGQRYSWRDGESVVFDETYIHYAENTTDQNRIIFFADVERPLKTRLMEKFNHWFGKNVMTAASSPNETGDKTGGLNKAFGYIYQIRIKAKALKAKNRKLYYFLKWFLMLGIFFLIFVRPYVF

SEQ ID NO: 6054 - DNA, 720 bp, Legionella pneumophila subsp. pneumophila str. Philadelphia 1
  CDS (1)..(720): transl_table=11
atggtagactatcattatttcaagagtaaattgaatcacttttatgggcgctatgtaggatataatcaacgcccggttttttttgatattgatcaaactttcccagaattaaatcacataacacgccattttcccgatatcaaaagggaattcgaaaatgtacaagcgaatgtaaaagaatttccacgctaccacgacatagatcccggagagtctgccatatcaaacactacagaaaaaaactggaatgtttttatgctgtatcttcttggttatcaactcaaggaagcacgtttattatgcccggaactttgtaatttattggaaggaataccccatcttatacaagcttttttctcgattttagaacctggaaaatctattcccctccatgaaggcccctatattggctatctaagatatcatttaggaattcatgttccccaaaacaatccaccacaaattttagttaataaccaaacttatacctggaaagaaggagaagcagtactttttgatgactcctggccacatgaagtaagaaataccagtgatgattatcgtgccgtattaatcattgatgtcttgcgccctatgcccttcttgccgcaactggtcaatcaatttgtaacccacgtcattgctcgatatttttatggtcgcaaagtaatgaaacgcgcgatgcagtatggtggagaagtaaagcctttggcactttaa

SEQ ID NO: 6055 - protein, 239 aa, Legionella pneumophila subsp. pneumophila str. Philadelphia 1
MVDYHYFKSKLNHFYGRYVGYNQRPVFFDIDQTFPELNHITRHFPDIKREFENVQANVKEFPRYHDIDPGESAISNTTEKNWNVFMLYLLGYQLKEARLLCPELCNLLEGIPHLIQAFFSILEPGKSIPLHEGPYIGYLRYHLGIHVPQNNPPQILVNNQTYTWKEGEAVLFDDSWPHEVRNTSDDYRAVLIIDVLRPMPFLPQLVNQFVTHVIARYFYGRKVMKRAMQYGGEVKPLAL

SEQ ID NO: 6056 - DNA, 939 bp, Pseudomonas fluorescens Pf-5
  CDS (1)..(939): transl_table=11
atgagcttttcctttaccgccaaggtcgcggtgttgtcgctgttcgtcggcagcattctctacgtgcacctgcgcggcaaggcgcgtctgccggtactgcgccagttcgtcaaccattcggcgctgttcgccccctataacgccctgatgtacctgttctccggggtgccttccaagccgtacctggaccgcagcaagtttcccgagctggacatcctgcgggacaactgggaagtgatccgcgaagaggccatgcacctgttcgacgagggttacatccgcgccgccgagaagaacaacgatgccggtttcggttccttcttcaagaagggctggaagcgcttctacctcaagtggtacgacaagccgctgccctcggccgaggccctgtgcccgaagaccgtcgagctggtgagcgcgattcccaacgtcaagggcgcgatgttcgcgctgttgcccggcggcagccacctcaacccgcaccgcgatcccttcgccggttcgctgcgttatcacctgggcctgtcgacccccaactccgacgcctgccggatcttcgtcgatggccaggagtacgcctggcgcgacggtgaagacgtgatgttcgacgagacctacgtgcattgggtgaagaacgaaaccgagatcacccgggtgatcctgttctgcgacatcgagcgtccgctgagcagccgcctgatgacccgcatcaaccgttgggtcagcgcccaactgggccgcgccaccgcgccgcagaacctggatgacgagcgtgtcggcgggatcaaccaggcctacgcctggagcaagcgcttcagcgacagcttcagtggcgtggtcaagcagtggaagcgccgccatcccaagctgtaccgaatcctgcgcccggtgctggcagtggtggtgctggtagtcctgtggaagtggctgttcggataa

SEQ ID NO: 6057 - protein, 312 aa, Pseudomonas fluorescens Pf-5
MSFSFTAKVAVLSLFVGSILYVHLRGKARLPVLRQFVNHSALFAPYNALMYLFSGVPSKPYLDRSKFPELDILRDNWEVIREEAMHLFDEGYIRAAEKNNDAGFGSFFKKGWKRFYLKWYDKPLPSAEALCPKTVELVSAIPNVKGAMFALLPGGSHLNPHRDPFAGSLRYHLGLSTPNSDACRIFVDGQEYAWRDGEDVMFDETYVHWVKNETEITRVILFCDIERPLSSRLMTRINRWVSAQLGRATAPQNLDDERVGGINQAYAWSKRFSDSFSGVVKQWKRRHPKLYRILRPVLAVVVLVVLWKWLFG

SEQ ID NO: 6058 - DNA, 900 bp, Pseudomonas fluorescens Pf-5
  CDS (1)..(900): transl_table=11
gtgaaactcatcattgccgctgtatacgttttatccattgcgtacgtacacctgcgggggcgcgtgcgccataaactgggccgccagctcagcgatcactcgaccttcctggcgcccatcaactgcttcctctatctgttctccaagtaccccaaccggccgtacctggacccggccgacttcccggagatgaacaagctgcaggaacactgggaagagatccgtgccgaaggccagagcctgctgcaggccggcgagatcaagcgctcggaccagtacaacgatgtgggtttcaactccttcttcaagaccggctggaaacgcttctacctgaagtggtacggcgacagtcacccttcggcgatgaagctgtgcccacgcaccaccgagctggtgcagagtatcggttcgatcaaggctgcgatgttcgccgagctgccgcctggttcgcgcctggttcgtcaccgcgacccttatgccggttcctatcgctaccacctgggtctttccacgccgaacaacgaaggctgcttcatcgaggtcgacggtgagcgttatcactggcgcgacggcgaagcggtgatgttcgacgagacctacattcactacgcggaaaacaccaccgagcagaaccgcatcattctgttctgcgatgtcgagcggccgatgaagtaccgctgggccgctgcgttcaatggctggttcagccgtaccgtgatgtccgccgccggcgcgcccaacgatgccggtgacaagactggtggcctgaaccgtgccttcaacaagctgtacaagatccgcttgcggggcaaagaactgaaaaagcgcaaccgcacgcgctactacctggaaaagtgggcgatcttcgctgcactgctgttgctgttcatctatatctga

SEQ ID NO: 6059 - protein, 299 aa, Pseudomonas fluorescens Pf-5
MKLIIAAVYVLSIAYVHLRGRVRHKLGRQLSDHSTFLAPINCFLYLFSKYPNRPYLDPADFPEMNKLQEHWEEIRAEGQSLLQAGEIKRSDQYNDVGFNSFFKTGWKRFYLKWYGDSHPSAMKLCPRTTELVQSIGSIKAAMFAELPPGSRLVRHRDPYAGSYRYHLGLSTPNNEGCFIEVDGERYHWRDGEAVMFDETYIHYAENTTEQNRIILFCDVERPMKYRWAAAFNGWFSRTVMSAAGAPNDAGDKTGGLNRAFNKLYKIRLRGKELKKRNRTRYYLEKWAIFAALLLLFIYI

SEQ ID NO: 6060 - DNA, 903 bp, Burkholderia xenovorans LB400
  CDS (1)..(903): transl_table=11
atgcggtggtttattcttatctggttcacagcgagtgccgcctatgtttcacggcgcggcacggtccgattcggattctggcggcaactatcagaccattcgacattcatggcaccggtcaattgcctctggtacatgctgtcgacactcaagtccaacgccttcatcgataaaaagctttttccggagctggcggcattacaggccaactggaaaaccatccgggacgaggcgctcgcagtagatgcggcacaaaagatatccgcgtcgagtaactataacgacattggcttcaactcgttctttaaaacgggttggcggcgcttttatctgaaatggtatgacgcgcctcatccctccgctgaagccctgtgtccggtcaccacgcggttgctgcaggatatccccaccgtcaaggccgccatgttcgcgcaattgccgccgggcgcgagtctcgttcgccatcgcgatccgtacgcgggatccattcgctatcaccttggactcgtcacgccggacgaccctaaatgctatatcgacgtagacggccagcactattactggcgcgacggcgaagccgtgctattcgacgaaacctatattcactacgcgaagaatgaaaccgataagtcgcgcatcgttcttttctgcgacatcgagcgtccaatgtactttcgctgggcggccgcgctcaatcgaatgttctccgccattctgcttcgcgcggcaacctcgccgaacgaagccggagatcgcaccggctttctgaatctcattttcaaatacctgtatgccgtgcggcggctcggcaagcgtatcaaggcatggcaccggccaacgtactacatgatcaaatggattctgttcggcgcgattatcgtaggtctattcgccgcgttgtaa

SEQ ID NO: 6061 - protein, 300 aa, Burkholderia xenovorans LB400
MRWFILIWFTASAAYVSRRGTVRFGFWRQLSDHSTFMAPVNCLWYMLSTLKSNAFIDKKLFPELAALQANWKTIRDEALAVDAAQKISASSNYNDIGFNSFFKTGWRRFYLKWYDAPHPSAEALCPVTTRLLQDIPTVKAAMFAQLPPGASLVRHRDPYAGSIRYHLGLVTPDDPKCYIDVDGQHYYWRDGEAVLFDETYIHYAKNETDKSRIVLFCDIERPMYFRWAAALNRMFSAILLRAATSPNEAGDRTGFLNLIFKYLYAVRRLGKRIKAWHRPTYYMIKWILFGAIIVGLFAAL

SEQ ID NO: 6062 - DNA, 789 bp, Mesorhizobium sp. BNC1
  CDS (1)..(789): transl_table=11
atgatgaacaatgttcagcaaaagcgcactcaaggtgtcgacgacctgatggcgcggccggggctgggctatcgcatcggccaggcaatcgtggactgggccgaacggttgaacctaaaatatgcggtgaccggcagtccgccggtctatgataacgaaaccttcccatgggcggcggagatcgaacgtgagtggacgctgatccgggccgagctcgaccgggttctcgtgcgcaaggacgaactgcccggcttccatgagatcgtgtcggaagtgcgctccatctcaacggatcgtaactggaagtctttcgtattctgcggctatggctcggtctcagaagatgccgtcagcacatgtccggaaacatggcgcatcctgcaaaggatcccgggtctgaaggcggccatgttttccatctttgagcccggcaagcacctgaagccccaccgcgggccatataatggcgttctgcggctgcatctcggcctcaaggtacccgccgagcgggacaaggtggcgattcgtgtcgccgaccaggtctgccactggaaggagggcaaggtcctgatcttcgacgatgcgtatgagcatgaagcctggaaccattccagcgaaacacgcgtggtgctgttcgtcgatttcgtgaagccaacgcgcttcccggcaagcctggtgaactggcttctcctgaatcttgcccctttcacgccgttcgtgcgggaagggtacaaggcacagaagcgctgggagaagctgttcttcgccggtggtaatctgccgcgatga

SEQ ID NO: 6063 - protein, 262 aa, Mesorhizobium sp. BNC1
MMNNVQQKRTQGVDDLMARPGLGYRIGQAIVDWAERLNLKYAVTGSPPVYDNETFPWAAEIEREWTLIRAELDRVLVRKDELPGFHEIVSEVRSISTDRNWKSFVFCGYGSVSEDAVSTCPETWRILQRIPGLKAAMFSIFEPGKHLKPHRGPYNGVLRLHLGLKVPAERDKVAIRVADQVCHWKEGKVLIFDDAYEHEAWNHSSETRVVLFVDFVKPTRFPASLVNWLLLNLAPFTPFVREGYKAQKRWEKLFFAGGNLPR

SEQ ID NO: 6064 - DNA, 804 bp, Trichodesmium erythraeum IMS101
  CDS (1)..(804): transl_table=11
atgcttcaactttctttagaaaatataaaggcaaaatttaggaaaatattaatatataaaattggagccaaattacttggatattatgaaaagctaattcctagttattccttaattggcaatacagcatttttggaacctcaccactttgagtgggtgaacgagatagatgcaaattggatattgattagaaaggaattagatgaactcctcaaatatcgagatgatttacccaattttcaagatatttctccagaccaagctgattatactagccctgacgatttgtggaaaacatattttatgtatgggtatggaattaaagcagaaaaaaattgtcaaagatgcccagaaacaactcgtttaattgaaaaaattccgggaatgaaaactgcattcttttcgattttaatgcctggtaaacatattccggaacaccgaggtccatacaaaggagttattcgttatttattagcattaaaagtacctgaaccaaaagaaaaatgtcgtattcgcgtcggaaatgaaactcgtcattgggaagaaggaaagagtatgatttttgatgattcttttcctcatgaagcttggaatgaaactgatggtgttcgtgctgttttatttttagatgtcatgagaccaatgcgttttcctctttcatttttgaatgaattaatgatgaaaataattgcaatttctccctatattcaagatgcaaatattaatcagaaacactgggaagaccgtttagaaaaattgtttggcaaggaaaatcaaaaagaaaaagtttcatcatcaacctaa

SEQ ID NO: 6065 - protein, 267 aa, Trichodesmium erythraeum IMS101
MLQLSLENIKAKFRKILIYKIGAKLLGYYEKLIPSYSLIGNTAFLEPHHFEWVNEIDANWILIRKELDELLKYRDDLPNFQDISPDQADYTSPDDLWKTYFMYGYGIKAEKNCQRCPETTRLIEKIPGMKTAFFSILMPGKHIPEHRGPYKGVIRYLLALKVPEPKEKCRIRVGNETRHWEEGKSMIFDDSFPHEAWNETDGVRAVLFLDVMRPMRFPLSFLNELMMKIIAISPYIQDANINQKHWEDRLEKLFGKENQKEKVSSST

SEQ ID NO: 6066 - DNA, 777 bp, Erythrobacter sp. NAP1
  CDS (1)..(777): transl_table=11
ttggcctggcaagacaccctcaacgcgcgcggatggaaaatcccgttcgtgggcaagtcgctgttccagatcggcaaggaactgcgcccgaagatcgatgcgatcatcatggaaaactccaagattcccgacgctgcgatccaggacaagaagaactttccctggatggaaaagctagaggcgcgctggacggatatccgcgacgaagccgtgcgcatccgcgcgcaggacattccctcgctgggcgagatttcgttcgatcatggccgcattggcaaagacaagcgctggcgcgcgttcttcctcaagggctatggctacacgatggaaaccaacgccgcgcgcgccccgataacgtcgaagctgctcgacgaggtgccggggctggtgacggcgaatttctccgtgctcgaagcaggcggtcatattccgcgacactggggcatgaccaagggcatgcttacctatcacctcgcgctgaaatctccggccgagaccgagaagtgccgcatgcaccttgaggaaggcgagacaacccacgtcctcaattggcgcgatggcgaaagcttcgtgttcgacgacatgttcaaccacgaggtctggaacgagaccgacgaggatcgatacgtccttctgatccagatcaagcgcccgtgccgttggaagggcaatgcgatccagaacctgttcctgttcggcgtgcgcaattcgcgcttcgtgcaggacatcaagaaggcgatcgaaagcgcggcgaagaagcgcgagacggcggcctga

SEQ ID NO: 6067 - protein, 258 aa, Erythrobacter sp. NAP1
MAWQDTLNARGWKIPFVGKSLFQIGKELRPKIDAIIMENSKIPDAAIQDKKNFPWMEKLEARWTDIRDEAVRIRAQDIPSLGEISFDHGRIGKDKRWRAFFLKGYGYTMETNAARAPITSKLLDEVPGLVTANFSVLEAGGHIPRHWGMTKGMLTYHLALKSPAETEKCRMHLEEGETTHVLNWRDGESFVFDDMFNHEVWNETDEDRYVLLIQIKRPCRWKGNAIQNLFLFGVRNSRFVQDIKKAIESAAKKRETAA

SEQ ID NO: 6068 - DNA, 846 bp, Rhizobium tropici
  CDS (1)..(846): transl_table=11
atgacggagagtcccttgagcgcacctgctcccacttccaaccaatctcctgctccggaacagaccttcggcacggccggtatcgcgccgatggatcgcccgagcgccatgacgcgcttcttcatgagcatcgttgcctgggccgaaagcctcaatctgaaatatgccaagctcggcaatccgccggtctatgacaccgcgactttcccctgggcggccgagatcgagaaagattatccggccatccgcgccgagctcgaaaaggttctgctgcgccagagcgagctgccgactttccaggacatctccaccgacgtgaagaccatttccaccgacacccgctggaagaccttcttcctcctcggtttcggcgtgaaatccgagcagaacatcaaggcgtgcccgaatacctgggcggccgtgcagaagattccggggctgacgacggcgatgttctcgatcttcgagccgggcaagcatcttcccgcgcatcgcggcccctataatggcgtgctgcgcctgcatctcggcctcatcgtgccggagccgaatgacaagcttgccatccgcgtcgacaatcaggtttgccactggcaggaaggcaaggcgctgattttcgacgacgcctatgagcacgaagcctggaaccacaccgacaagacccgcgtggtgcttttcgtcgatttcgtcaaaccgctgaaatccccggcccgtttcgtcaactgggccttgatgaacctggcgatcttcacgcccttcatcaaggaaggtctcgataatcacaaggaatgggaaaagaagttctacgccgaagccgaggcgttcagaaaccgcccgaagccctga

SEQ ID NO: 6069 - protein, 281 aa, Rhizobium tropici
MTESPLSAPAPTSNQSPAPEQTFGTAGIAPMDRPSAMTRFFMSIVAWAESLNLKYAKLGNPPVYDTATFPWAAEIEKDYPAIRAELEKVLLRQSELPTFQDISTDVKTISTDTRWKTFFLLGFGVKSEQNIKACPNTWAAVQKIPGLTTAMFSIFEPGKHLPAHRGPYNGVLRLHLGLIVPEPNDKLAIRVDNQVCHWQEGKALIFDDAYEHEAWNHTDKTRVVLFVDFVKPLKSPARFVNWALMNLAIFTPFIKEGLDNHKEWEKKFYAEAEAFRNRPKP

SEQ ID NO: 6070 - DNA, 22 bp, Artificial sequence
  primer
atgcataaacgccttacatatc

SEQ ID NO: 6071 - DNA, 21 bp, Artificial sequence
  primer
ttagcgctccagtccctcttc

SEQ ID NO: 6072 - protein, 170 aa, Artificial sequence
  consensus sequence
  Variant (2)..(10): Xaa in position 2 to 10 is any amino acid
  Variant (12)..(13): Xaa in position 12 to 13 is any amino acid
  Variant (16)..(16): Xaa in position 16 is any amino acid
  Variant (18)..(38): Xaa in position 18 to 38 is any amino acid
  Variant (39)..(48): Xaa in position 39 to 48 is any or no amino acid
  Variant (50)..(51): Xaa in position 50 to 51 is any amino acid
  Variant (53)..(53): Xaa in position 53 is any amino acid
  Variant (55)..(56): Xaa in position 55 to 56 is any amino acid
  Variant (58)..(67): Xaa in position 58 to 67 is any amino acid
  Variant (70)..(70): Xaa in position 70 is any amino acid
  Variant (72)..(73): Xaa in position 72 to 73 is any amino acid
  Variant (75)..(78): Xaa in position 75 to 78 is any amino acid
  Variant (80)..(83): Xaa in position 80 to 83 is any amino acid
  Variant (85)..(85): Xaa in position 85 is any amino acid
  Variant (87)..(88): Xaa in position 87 to 88 is any amino acid
  Variant (90)..(90): Xaa in position 90 is any amino acid
  Variant (93)..(97): Xaa in position 93 to 97 is any amino acid
  Variant (99)..(100): Xaa in position 99 to 100 is any amino acid
  Variant (102)..(103): Xaa in position 102 to 103 is any amino acid
  Variant (105)..(106): Xaa in position 105 to 106 is any amino acid
  Variant (108)..(108): Xaa in position 108 is any amino acid
  Variant (113)..(114): Xaa in position 113 to 114 is any amino acid
  Variant (116)..(119): Xaa in position 116 to 119 is any amino acid
  Variant (120)..(122): Xaa in position 120 to 122 is any or no amino acid
  Variant (124)..(124): Xaa in position 124 is any amino acid
  Variant (126)..(131): Xaa in position 126 to 131 is any amino acid
  Variant (132)..(135): Xaa in position 132 to 135 is any or no amino acid
  Variant (137)..(138): Xaa in position 137 to 138 is any amino acid
  Variant (140)..(143): Xaa in position 140 to 143 is any amino acid
  Variant (146)..(149): Xaa in position 146 to 149 is any amino acid
  Variant (151)..(153): Xaa in position 151 to 153 is any amino acid
  Variant (155)..(159): Xaa in position 155 to 159 is any amino acid
  Variant (161)..(162): Xaa in position 161 to 162 is any amino acid
  Variant (164)..(165): Xaa in position 164 to 165 is any amino acid
  Variant (167)..(169): Xaa in position 167 to 169 is any amino acid
FXXXXXXXXXWXXIRXEXXXXXXXXXXXXXXXXXXXXXXXXXXXXXXXWXXFXLXXYXXXXXXXXXXCPXTXXLXXXXPXXXXAXFXXLXPGXXXXXHXXPXXGXXRXHLGLXXPXXXXXXXIXVXXXXXXXXXXWXXGXXXXFDXXXXHXXXNXXXXXRXXLXXDXXXP

SEQ ID NO: 6073 - protein, 24 aa, Artificial sequence
  protein pattern
  Variant (2)..(2): Xaa in position 2 is any amino acid
  Variant (4)..(4): Xaa in position 4 is Ala, Asp, Gly or Asn
  Variant (5)..(5): Xaa in position 5 is any amino acid
  Variant (6)..(6): Xaa in position 6 is Glu or Gln
  Variant (7)..(9): Xaa in position 7 to 9 is any amino acid
  Variant (11)..(11): Xaa in position 11 is any amino acid
  Variant (12)..(12): Xaa in position 12 is Asp, Glu or Pro
  Variant (14)..(14): Xaa in position 14 is Glu or Lys
  Variant (15)..(15): Xaa in position 15 is Ala, Cys, Asp, Ser or Val
  Variant (16)..(16): Xaa in position 16 is Leu, Met or Val
  Variant (17)..(17): Xaa in position 17 is Ile, Leu, Met or Val
  Variant (20)..(20): Xaa in position 20 is Asp or Glu
  Variant (21)..(21): Xaa in position 21 is Ala, Ser or Thr
  Variant (22)..(22): Xaa in position 22 is Phe, Trp or Tyr
  Variant (23)..(23): Xaa in position 23 is any amino acid
IXVXXXXXXWXXGXXXXFDXXXXH

SEQ ID NO: 6074 - protein, 17 aa, Artificial sequence
  protein pattern
  Variant (2)..(2): Xaa in position 2 is any amino acid
  Variant (3)..(3): Xaa in position 3 is Gly, Ser or Thr
  Variant (4)..(4): Xaa in position 4 is Asp, Glu or Ser
  Variant (5)..(6): Xaa in position 5 to 6 is any amino acid
  Variant (8)..(8): Xaa in position 8 is Ala, Ile or Val
  Variant (9)..(9): Xaa in position 9 is Ile or Val
  Variant (11)..(11): Xaa in position 11 is Phe, Ile or Leu
  Variant (12)..(12): Xaa in position 12 is any amino acid
  Variant (14)..(14): Xaa in position 14 is Phe, Ile or Val
  Variant (15)..(16): Xaa in position 15 to 16 is any amino acid
NXXXXXRXXLXXDXXXP

SEQ ID NO: 6075 - DNA, 2832 bp, Azotobacter vinelandii
  CDS (1)..(2832): transl_table=11
atgcaagatagcgttatgcagcgcatgtggaacagtgcccacctttccggtggaaatgctgcttatgtggaagagctctatgagctttacctgcacgaccccaacgctgtgcccgaagagtggcgcacctatttcgagaagctgcccgccgaagccggtacctccaccgatgttccgcacgctcccgtccgcgaccagttcgttctgctggccaagaaccagcggcgtgcacagccggtcgcaacctccagcgtaagcaccgaacacgagaagaagcaggtcgaagtcctgcgtctgatccaggcttaccgcacgcgcggccatcaggcctcgcaactggatccgctcggtctgtggcagcgcactgcgccttccgacctgtcgatcacccattacgggctgaccaacgccgatctggatacccccttccgtaccggagagctctacatcggtaaggaagaggcgaccctacgcgaaatcctgcaggcattgcaggagacatattgccgcactatcggcgccgaattcacccatatcgtcgattccgagcagcgcaactggttcgcccagcgcctggaaagcgtacgcggtcgtccggtgtactccaaggaggcgaaaagccacctgctcgagcgcctgagcgctgccgaaggcctggaaaaatacctgggcaccaaatatccgggcaccaagcgcttcggtttggaaggcggcgagagcctggtgccggtcgtcgacgagatcatccagcgctcaggctcctacggcaccaaggaagtcgtcatcggcatggctcaccgcggccgtctgaacctgctggtcaacgcgctgggcaagaatccacgcgacctgttcgacgagttcgaaggcaagcatctggtcgaactgggctccggtgacgtgaagtaccaccagggcttctcctccaacgtgatgacctcgggtggcgaagtgcacctggccatggcgttcaacccctcgcacctggaaatcgtctccccggtggtcgagggctccgtgcgtgcccgccaggaccgtcgcgtcgacgctaccggcgagaaggtggtaccgatctccatccacggcgactcggcctttgccggtcagggcgtggtgatggaaaccttccagatgtcgcagatccgcggctacaagacgggcggtaccattcacatcgtggtcaacaaccaggtcggcttcaccaccagtaacccggtcgacacccgttcgaccgagtactgcaccgatccggcgaagatgattcaggcgccggtactgcacgtcaacggcgacgatccggaagccgtgctgttcgtgacccaactggccgtcgactatcgcatgcagttcaagcgcgacgtagtcatcgatctggtctgctaccgccgtcgcggtcacaacgaggccgacgagccgagcggcacccagccgctgatgtaccagaagatcgccaagcagcccaccacccgcgagctgtatgccgacgcgctggtcaaggagggcagcctgagccaggaagaagtccaggccaaggtcgacgaataccgtaccgcgctggataacggtcagcacgtgctcaagagcctggtcaaggagccgaacaccgagctgttcgtcgactggaccccctatctgggccatgcctggaccgctcgtcacgacaccagcttcgagctgaagaccctgcaggaactgaacgccaagctgctgcagatcccggaaggtttcgtggtccagcgccaggttgccaagatcctcgaggatcgcggccgcatgggcgtcggcgccatgccgatcaactggggctgcgccgagaccctggcctacgccactctgctgaaggaaggccatccggtacgcatcaccggtcaggacgtcggccgtggcaccttctcgcaccgccatgccgcgctgcacaaccagaaggatgccagccgctacatcccgctgcagaacctctacgagggacagccgaagttcgagctgtatgattccttcctctcggaagaggccgtgctggccttcgaatacggctatgccaccaccacgccgaacgcgctggtgatctgggaagcccagttcggcgacttcgccaacggtgcccaggtggtgatcgaccagttcatcagcagcggcgagaccaagtggggacgcctgtgcggcctgaccatgctgctgccgcacggctacgagggccagggtccggagcactcttccgcacgtctggagcgctacctgcaactgtgcgccgagcagaacatccaggtctgcgtgccgaccaccccggcgcaggtctaccacatgctgcgtcgccaggtgatccgcccgctgcgcaagccgctggtggccttgacgccgaagtcgctgctgcgtcacaaatcggcgatctccaccctggaagatctggctctcggctccttccatccggtcctgccggaggtcgatagcctcgatccgaagaaggtcgagcgtctggtcctgtgcagcggcaaggtctactacgacctgctggacaagcgccatgccgaaggtcgcgaggacatcgccatcgtccgtatcgagcagctctatccgttcccggaagaggaactggccgaggtcatggcgccgtacaccaacctcaagcatgtggtctggtgtcaggaagagccgatgaaccagggcgcctggtactgcagtcagcatcacatgcgtcgcgtcgccagcgcgcacaagaaggagctgttcctccagtatgctggtcgcgaggcgtcggccgctccggcttgcggttacgcgtcgatgcatgccgagcagcaggaaaaactgctgcaggacgctttcactgtttaa

SEQ ID NO: 6076 - protein, 943 aa, Azotobacter vinelandii
MQDSVMQRMWNSAHLSGGNAAYVEELYELYLHDPNAVPEEWRTYFEKLPAEAGTSTDVPHAPVRDQFVLLAKNQRRAQPVATSSVSTEHEKKQVEVLRLIQAYRTRGHQASQLDPLGLWQRTAPSDLSITHYGLTNADLDTPFRTGELYIGKEEATLREILQALQETYCRTIGAEFTHIVDSEQRNWFAQRLESVRGRPVYSKEAKSHLLERLSAAEGLEKYLGTKYPGTKRFGLEGGESLVPVVDEIIQRSGSYGTKEVVIGMAHRGRLNLLVNALGKNPRDLFDEFEGKHLVELGSGDVKYHQGFSSNVMTSGGEVHLAMAFNPSHLEIVSPVVEGSVRARQDRRVDATGEKVVPISIHGDSAFAGQGVVMETFQMSQIRGYKTGGTIHIVVNNQVGFTTSNPVDTRSTEYCTDPAKMIQAPVLHVNGDDPEAVLFVTQLAVDYRMQFKRDVVIDLVCYRRRGHNEADEPSGTQPLMYQKIAKQPTTRELYADALVKEGSLSQEEVQAKVDEYRTALDNGQHVLKSLVKEPNTELFVDWTPYLGHAWTARHDTSFELKTLQELNAKLLQIPEGFVVQRQVAKILEDRGRMGVGAMPINWGCAETLAYATLLKEGHPVRITGQDVGRGTFSHRHAALHNQKDASRYIPLQNLYEGQPKFELYDSFLSEEAVLAFEYGYATTTPNALVIWEAQFGDFANGAQVVIDQFISSGETKWGRLCGLTMLLPHGYEGQGPEHSSARLERYLQLCAEQNIQVCVPTTPAQVYHMLRRQVIRPLRKPLVALTPKSLLRHKSAISTLEDLALGSFHPVLPEVDSLDPKKVERLVLCSGKVYYDLLDKRHAEGREDIAIVRIEQLYPFPEEELAEVMAPYTNLKHVVWCQEEPMNQGAWYCSQHHMRRVASAHKKELFLQYAGREASAAPACGYASMHAEQQEKLLQDAFTV

SEQ ID NO: 6077 - DNA, 3612 bp, Oryza sativa
  CDS (275)..(3325)
gctctctctctctctctctctctctctctcgccaaccaatctcctcccccctcctttcctcctcctcccgaaccaccggaatccgacgcggcgccgccgcgccaccccgttccgccggctctcttcctcacctctcctccccaggagatcgtcaatctcctcggtcaggtgtttgatcgattgcctgtgggaagcatatgggcggttagattcgtgaagttgagaggaatcagaagacgggaattgtttgaggggactgaatttgatctggaaaatggggtggtttcgggctgcgtccggattggctcgggtggcgctgaggaggaacctggcgcgtgctccggcgaacccttttgccggtcctgcgccacggtacttccactccacccgcccccggcggttcgccgctcctgtgccccgcgccgtgccgctctcgcgcctcaccgacagcttccttgatggcaccagcagcgtgtaccttgaggagctccagagggcgtgggaggctgatcccacctctgtcgacgagtcctgggacaatttctttcggaactttgtcgggcaggctgcaacttcgcctggcatatctgggcagacaattcaggaaagcatgaggttgctgcttcttgtgcgagcgtaccaggtgagtggtcacctgaaggctaagcttgatcctctcgcgctagaggagcggcctatccctgatgttctggaccctgcgttctatgggttctctgaggctgatctggaccgggagttttttcttggtgtgtggaggatggctgggttcttgtcggagaatcgccctgtgcagacactccgttctgtgttggagcggcttgagcaagcttactgtggtaccattgggtatgagtacatgcacatacctgacagggagaaatgtaattggctgagggataggattgagacggtcaatgcaagggagtactcctacgaccgtcgccaggtcatgcttgataggctcatgtggagcactcagtttgagagcttcttggcacagaaatggacgaccgccaagcggtttggtcttgaaggtgcggagacactgatccctggcatgaaggagatgtttgacagggcagctgatcttggtgtagagagcattgtgattggtatgccacacagaggtaggctgaatgtcttgggaaatgtcgtgaggaagcccttgcgacagatcttcagtgagtttagtggtggtaccaagcctgccgaagaaggggagggcttgtatacagggactggagatgtcaaataccatctaggaacttcatacgataggcctaccagaggtggaaagcatatccatctgtctctggttgcaaacccaagtcatttggaagcagtcgatcctgttgttgctgggaagaccagagcaaaacagtactattctaatgatcttgacaggaccaagaatttaggagtcttgttgcatggtgatggaagcttctcagggcagggtgtagtgtatgaaaccctgcatctcagtgctcttccaaactacactactggtgggacaattcacattgtggtcaataatcaggttgctttcactactgatccaagggcagggaggtcttcgcagtattgcacagatgttgctaaagcattggatgctccaattttccatgtgaatggtgatgacttggaggcagtggttcatgtctgtgagcttgctgcggagtggcggcaaacatttcattctgatgttgtggtggatattgtatgctaccgccggtttgggcataacgagattgatgagccttccttcacccagcctaaaatgtacaagataattaggaaccaccagagtgctcttgagatataccaaaacagacttttagaatctgggaagatatccaaggaagatattgataagatgcagaagaaggtcagcactatcttgaatgatgaattccaaaacagcaaagaatatattcccaataagagagactggctctcagcttactggactggattcaagtcaccagaacagatttcacgaatccgaaatactggtgtcaagccagagattctaaaacgtgttggagaagccatgactactctgcctgaaaatttcaagccccacagggctgtcaaaaagatttttgagctgcgtcgtcagatgattgagacgggcgaaggcattgattgggctgttggtgaagcacttgcttttgcaactcttataattgagggaaaccatgttaggttaagtggtcaggatgttgagaggggtacattcagccaccgccatgctgttatccatgaccaggaaactggagagcaatactgtccgcttgataatcttgttatgaatcaagatgaggaactatttactgtaagcaacagttccctgtcagagtttgctgttttgggctttgaattgggctattccatggagaatccaaactcactggttttatgggaagcccagtttggtgatttttccaatggagctcaagtgatatttgatcagtttctgagtagtggagaggcaaaatggctccgccagaccggtcttgtcgtttgccttcctcacggatatgatggtcaggggcctaaacattccagtgcaaggttggagcgtttccttcagatgagtgatgacaacccttatgttattcctgagatggatccaactctgaggaagcaaatccagcagtgcaactggcaagttgtgaatgtcacaactcctgcaaactatttccatgtcctgcgtcgccagattcaccgggacttcagaaagcctttgattgttatgtctccaaagaatctccttcgacacaaggactgcaaatcgaatctttctgaatttgatgaccttgctggtcaccctggatttgacaagcaaggaacccggtttaagcgtctaattaaagatcagaacaaccataaggaccttgaggagggaatcaagcgtttagttctctgttctggaaaggtatattatgagttggacgaagaaagaagaaaaaaggagcgtgatgatgttgctatatgtagagttgaacagctctgtccattcccatatgacctcatccagcgcgagttgaagcgatatccaaatgccgagattgtttggtgccaagaggaacccatgaacatgggggcgtacagctacatcaatcctcgcctcctgaccgcgatgagggcgcttggtcggggcacgatagacgacatcaaatacgttggaagggccccatctgcagccaccgcaacaggtttctactccgtccatgtgcaggagcaaaccgagcttgtgcagaaggcactgcagcgagaccctatcaactctccattttgaacctgtagattttatttggatagccgtgggtaatcaaacctttgatccaacagcaaaattattgcctgtgcagccatttggtgaataatccgcttcggatgtttggtaccgcatgagagaaaccatttgaaacccatgttgggatgcatcattttgtgtttcttaacatcaaattaaaccaagttgcatccaatgcttacttgaggagtagaaataagtcgatgctgaatactgatcttccatgtttttgtgatactacattcttattactgcgcctttcaccatcc

SEQ ID NO: 6078 - protein, 1016 aa, Oryza sativa
MGWFRAASGLARVALRRNLARAPANPFAGPAPRYFHSTRPRRFAAPVPRAVPLSRLTDSFLDGTSSVYLEELQRAWEADPTSVDESWDNFFRNFVGQAATSPGISGQTIQESMRLLLLVRAYQVSGHLKAKLDPLALEERPIPDVLDPAFYGFSEADLDREFFLGVWRMAGFLSENRPVQTLRSVLERLEQAYCGTIGYEYMHIPDREKCNWLRDRIETVNAREYSYDRRQVMLDRLMWSTQFESFLAQKWTTAKRFGLEGAETLIPGMKEMFDRAADLGVESIVIGMPHRGRLNVLGNVVRKPLRQIFSEFSGGTKPAEEGEGLYTGTGDVKYHLGTSYDRPTRGGKHIHLSLVANPSHLEAVDPVVAGKTRAKQYYSNDLDRTKNLGVLLHGDGSFSGQGVVYETLHLSALPNYTTGGTIHIVVNNQVAFTTDPRAGRSSQYCTDVAKALDAPIFHVNGDDLEAVVHVCELAAEWRQTFHSDVVVDIVCYRRFGHNEIDEPSFTQPKMYKIIRNHQSALEIYQNRLLESGKISKEDIDKMQKKVSTILNDEFQNSKEYIPNKRDWLSAYWTGFKSPEQISRIRNTGVKPEILKRVGEAMTTLPENFKPHRAVKKIFELRRQMIETGEGIDWAVGEALAFATLIIEGNHVRLSGQDVERGTFSHRHAVIHDQETGEQYCPLDNLVMNQDEELFTVSNSSLSEFAVLGFELGYSMENPNSLVLWEAQFGDFSNGAQVIFDQFLSSGEAKWLRQTGLVVCLPHGYDGQGPKHSSARLERFLQMSDDNPYVIPEMDPTLRKQIQQCNWQVVNVTTPANYFHVLRRQIHRDFRKPLIVMSPKNLLRHKDCKSNLSEFDDLAGHPGFDKQGTRFKRLIKDQNNHKDLEEGIKRLVLCSGKVYYELDEERRKKERDDVAICRVEQLCPFPYDLIQRELKRYPNAEIVWCQEEPMNMGAYSYINPRLLTAMRALGRGTIDDIKYVGRAPSAATATGFYSVHVQEQTELVQKALQRDPINSPF

SEQ ID NO: 6079 - DNA, 3581 bp, Oryza sativa
  CDS (321)..(3371)
gacccaggcgttcgcccttatcgttgcgcgagcccttcttcttcctcctctctctctctctctctctctctctctcgccaaccaatctcctcccccctcctttcctcctcctcccgaaccaccggaatccgacgcggcgccgccgcgccaccccgttccgccggctctcttcctcacctctcctccccaggagatcgtcaatctcctcggtcaggtgtttgatcgattgcctgtgggaagcatatgggcggttagattcgtgaagttgagaggaatcagaagacgggaattgtttgaggggactgaatttgatctggaaaatggggtggtttcgggctgcgtcaggattggctcgggtggcgctgaggaggaacctggcgcgtgctccggcgaacccttttgccggtcctgcgccacggtacttccactccacccgcccccggcggttcgccgctcctgtgccccgcgccgtgccgctctcgcgcctcaccgacagcttccttgatggcaccagcagcgtgtaccttgaggagctccagagggcgtgggaggctgatcccacctctgtcgacgagtcctgggacaatttctttcggaactttgtcgggcaggctgcaacttcgcctggcatatctgggcagacaattcaggaaagcatgaggttgctgcttcttgtgcgagcgtaccaggtgagtggtcacctgaaggctaagcttgatcctctcgcgctagaggagcggcctatccctgatgttctggaccctgcgttctatgggttctctgaggctgatctggaccgggagttttttcttggtgtgtggaggatggctgggttcttgtcggagaatcgccctgtgcagacactccgttctgtgttggagcggcttgagcaagcttactgtggtaccattgggtatgagtacatgcacatacctgacagggagaaatgtaattggctgagggataggattgagacggtcaatgcaagggagtactcctacgaccgtcgccaggtcatgcttgataggctcatgtggagcactcagtttgagagcttcttggcacagaaatggacgaccgccaagcggtttggtcttgaaggtgcggagacactgatccctggcatgaaggagatgtttgacagggcagctgatcttggtgtagagagcattgtgattggtatgccacacagaggtaggctgaatgtcttgggaaatgtcgtgaggaagcccttgcgacagatcttcagtgagtttagtggtggtaccaagcctgccgaagaaggggagggcttgtatacagggactggagatgtcaaataccatctaggaacttcatacgataggcctaccagaggtggaaagcatatccatctgtctctggttgcaaacccaagccatttggaagcagtcgatcctgttgttgctgggaagaccagagcaaaacagtactattctaatgatcttgacaggaccaagagtttaggagtcttgttgcatggtgatggaagcttctcagggcagggtgtagtgtatgaaaccctgcatctcagtgctcttccaaactacactactggtgggacaattcacattgtggtcaataatcaggttgctttcactactgatccaagggcagggaggtcttcgcagtattgcacagatgttgctaaagcattggatgctccaattttccatgtgaatggtgatgacttggaggcagtggttcatgtctgtgagcttgctgcggagtggcggcaaacatttcattctgatgttgtggtggatattgtatgctaccgccggtttgggcataacgagattgatgagccttccttcacccagcctaaaatgtacaagataattaggaaccaccagagtgctcttgagatataccaaaacagacttttagaatctgggaagatatccaaggaagatattgataagatgcagaagaaggtcagcactatcttgaatgatgaattccaaaacagcaaagaatatattcccaataagagagactggctctcagcttactggactggattcaagtcaccagaacagatttcacgaatccgaaatactggtgtcaagccagagattctaaaacgtgttggagaagccatgactactctgcctgaaaatttcaagccccacagggctgtcaaaaagatttttgagctgcgtcgtcagatgattgagacgggcgaaggcattgattgggctgttggtgaagcacttgcttttgcaactcttataattgagggaaaccatgttaggttaagtggtcaggatgttgagaggggtacattcagccaccgccatgctgttatccatgaccaggaaactggagagcaatactgtccgcttgataatcttgttatgaatcaagatgaggaactatttactgtaagcaacagttccctgtcagagtttgctgttttgggctttgaattgggctattccatggagaatccaaactcactggttttatgggaagcccagtttggtgatttttccaatggagctcaagtgatatttgatcagtttctgagtagtggagaggcaaaatggctccgccagaccggtcttgtcgtttgccttcctcacggatatgatggtcaggggcctgaacattccagtgcaaggttggagcgtttccttcagatgagtgatgacaacccttatgttattcctgagatggatccaactctgaggaagcaaatccagcagtgcaactggcaagttgtgaatgtcacaactcctgcaaactatttccatgtcctgcgtcgccagattcaccgggacttcagaaagcctttgattgttatgtctccaaagaatctccttcgacacaaggactgcaaatcgaatctttctgaatttgatgaccttgctggtcaccctggatttgacaagcaaggaacccggtttaagcgtctaattaaagatcagaacaaccataaggaccttgaggagggaatcaagcgtttagttctctgttctggaaaggtatattatgagttggacgaagaaagaagaaaaaaggagcgtgatgatgttgctatatgtagagttgaacagctctgtccattcccatatgacctcatccagcgcgagttgaagcgatatccaaatgccgagattgtttggtgccaagaggaacccatgaacatgggggcgtacagctacatcaatcctcgcctcctgaccgcgatgagggcgcttggtcggggcacgatagacgacatcaaatacgttggaagggccccatctgcagccaccgcaacaggtttctactccgtccatgtgcaggagcaaaccgagcttgtgcagaaggcactgcagcgagaccctatcaactctccattttgaacctgtagattttatttggatagccgtgggtaatcaaacctttgatccaacagcaaaattattgcctgtgcagccatttggtgaataatccgcttcggatgtttggtaccgcatgagagaaaccatttgaaacccatgttgggatgcatcattttgtgtttcttaacatcaaattaaaccaagttgcatccaatgcttacttgaaatatt

SEQ ID NO: 6080 - protein, 1016 aa, Oryza sativa
MGWFRAASGLARVALRRNLARAPANPFAGPAPRYFHSTRPRRFAAPVPRAVPLSRLTDSFLDGTSSVYLEELQRAWEADPTSVDESWDNFFRNFVGQAATSPGISGQTIQESMRLLLLVRAYQVSGHLKAKLDPLALEERPIPDVLDPAFYGFSEADLDREFFLGVWRMAGFLSENRPVQTLRSVLERLEQAYCGTIGYEYMHIPDREKCNWLRDRIETVNAREYSYDRRQVMLDRLMWSTQFESFLAQKWTTAKRFGLEGAETLIPGMKEMFDRAADLGVESIVIGMPHRGRLNVLGNVVRKPLRQIFSEFSGGTKPAEEGEGLYTGTGDVKYHLGTSYDRPTRGGKHIHLSLVANPSHLEAVDPVVAGKTRAKQYYSNDLDRTKSLGVLLHGDGSFSGQGVVYETLHLSALPNYTTGGTIHIVVNNQVAFTTDPRAGRSSQYCTDVAKALDAPIFHVNGDDLEAVVHVCELAAEWRQTFHSDVVVDIVCYRRFGHNEIDEPSFTQPKMYKIIRNHQSALEIYQNRLLESGKISKEDIDKMQKKVSTILNDEFQNSKEYIPNKRDWLSAYWTGFKSPEQISRIRNTGVKPEILKRVGEAMTTLPENFKPHRAVKKIFELRRQMIETGEGIDWAVGEALAFATLIIEGNHVRLSGQDVERGTFSHRHAVIHDQETGEQYCPLDNLVMNQDEELFTVSNSSLSEFAVLGFELGYSMENPNSLVLWEAQFGDFSNGAQVIFDQFLSSGEAKWLRQTGLVVCLPHGYDGQGPEHSSARLERFLQMSDDNPYVIPEMDPTLRKQIQQCNWQVVNVTTPANYFHVLRRQIHRDFRKPLIVMSPKNLLRHKDCKSNLSEFDDLAGHPGFDKQGTRFKRLIKDQNNHKDLEEGIKRLVLCSGKVYYELDEERRKKERDDVAICRVEQLCPFPYDLIQRELKRYPNAEIVWCQEEPMNMGAYSYINPRLLTAMRALGRGTIDDIKYVGRAPSAATATGFYSVHVQEQTELVQKALQRDPINSPF

SEQ ID NO: 6081 - DNA, 3906 bp, Glycine max
  CDS (274)..(3351)
ggctcgagagaatgtgcagccagccaacgtggaaggaagccaagaaacctaaatcaattcaaaagcgttgaattttccatttttcccccataaaataacaaaaaaacaccctcaattctctatttactcgctttgcttcaacgccaccaggcctccttcttttctcattaccctagtttttctccattttcttcataattgaaccgtttctccccctcgactcgatcccatatgtgttgatagtgaaaggcatcgtcctcatcatcatctatcatggcatggtttagagctggagctagcatagcaaaacatgcaattaggagaactctttctaagggtggatccacacaccttgtgtcaagggcaagggtccttccatcgataccatcatcacatagcagaagcttccacagctcggttttcaaggagcaagctgcacctgttcctcgtgcggttcctctttcaaagctaacagatagtttcttagatggcacaagcagtgtgtatttggaggagcttcaaagggcttgggaggctgatcccaacagtgttgatgagtcatgggacaatttcttcaggaactttgtggggcaggccacaacctcacctgggatttctggtcaaacaattcatgagagcatgaggttgttgttgctggtgagggcgtaccaggttaatggccacatgaaggcgaagttggatcccttgaatctggaaccaagggaaatccctgaggatttggaccctgcactttatggcttcactgaggctgatcttgatagagagttcttcttgggggtgtggaggatggctggtttcttatctgagaaccgccccgtgcaaacccttagatccattttgacaaggcttgagcaggcttattgtggaagcattggatatgagtatatgcacattgctgatcgtcacaagtgtaattggcttagggataggattgagacccccacccctacacagtttaatagggagaggcgtgaggctatctttgataggcttgcttggagttccttgtttgagaacttcttggccaccaagtggacctctgcaaagaggtttggtcttgagggtggagagactcttattcccggaatgaaggaaatgtttgatagggcatctgatcttggggttgagagcatagttataggaatggcacatcgagggaggctgaatgttttggggaatgtggtaaggaagcccctgcggcagattttctgcgagtttagcggtggtcttcagcctgagggggaagttggactctacactggaactggagatgttaagtatcatttggggacatcgtatgatcgccctactaggggtggcaagaggattcatttgtctttggtggcaaatcctagtcacttggaagctgtcaatccgcttgttattgggaaaactcgagccaagcagtattacgcaaatgacgtggatagaacgaagaacatgggtgtgttgattcatggagatggaagttttgctggacagggtgtggtctatgaaaccctgcatttaagtgctcttccaaattacactactggtgggacgattcacatcgtgtttaacaatcaggttgcatttacaactgatccgacttctggcaggtcttcacaatattgcactgatgttgccaaggctttggatgctcccatctttcacgtgaatggtgatgatgttgaagcagttgttcatgcctgtgaacttgctgcagagtggcgccagactttccactctgatgtggttgtcgacttggtgtgttaccgtcgatttggccacaatgagattgatgaaccatctttcactcagcctaaaatgtacaaggtaatccgaagccatccatcaactcttgagatctatgagaagaaccttttggaatcaggggagttgacacaagaagaaattgataggatccacaagaaggtcacatcaattctaaatgaagaatttttggctagcaaagaatacattccaaaaagaagagattggctttcagcatattggcttggtttcaagtcacctgaacagctttcacgtatccgaaacactggtgtgaaaccagagatcttgaaaactgttggaaaagcaatcacaaccatccctgaaaatttcacacctcatagagcagtgaagaggatttatgaacaacgggcccaaatgattgaaactggggaagatattgactggggatttgcagaggcgcttgcttatgctaccttgcttattgaaggtaaccatgttcgattaagtggtcaggatgttgaaagaggaacttttagtcaccgccatgctgtagttcacgatcagacaacaggggagaaatattgtcccctggaccatgttataatgaaccaagacgaagagatgtttactgttagcaatagttcactttctgagtttggtgttcttggatttgaattgggttactcaatggaaaatcccaattcattgataatttgggaggctcagtttggtgattttgctaatggtgctcatgtgatatttgacaattttttggcttctggtgaggctaagtggcttcgtcagactgggcttgttgtgttacttcctcatggttatgatggccagggcccagagcattcaagtgcaagattggaacgctttcttcagatggctgatgacaaccctcatgttatccctgagatggatccaaccctccggaagcagattcaggagtgtaatttgcagattgtgaatgtcacaactcctgctaattttttccatgttctaaggaggcaggtacatagagattttcgcaaacctctcattgtaatgtcccctaagaacctgcttcgtagcaaggcttgcagatcaaatttatctgagtttgatgatgtccaaggccacccaggctttgacaaacagggaaccagattcaagcgcctcataaaagaccaaaatgcccacaaagatgttgaggagggtattagacgtttagtactttgctctggaaaagtttactatgaacttgatgaacaacgaacaaaggttgatgcaaatgatgttgcaatatgtagggtggaacagctttgtcctttcccttatgaccttgtccaacgagagcttaaacgatatccaaatgctgaggttgtttggtgtcaagaagagccaatgaacatgggtggatacacttatgttttaccccgacttatatcttcaatgaaagctgtgaataggggaggttacgacgatgtcaaatatattggtcgtgctccatccgcggccacagccactggcttcctcaaggttcaccagaaggagcagactgagattgctgaaaaagccgttcaacaagaaccaatcgacttcccattttgaaaaatcctttgcacatgcatccatcttttttgagagtgataataatgcatttagtttaatttatccaccacgtaagtggctatagttggaaggaaggcgacctcatacatttgctttcaagttttgacctttttttatgttcttttggttccttacaaaaagtatgttaagctgaatttcaacatacgtatgctgaaaatatttttatttccttgttgcgatacgcaaaggcgtggttggcttactagttgaattgatgccttgggaattaccatttttttttttaatttatgctgtgtaatttggaaaagcatcttccgtaatttgtgactatgtaattccattttccagaggcatgccttggcaatatagcctcaggatcatggccaagagttccccataatttttttctctcaaatatgccttttaataccatcaattcaaaatcaactttgatatggttcttgaatcaatctgagttcatcatcctatgtatctttgtctgataatgtagtcttgatcaatgtatttttgtttattgtattttgctaaaaa

SEQ ID NO: 6082 - protein, 1025 aa, Glycine max
MAWFRAGASIAKHAIRRTLSKGGSTHLVSRARVLPSIPSSHSRSFHSSVFKEQAAPVPRAVPLSKLTDSFLDGTSSVYLEELQRAWEADPNSVDESWDNFFRNFVGQATTSPGISGQTIHESMRLLLLVRAYQVNGHMKAKLDPLNLEPREIPEDLDPALYGFTEADLDREFFLGVWRMAGFLSENRPVQTLRSILTRLEQAYCGSIGYEYMHIADRHKCNWLRDRIETPTPTQFNRERREAIFDRLAWSSLFENFLATKWTSAKRFGLEGGETLIPGMKEMFDRASDLGVESIVIGMAHRGRLNVLGNVVRKPLRQIFCEFSGGLQPEGEVGLYTGTGDVKYHLGTSYDRPTRGGKRIHLSLVANPSHLEAVNPLVIGKTRAKQYYANDVDRTKNMGVLIHGDGSFAGQGVVYETLHLSALPNYTTGGTIHIVFNNQVAFTTDPTSGRSSQYCTDVAKALDAPIFHVNGDDVEAVVHACELAAEWRQTFHSDVVVDLVCYRRFGHNEIDEPSFTQPKMYKVIRSHPSTLEIYEKNLLESGELTQEEIDRIHKKVTSILNEEFLASKEYIPKRRDWLSAYWLGFKSPEQLSRIRNTGVKPEILKTVGKAITTIPENFTPHRAVKRIYEQRAQMIETGEDIDWGFAEALAYATLLIEGNHVRLSGQDVERGTFSHRHAVVHDQTTGEKYCPLDHVIMNQDEEMFTVSNSSLSEFGVLGFELGYSMENPNSLIIWEAQFGDFANGAHVIFDNFLASGEAKWLRQTGLVVLLPHGYDGQGPEHSSARLERFLQMADDNPHVIPEMDPTLRKQIQECNLQIVNVTTPANFFHVLRRQVHRDFRKPLIVMSPKNLLRSKACRSNLSEFDDVQGHPGFDKQGTRFKRLIKDQNAHKDVEEGIRRLVLCSGKVYYELDEQRTKVDANDVAICRVEQLCPFPYDLVQRELKRYPNAEVVWCQEEPMNMGGYTYVLPRLISSMKAVNRGGYDDVKYIGRAPSAATATGFLKVHQKEQTEIAEKAVQQEPIDFPF

SEQ ID NO: 6083 - DNA, 4556 bp, Pantoea agglomerans
  CDS (322)..(3129): transl_table=11
tgcattcagcgttttccgctgtcacagcatcatgaactgtgtaagtgtttgtcctaaagggctaaacccgacgcgcgctatcggccacattaagtcgatgctgctgcaacgcagcgcgtagttataccaccgggaacctcaggttcccggtattttacggaagcctctgtaaacgcggtcccaaccacgtttacaaaggttcccttacgggccgggcgcgcgctgcgcacagtgctcgtatcgctgaactcactacggcaaaccgcgaaagcggcaacaaatgaaacctcaaaaaagcataacattgcttaagggatcacaatgcagaacagcgcgatgaagccctggctggactcctcctggctggccggcgcgaatcagtcttacatagagcaactctatgaggatttcctgaccgatcctgactctgtggatgcagtgtggcgctcgatgttccaacagttaccaggcacgggagtgaaacctgagcagttccactccgcaactcgcgaatatttccgtcgcctggcgaaagacgcatctcgttacacctcctcagttaccgatccggcaaccaactccaaacaagtgaaagtgctgcagctgattaacgcgtttcgtttccgcggacatcaggaagcaaatctcgatccgcttggcctgtggaaacaggaccgcgttgccgatctcgatcctgcctttcacgatctgaccgacgccgattttcaggaaagctttaacgtaggttcttttgccattggcaaagaaaccatgaagctggccgatctgttcgacgcgctgaagcagacctactgtggctcgattggtgcagagtatatgcacatcaataacaccgaagagaaacgctggatccagcagcgtatcgaatccggtgcgagccagacgtcattcagtggcgaagagaaaaaaggtttcctgaaagagctgaccgcggcagaagggctggaaaaatatctgggcgcgaaattcccgggtgcaaaacgtttctcgctggaaggcggtgatgcgctggtgccgatgctgcgcgagatgattcgtcatgcgggcaaaagcggcacacgtgaagtggtactggggatggcgcaccgtggccgtcttaacgtactgattaacgtactgggtaaaaagccacaggatctgttcgacgaattctccggtaaacacaaagagcatctgggcaccggtgatgtgaagtatcacatgggcttctcttcggatattgaaaccgaaggtggtctggtgcatctggcgctggcgtttaacccgtctcacctggaaattgtcagcccggtggtcatgggatcggtacgtgcacgtctcgatcgtctggccgaaccggtcagcaataaagtgttgcctatcaccattcacggtgatgcggcggtgattggtcagggcgtggttcaggaaaccctgaacatgtctcaggcgcgcggctacgaagtgggcggcacggtacgtatcgtcattaacaaccaggttggttttaccacctccaacccgaaagatgcgcgttcaaccccgtactgtactgacatcggcaagatggtgctggcaccgattttccacgtcaatgctgacgatccggaagcggtggcctttgttacccgcctggcgctggactatcgcaacaccttcaaacgcgatgtgtttatcgatctggtgtgctatcgccgtcatggtcacaacgaggcggatgagccaagtgctacccagccgttgatgtaccagaaaatcaaaaagcatccgacgccgcgtaaaatttacgccgatcgtctggaaggcgaaggtgtcgcgtcgcaggaagatgccaccgagatggtgaacctgtaccgcgatgcgctcgatgcgggcgaatgcgtggtgccggaatggcgtccgatgagcctgcactccttcacgtggtcgccttatctgaaccacgaatgggatgagccttatccggcacaggttgacatgaaacgcctgaaggaactggcattgcgtatcagccaggtccctgagcagattgaagtgcagtcgcgcgtggccaagatctataacgatcgcaagctgatggccgaaggcgagaaagcgttcgactggggcggtgccgagaatctggcgtacgccacgctggtggatgaaggtattccggttcgcctctcgggtgaagactccggtcgtggaaccttcttccatcgccacgcggtcgtgcacaaccaggctaacggttcaacctatacgccgctgcaccatattcataacagccagggcgagttcaaagtctgggattcggtgctgtctgaagaagcggtgctggcgtttgaatacggttacgccacggctgagccgcgcgtgctgaccatctgggaagcgcagtttggtgactttgccaacggtgctcaggtggtgattgaccagttcatcagctctggcgaacagaagtggggccgtatgtgtggcctggtgatgttgctgccgcatggctacgaaggtcagggaccggaacactcctctgcccgtctggaacgctatctgcaactttgcgccgagcagaacatgcaggtttgcgtcccgtcgacgccggctcaggtgtatcacatgctgcgccgtcaggcgctgcgcgggatgcgccgtccgctggtggtgatgtcgccgaagtcgctgttacgccatccactggcgatctcgtcgctggatgaactggcaaacggcagtttccagccggccattggtgagatcgacgatctggatccgcagggcgtgaaacgcgtcgtgctgtgctccggtaaggtttactacgatctgctggaacagcgtcgtaaagacgagaaaaccgatgttgccatcgtgcgcatcgaacagctttacccgttcccgcatcaggcggtacaggaagcattgaaagcctattctcacgtacaggactttgtctggtgccaggaagagcctctgaaccagggcgcctggtactgtagccagcatcatttccgtgatgtcgtgccgtttggtgccaccctgcgttatgcaggtcgcccggcatcggcttctccggccgtgggttatatgtccgtacaccaacaacagcagcaagacctggttaatgacgcactgaacgtcaattaattaaaaggaaagataatgagtagcgtagatattctcgttcccgacctgcctgaatcggttgcagatgccacagtagcaacctggcacaagaaaccaggcgatgcagtcagccgcgatgaagtcatcgtcgaaattgaaactgacaaagtcgtgctggaagtgccggcatctgccgatggcgtgctggaagccgtgctggaagacgaaggggcaaccgttacgtcccgccagatcctgggtcgcctgaaagaaggcaacagtgcgggtaaagaaagcagtgccaaagcggaaagcaatgacaccacgccagcccagcgtcagacagcgtcgcttgaagaagagagcagcgatgcgctcagcccggcgatccgtcgcctgattgcggagcataatcttgacgctgcgcagatcaaaggcaccggcgtaggcggacgtttaacgcgtgaagacgttgaaaaacatctggcgaacaaaccgcaggctgagaaagccgccgcgccagcggcgggtgcagcaacggctcagcagcctgttgccaaccgcagcgaaaaacgtgttccgatgacgcgtttacgtaagcgcgtcgcggagcgtctgctggaagccaagaacagcaccgccatgttgacgaccttcaacgaaatcaacatgaagccgattatggatctgcgtaagcagtacggcgatgcgttcgagaagcgtcacggtgtgcgtctgggctttatgtctttctacatcaaggccgtggtcgaagcgctgaagcgttatccagaagtcaacgcctctatcgatggcgaagacgtggtgtaccacaactatttcgatgtgagtattgccgtctctacgccacgcggactggtgacgcctgtcctgcgtgacgttgatgcgctgagcatggctgacatcgagaagaaaattaaagaactggcagtgaaaggccgtgacggcaagctgacggttgacgatctgacgggcggtaactttaccatcaccaacggtggtgtgttcggttcgctgatgtctacgccaatcatcaacccgccacagagcgcgattctgggcatgcacgccattaaagatcgtcctatggcggtcaatggtcaggttgtgatcctgccaatgatgtacctggctctctcctacgatcaccgtttaatcgatggtcgtgaatctgtcggctatctggtcgcggtgaaagagatgctggaagatccggcgcgtctgctgctggatgtctgattcatcactgggcacgcgttgcgtgcccaatctcaatactcttttcagatctgaatggatagaacatcatgaacttacacgaataccaggctaaacagctgtttgcacggtatggcatgccagcaccgaccggctacgcctgtactacaccacgtgaagcagaagaagcggcatcgaaaatcggtgca

SEQ ID NO: 6084 - protein, 935 aa, Pantoea agglomerans
MQNSAMKPWLDSSWLAGANQSYIEQLYEDFLTDPDSVDAVWRSMFQQLPGTGVKPEQFHSATREYFRRLAKDASRYTSSVTDPATNSKQVKVLQLINAFRFRGHQEANLDPLGLWKQDRVADLDPAFHDLTDADFQESFNVGSFAIGKETMKLADLFDALKQTYCGSIGAEYMHINNTEEKRWIQQRIESGASQTSFSGEEKKGFLKELTAAEGLEKYLGAKFPGAKRFSLEGGDALVPMLREMIRHAGKSGTREVVLGMAHRGRLNVLINVLGKKPQDLFDEFSGKHKEHLGTGDVKYHMGFSSDIETEGGLVHLALAFNPSHLEIVSPVVMGSVRARLDRLAEPVSNKVLPITIHGDAAVIGQGVVQETLNMSQARGYEVGGTVRIVINNQVGFTTSNPKDARSTPYCTDIGKMVLAPIFHVNADDPEAVAFVTRLALDYRNTFKRDVFIDLVCYRRHGHNEADEPSATQPLMYQKIKKHPTPRKIYADRLEGEGVASQEDATEMVNLYRDALDAGECVVPEWRPMSLHSFTWSPYLNHEWDEPYPAQVDMKRLKELALRISQVPEQIEVQSRVAKIYNDRKLMAEGEKAFDWGGAENLAYATLVDEGIPVRLSGEDSGRGTFFHRHAVVHNQANGSTYTPLHHIHNSQGEFKVWDSVLSEEAVLAFEYGYATAEPRVLTIWEAQFGDFANGAQVVIDQFISSGEQKWGRMCGLVMLLPHGYEGQGPEHSSARLERYLQLCAEQNMQVCVPSTPAQVYHMLRRQALRGMRRPLVVMSPKSLLRHPLAISSLDELANGSFQPAIGEIDDLDPQGVKRVVLCSGKVYYDLLEQRRKDEKTDVAIVRIEQLYPFPHQAVQEALKAYSHVQDFVWCQEEPLNQGAWYCSQHHFRDVVPFGATLRYAGRPASASPAVGYMSVHQQQQQDLVNDALNVN

SEQ ID NO: 6085 - DNA, 2808 bp, Klebsiella pneumoniae subsp. pneumoniae MGH 78578
  CDS (1)..(2808): transl_table=11
atgcagaacggcgcaatgaaagcctggctggactcttcttacctctctggttcgaaccagagctggatagaacagctctatgaagacttcttaaccgatcctgactctgttgacgccaactggcgttcaatgttccagcagttacctggcaccggagttaaaccggatcaatttcattccaaaacgcgtgattatttccgtcgactggcgaaggatgcctcacgttacacttcttcgatttccgacccagacaccaatgtgaagcaggttaaagtcctgcagctcatcaacgcataccgtttccgtggccaccagcatgcgaatctcgatccgctggggctgtggaagcaagagagagtggcggatctcgatccggcctaccacgatctgaccgaggccgatttccaggaaagctataacgtaggttcatttgccatcggtaaagacacgatgaagctgggcgagctgattgccgccctcaagcaaacctactgcggctccatcggcgcggaatacatgcatatcacctctaccgaagaaaaacgctggatccagcagcgcattgaatcggtagctggcaaagcgagctttaccccggaagagaaaaaacgcttcctcagcgaactgaccgccgcggaaggtctggagcgctacctcggcgccaaattcccgggggcgaagcgcttctcgctggagggtggcgacgccctgatcccgatgctcaaagagatgatccgccatgcaggcaaaagcggcacccgcgaagtggtgctgggcatggcgcaccgcggccgtctgaacgtgctggtcaacgtgctgggtaaaaaaccgcaggacctgttcgacgagttcgcgggcaaacataaagaacacctcggcaccggcgacgtgaagtaccacatgggcttctcttccgatatggaaaccgaaggcggtctggtgcacctggcgctggcgtttaacccgtcgcacctcgagatcgtcagcccggtggttatcggttccgtacgcgcccgtctggatcgtctggacgagccaagcagcaacaaagttctgcctattaccatccacggcgacgccgccgtcaccggccagggcgtggttcaggaaactctgaacatgtccaaagcccgcggttacgaagtgggcggtaccgtgcgcatcgttatcaacaaccaggtgggcttcacgacctctaacccgctggatgcgcgctcaacgccgtactgcaccgacatcggtaaaatggtgcaggcgccgattttccacgtcaatgcggacgatccggaagcggtcgccttcgtcacccgtctggcgcttgatttccgcaatacctttaaacgcgatgtcttcattgacctggtgtgctaccgccgtcacggccacaacgaagccgatgagccgagcgcaacccagccgctgatgtatcagaagatcaaaaagcatccgactccgcgcaaaatctatgctgacaagctggagcaggagaaggtggcgactctggaagatgcgaccgagcaggttaacctctaccgcgatgcgctggatgccggcgaatgcgtggtgcaggaatggcgtccgatgaatatgcattcctttacctggtcgccgtacctcaaccacgagtgggacgagagctatccggataaagttgagccgaaacgtctgcaggagttggccaaacgcatcagcacggtaccggaaggtatcgaaatgcagtcccgcgtggcgaaaatttatgccgaccgccaggcgatggcggcaggcgagaagctgtttgactggggcggtgccgaaaacctggcctacgccacgctggttgacgaaggtattccggttcgtctgtccggcgaagactccggccgcggcaccttcttccaccgtcatgcggtgatccataaccagaccaatggttcaacctacacgccgctgcagcatgtccataacggccagggccagttccgcgtttgggactcggtactgtctgaagaagcggtgctggcgttcgaatatggttacgccaccgccgagccgcgcactctgactatctgggaagcgcagtttggcgacttcgccaacggtgcgcaggtggtgatcgaccagttcatctcctccggtgagcagaagtggggaaggatgtgcggcctggtgatgctcctgccgcacggttacgaaggccagggcccggagcactcctccgcgcgtctggagcgttatctgcagctgtgcgctgaacaaaacatgcaggtctgcgtgccgtccacgccggcacaggtttatcacatgctgcgtcgccaggcgctgcgcggtatgcgtcgtccgctggtggtgatgtcgccgaagtcgctgctgcgtcatccgctggcggtttccagcatggatgagctggcgaacggcactttcctgccggctattggtgaaatcgatcaacttgatccgcaggctgtgaagcgcgttgtgctgtgctctggtaaggtttactacgacctgctggaacagcgccgcaaaaacgagcaaaaagatgtcgctatcgttcgtatcgagcagctctatccgttcccgcatcaggcggtgcaggaagcgctgaaagcgtatgcgcacgtgcatgattttgtctggtgccaggaagagccgctcaaccagggcgcatggtactgcagccagcatcacttccgtgaagtgattccgtttggggcctctctgcgttatgcaggccgcccggcctccgcctctccggcggtagggtatatgtccgttcaccagaaacagcaacaagatctggtcaatgacgcgctgaacgtcgattaa

SEQ ID NO: 6086 - protein, 935 aa, Klebsiella pneumoniae subsp. pneumoniae MGH 78578
MQNGAMKAWLDSSYLSGSNQSWIEQLYEDFLTDPDSVDANWRSMFQQLPGTGVKPDQFHSKTRDYFRRLAKDASRYTSSISDPDTNVKQVKVLQLINAYRFRGHQHANLDPLGLWKQERVADLDPAYHDLTEADFQESYNVGSFAIGKDTMKLGELIAALKQTYCGSIGAEYMHITSTEEKRWIQQRIESVAGKASFTPEEKKRFLSELTAAEGLERYLGAKFPGAKRFSLEGGDALIPMLKEMIRHAGKSGTREVVLGMAHRGRLNVLVNVLGKKPQDLFDEFAGKHKEHLGTGDVKYHMGFSSDMETEGGLVHLALAFNPSHLEIVSPVVIGSVRARLDRLDEPSSNKVLPITIHGDAAVTGQGVVQETLNMSKARGYEVGGTVRIVINNQVGFTTSNPLDARSTPYCTDIGKMVQAPIFHVNADDPEAVAFVTRLALDFRNTFKRDVFIDLVCYRRHGHNEADEPSATQPLMYQKIKKHPTPRKIYADKLEQEKVATLEDATEQVNLYRDALDAGECVVQEWRPMNMHSFTWSPYLNHEWDESYPDKVEPKRLQELAKRISTVPEGIEMQSRVAKIYADRQAMAAGEKLFDWGGAENLAYATLVDEGIPVRLSGEDSGRGTFFHRHAVIHNQTNGSTYTPLQHVHNGQGQFRVWDSVLSEEAVLAFEYGYATAEPRTLTIWEAQFGDFANGAQVVIDQFISSGEQKWGRMCGLVMLLPHGYEGQGPEHSSARLERYLQLCAEQNMQVCVPSTPAQVYHMLRRQALRGMRRPLVVMSPKSLLRHPLAVSSMDELANGTFLPAIGEIDQLDPQAVKRVVLCSGKVYYDLLEQRRKNEQKDVAIVRIEQLYPFPHQAVQEALKAYAHVHDFVWCQEEPLNQGAWYCSQHHFREVIPFGASLRYAGRPASASPAVGYMSVHQKQQQDLVNDALNVD

SEQ ID NO: 6087 - DNA, 3717 bp, Drosophila melanogaster
  CDS (1)..(3717)
atgaaccaatgtcgtctgaggagcctggcgcggatcaggaggagcctgacactgggtttgcggggaactgaccaacacgtcctcgcccgtcaagccctccgcaccattcaaacgacctcacagcggcgaggtgtccatgatctggactccttcgccaatggatgcagtgccgcctacatcgagggactctacaacaagtggaagcgcaatcccagttccgtagatgagtcctggaacgagctcttcagcagcaacgattggtccagccccaagagaagtcctcttcaggtttcgcactcccggaagtacagacgtcctccggttgaaaggatagctgtgaaggctcggtcgggcgaaaggacggcttccggtggcgcatctgcagctccagccgcacctcccagcgactggaagaacattgatgaccaccacgtgatccaggccatcatccgtgcctatcaatcgcgcggtcacttggccgccgatctggatcccttgggtattgttggtccgaagaagcgtacgtcggtggatggcacccagcgacatgccgccagggaggtgctccgccagcacttctcctatatatttaatgacctcaataccgtgttcaagttgccctcatccacaatgataggcggtgatcaggaatttctgtcactaaaagagatcctggatcgcttggagcgcatctattgcggccacattggagtggagtacatgcagatcacgtcgttgacaaagaccaactggcttcgcgaccgtttcgagaagcctggaggcctggacttgaccaaggaggaaaagaagctcatcctagagcgtctcactcgctcgacgggattcgaaaacttcctggcgaaaaagttctcgtcggagaagcgtttcggactggagggatgcgacattatgatacccgctataaaggaggtggttgaccgggccacggaccatggcgtggagtcaattttaataggaatggcgcatcgagggcgcctcaatgtcctcgccaacatctgtcgcaagcccatttcggacatcctgtctcagttccacggcttgcaggccaccgattccggatctggcgacgttaagtaccatctgggcgtgtttcaagagcggctcaaccgacagacaaaccgcatggtgcgcatcaccgtggtggcgaatccctctcacttggagcacgtcaacccggtgctcctgggtaaggcccgagcggagatgttccaacggggcgacacatgtggcagcacggtgatgcccatcattatccacggagatgcctccttttccggtcagggcgtggtctacgaatcaatgcatctgtccgacttgcccaactacaccacctacggcaccattcacattgtgtccaacaaccaggtgggcttcacgacagatccgcgtttctcccgctcctcgcgctactgcacggacgttgccaaggtggtgaatgctccgatactgcacgtgaatgcggacgatccggaggcgtgcatccagtgcgctcgcattgccatcgactatcggacacgattcaagaaggatgtggtcatcgacatagttggctaccgacgcaacgggcacaatgaggcggatgaacccatgttcacccagccgctgatgtaccagcgcataaaaaaactgaagccatgcctccagctctacgccgataagttgatcaaggagggagtcgtcacggatagcgagttcaaggcaatggtgtcaagctacgaaaagatctgcgaggacgcttgggccaagtccaagaccatcaagaccataaagtattcctcttggatcgactctccctggccaggattcttcgagggtcgcgatcgcctgaaactgtgccccactggcatcagcacggacaccctgaagacgattggcaacatgttctcgactcctccgccgccggagcacaagttcgagacacacaagggcatccttcgcatactggcccagcgcacgcagatggtgcaggacaaagtggctgactggtcgctgggcgaggccttcgccttcggctcgctccttaaggagggcatccacgttcgactatccggccaagatgtggagcgcggcaccttttcgcaccggcaccacgtcctgcaccaccagtcggaggacaaggtggtgtacaactcactggaccacctctatcccgaccaggcgccctactccgtctccaacagctccctgtcggagtgtgcggtccttggcttcgagcacggctactccatggccagtcccaatgctctggtcatgtgggaaggccagtttggggacttctgcaacacggcgcagtgcatcatcgacacgttcatagccagcggcgaaaccaagtgggtgcgccagtccggagtcgtcatgttgctgccacacagcatggagggcatgggcccggagcactcttccggccgcattgagcgcttcctgcagatgagcgacgacgatccggacgtctatccggatacctgcgacgctgactttgtggctcgccagctaatgaatgtcaactggattgtgacgaatctctccacgcccgcaaatctgttccactgcctgcgccgccaggtgaagatgggcttccggaagccgctgattaacttctcgcccaagtcactgctccgccatccgctggcgcgaagtcccttcaaggacttcaacgagtgcagttgcttccagcgcatcattcccgacaaaggacccgccggcaagcagcccgactgcgtccagaagctggtcttctgctcgggaaaggtctactacgatctcgtcaaggagcgcgacgatcacgagcaggtggagacggtggccctggtgagggtggaacagctctgtcccttcccctacgacctgatcagccagcagctggagctgtatcccaaggcggagctgctgtgggcccaggaggagcacaagaacatgggcgcctggtcttacgtgcagccgcgtttcgacacggcgctcctcaagaacgaaaacgaatcgcgctgcgtgtcctatcacggacgaccgcccagcgcctcgccagcgacgggcaacaaggtgcagcactacaacgagtacaaggccctgatcacaagcatcttcggagagctgacgccggagaacaagaagcgaatcgaggatcggatcaagaagcagcaggcaaaggccaaggcggatgcgcaatcgaaacccagtactaagccaccagccgctccaccaaagggcggttcgtcgccgccaccaggtccagcaccccgtaagccactgatcagtctgccaagtagacctccaaggggtggaaagcagcggtccggctcggctccagctcctaatctggttgatgaagattcagctgctcgaaatagggaaccagatgcttctgcatatgatggcgcatcaccgtcagcttggaagagatcgggctctgctccagcaccgagtgtagttcccagggcatcggcctcccgcagtccgtctagaaagtcaccttcaccctctcacgacggcatatctccttctacaagacaagaatccttaagcaaaaagaaatcagggtcggctccagctccgacgccaacttctcgtggaccattccggactgcgccctccaatacagaattcataaagcgcagacctgctaaagattacggcagtagaaatgaaacccaaagcactcccggggagtcggaactggacccaacaaaaccacagccctag

SEQ ID NO: 6088 - protein, 1238 aa, Drosophila melanogaster
MNQCRLRSLARIRRSLTLGLRGTDQHVLARQALRTIQTTSQRRGVHDLDSFANGCSAAYIEGLYNKWKRNPSSVDESWNELFSSNDWSSPKRSPLQVSHSRKYRRPPVERIAVKARSGERTASGGASAAPAAPPSDWKNIDDHHVIQAIIRAYQSRGHLAADLDPLGIVGPKKRTSVDGTQRHAAREVLRQHFSYIFNDLNTVFKLPSSTMIGGDQEFLSLKEILDRLERIYCGHIGVEYMQITSLTKTNWLRDRFEKPGGLDLTKEEKKLILERLTRSTGFENFLAKKFSSEKRFGLEGCDIMIPAIKEVVDRATDHGVESILIGMAHRGRLNVLANICRKPISDILSQFHGLQATDSGSGDVKYHLGVFQERLNRQTNRMVRITVVANPSHLEHVNPVLLGKARAEMFQRGDTCGSTVMPIIIHGDASFSGQGVVYESMHLSDLPNYTTYGTIHIVSNNQVGFTTDPRFSRSSRYCTDVAKVVNAPILHVNADDPEACIQCARIAIDYRTRFKKDVVIDIVGYRRNGHNEADEPMFTQPLMYQRIKKLKPCLQLYADKLIKEGVVTDSEFKAMVSSYEKICEDAWAKSKTIKTIKYSSWIDSPWPGFFEGRDRLKLCPTGISTDTLKTIGNMFSTPPPPEHKFETHKGILRILAQRTQMVQDKVADWSLGEAFAFGSLLKEGIHVRLSGQDVERGTFSHRHHVLHHQSEDKVVYNSLDHLYPDQAPYSVSNSSLSECAVLGFEHGYSMASPNALVMWEGQFGDFCNTAQCIIDTFIASGETKWVRQSGVVMLLPHSMEGMGPEHSSGRIERFLQMSDDDPDVYPDTCDADFVARQLMNVNWIVTNLSTPANLFHCLRRQVKMGFRKPLINFSPKSLLRHPLARSPFKDFNECSCFQRIIPDKGPAGKQPDCVQKLVFCSGKVYYDLVKERDDHEQVETVALVRVEQLCPFPYDLISQQLELYPKAELLWAQEEHKNMGAWSYVQPRFDTALLKNENESRCVSYHGRPPSASPATGNKVQHYNEYKALITSIFGELTPENKKRIEDRIKKQQAKAKADAQSKPSTKPPAAPPKGGSSPPPGPAPRKPLISLPSRPPRGGKQRSGSAPAPNLVDEDSAARNREPDASAYDGASPSAWKRSGSAPAPSVVPRASASRSPSRKSPSPSHDGISPSTRQESLSKKKSGSAPAPTPTSRGPFRTAPSNTEFIKRRPAKDYGSRNETQSTPGESELDPTKPQP

SEQ ID NO: 6089 - DNA, 3051 bp, Oryza sativa (japonica cultivar-group)
  CDS (1)..(3051)
atggggtggtttcgggctgcgtccggattggctcgggtggcgctgaggaggaacctggcgcgtgctccggcgaacccttttgccggtcctgcgccacggtacttccactccacccgcccccggcggttcgccgctcctgtgccccgcgccgtgccgctctcgcgcctcaccgacagcttccttgatggcaccagcagcgtgtaccttgaggagctccagagggcgtgggaggctgatcccacctctgtcgacgagtcctgggacaatttctttcggaactttgtcgggcaggctgcaacttcgcctggcatatctgggcagacaattcaggaaagcatgaggttgctgcttcttgtgcgagcgtaccaggtgagtggtcacctgaaggctaagcttgatcctctcgcgctagaggagcggcctatccctgatgttctggaccctgcgttctatgggttctctgaggctgatctggaccgggagttttttcttggtgtgtggaggatggctgggttcttgtcggagaatcgccctgtgcagacactccgttctgtgttggagcggcttgagcaagcttactgtggtaccattgggtatgagtacatgcacatacctgacagggagaaatgtaattggctgagggataggattgagacggtcaatgcaagggagtactcctacgaccgtcgccaggtcatgcttgataggctcatgtggagcactcagtttgagagcttcttggcacagaaatggacgaccgccaagcggtttggtcttgaaggtgcggagacactgatccctggcatgaaggagatgtttgacagggcagctgatcttggtgtagagagcattgtgattggtatgccacacagaggtaggctgaatgtcttgggaaatgtcgtgaggaagcccttgcgacagatcttcagtgagtttagtggtggtaccaagcctgccgaagaaggggagggcttgtatacagggactggagatgtcaaataccatctaggaacttcatacgataggcctaccagaggtggaaagcatatccatctgtctctggttgcaaacccaagtcatttggaagcagtcgatcctgttgttgctgggaagaccagagcaaaacagtactattctaatgatcttgacaggaccaagaatttaggagtcttgttgcatggtgatggaagcttctcagggcagggtgtagtgtatgaaaccctgcatctcagtgctcttccaaactacactactggtgggacaattcacattgtggtcaataatcaggttgctttcactactgatccaagggcagggaggtcttcgcagtattgcacagatgttgctaaagcattggatgctccaattttccatgtgaatggtgatgacttggaggcagtggttcatgtctgtgagcttgctgcggagtggcggcaaacatttcattctgatgttgtggtggatattgtatgctaccgccggtttgggcataacgagattgatgagccttccttcacccagcctaaaatgtacaagataattaggaaccaccagagtgctcttgagatataccaaaacagacttttagaatctgggaagatatccaaggaagatattgataagatgcagaagaaggtcagcactatcttgaatgatgaattccaaaacagcaaagaatatattcccaataagagagactggctctcagcttactggactggattcaagtcaccagaacagatttcacgaatccgaaatactggtgtcaagccagagattctaaaacgtgttggagaagccatgactactctgcctgaaaatttcaagccccacagggctgtcaaaaagatttttgagctgcgtcgtcagatgattgagacgggcgaaggcattgattgggctgttggtgaagcacttgcttttgcaactcttataattgagggaaaccatgttaggttaagtggtcaggatgttgagaggggtacattcagccaccgccatgctgttatccatgaccaggaaactggagagcaatactgtccgcttgataatcttgttatgaatcaagatgaggaactatttactgtaagcaacagttccctgtcagagtttgctgttttgggctttgaattgggctattccatggagaatccaaactcactggttttatgggaagcccagtttggtgatttttccaatggagctcaagtgatatttgatcagtttctgagtagtggagaggcaaaatggctccgccagaccggtcttgtcgtttgccttcctcacggatatgatggtcaggggcctgaacattccagtgcaaggttggagcgtttccttcagatgagtgatgacaacccttatgttattcctgagatggatccaactctgaggaagcaaatccagcagtgcaactggcaagttgtgaatgtcacaactcctgcaaactatttccatgtcctgcgtcgccagattcaccgggacttcagaaagcctttgattgttatgtctccaaagaatctccttcgacacaaggactgcaaatcgaatctttctgaatttgatgaccttgctggtcaccctggatttgacaagcaaggaacccggtttaagcgtctaattaaagatcagaacaaccataaggaccttgaggagggaatcaagcgtttagttctctgttctggaaaggtatattatgagttggacgaagaaagaagaaaaaaggagcgtgatgatgttgctatatgtagagttgaacagctctgtccattcccatatgacctcatccagcgcgagttgaagcgatatccaaatgccgagattgtttggtgccaagaggaacccatgaacatgggggcgtacagctacatcaatcctcgcctcctgaccgcgatgagggcgcttggtcggggcacgatagacgacatcaaatacgttggaagggccccatctgcagccaccgcaacaggtttctactccgtccatgtgcaggagcaaaccgagcttgtgcagaaggcactgcagcgagaccctatcaactctccattttga

SEQ ID NO: 6090 - protein, 1016 aa, Oryza sativa (japonica cultivar-group)
MGWFRAASGLARVALRRNLARAPANPFAGPAPRYFHSTRPRRFAAPVPRAVPLSRLTDSFLDGTSSVYLEELQRAWEADPTSVDESWDNFFRNFVGQAATSPGISGQTIQESMRLLLLVRAYQVSGHLKAKLDPLALEERPIPDVLDPAFYGFSEADLDREFFLGVWRMAGFLSENRPVQTLRSVLERLEQAYCGTIGYEYMHIPDREKCNWLRDRIETVNAREYSYDRRQVMLDRLMWSTQFESFLAQKWTTAKRFGLEGAETLIPGMKEMFDRAADLGVESIVIGMPHRGRLNVLGNVVRKPLRQIFSEFSGGTKPAEEGEGLYTGTGDVKYHLGTSYDRPTRGGKHIHLSLVANPSHLEAVDPVVAGKTRAKQYYSNDLDRTKNLGVLLHGDGSFSGQGVVYETLHLSALPNYTTGGTIHIVVNNQVAFTTDPRAGRSSQYCTDVAKALDAPIFHVNGDDLEAVVHVCELAAEWRQTFHSDVVVDIVCYRRFGHNEIDEPSFTQPKMYKIIRNHQSALEIYQNRLLESGKISKEDIDKMQKKVSTILNDEFQNSKEYIPNKRDWLSAYWTGFKSPEQISRIRNTGVKPEILKRVGEAMTTLPENFKPHRAVKKIFELRRQMIETGEGIDWAVGEALAFATLIIEGNHVRLSGQDVERGTFSHRHAVIHDQETGEQYCPLDNLVMNQDEELFTVSNSSLSEFAVLGFELGYSMENPNSLVLWEAQFGDFSNGAQVIFDQFLSSGEAKWLRQTGLVVCLPHGYDGQGPEHSSARLERFLQMSDDNPYVIPEMDPTLRKQIQQCNWQVVNVTTPANYFHVLRRQIHRDFRKPLIVMSPKNLLRHKDCKSNLSEFDDLAGHPGFDKQGTRFKRLIKDQNNHKDLEEGIKRLVLCSGKVYYELDEERRKKERDDVAICRVEQLCPFPYDLIQRELKRYPNAEIVWCQEEPMNMGAYSYINPRLLTAMRALGRGTIDDIKYVGRAPSAATATGFYSVHVQEQTELVQKALQRDPINSPF

SEQ ID NO: 6091 - DNA, 3054 bp, Arabidopsis thaliana
  CDS (1)..(3054)
atggtgtggtttcgtgctggttccagtgttacaaagctagctgttagaaggattttgaatcagggtgcttcgtatgcgacgaggacacggtctattccgtctcaaactcgttcctttcactcgactatatgcagaccaaaggctcagagtgctccagttcctagagctgttcctctttctaagctaactgatagtttcttagatgggacgagcagtgtctaccttgaggagttacaaagggcttgggaagctgatcctaacagtgtagatgagtcttgggataatttctttaggaactttgttggtcaggctgccacgtctcctggcatctctgggcagacaattcaggagagtatgaggctgttgttacttgttagggcttatcaggtgaatggtcacatgaaagcgaagttggatccgttaggtttggaacagcgagagatccctgaggatcttgacttggctctttatggattcactgaggctgaccttgacagagagttcttcttgggggtgtggcagatgtcaggattcatgtctgagaaccgaccagtgcagacccttcgttccatattgacaaggctcgaacaggcatactgtgggaatatcggatttgagtatatgcacattgcagatcgagataaatgtaactggttgagagaaaagattgagacaccaactccttggcggtacaacagggagcgccgtgaggtgattctcgatcggcttgcatggagtactcagttcgagaatttcttagctaccaagtggacaacagccaaaagatttggacttgagggaggagaatcattaattcctggaatgaaggagatgtttgacagagcagcagatcttggagtagagagtattgttattggaatgtctcacagaggaagattgaatgttctgggtaatgttgttcggaagccactccgtcagatatttagtgagttcagtggtggtattaggcctgtagatgaagttggctacactggaactggtgatgtcaaatatcacttgggaacctcttatgatcgacctacaagaggtgggaagaaaatccatctctctttggttgctaatccaagtcacttggaagctgcagattctgttgttgttggcaaaaccagagcaaaacagtactactccaatgatttagacaggaccaaaaatttaggtattttgattcacggagatggtagttttgctggacaaggggtagtctatgaaactctccatcttagtgctcttccaaactacaccaccggaggaaccatacatattgtggtgaacaaccaagtggctttcacgacagatccaagggcggggagatcttcccagtattgtactgatgttgcaaaggctttgagtgctcccatctttcatgttaatggggatgatgttgaggctgttgttcatgcctgcgagcttgctgctgagtggcgtcagacttttcattctgatgttgtcgttgatttggtttgctaccgtaggttcgggcataatgagatagatgaaccatctttcactcagccaaaaatgtacaaggttatcaaaaatcatccttcaacccttcagatctaccacaaaaagctcttggaatgcggtgaagtatcacaacaggatattgaccggatacaggaaaaggttaacaccatcctcaatgaagaatttgtcgctagtaaggactatctccctaagaaacgagattggctttcaaccaattgggctggatttaagtctcctgagcagatctcacgtgttagaaacactggcgtcaaaccagagatactgaagactgttggcaaggcaatttcatctcttccagaaaacttcaagccacacagggcagtgaagaaagtttatgaacaacgtgcccaaatgattgaatcaggagagggagttgactgggcccttgcagaagctcttgcttttgctaccttagttgtggaaggcaatcatgtccgattgagtggtcaggatgtcgaacgaggaacatttagtcatcgtcattctgtccttcatgaccaggaaactggagaagagtattgtcctctagatcatctcatcatgaatcaggatcctgagatgtttactgttagcaacagttctctttcagaatttggtgtccttgggttcgaattgggttactccatggaaagcccgaactcgttggtactatgggaagctcagtttggagacttcgccaatggagctcaggtgatatttgatcagttcatcagcagtggagaagccaaatggctgcgtcaaaccgggcttgttatgctacttccccatggttatgatggtcagggacctgaacattcaagtgcgaggttggaacgttaccttcagatgagtgatgataatccctatgtcataccagacatggaaccaacaatgcgaaagcaaattcaagaatgtaattggcagattgtcaatgccacaactcccgccaactatttccatgttctgcggcgacagatacacagagacttccgtaagcctctgattgtaatggcaccaaagaacttgctccgtcacaaggactgcaaatcaaatctctcagagtttgatgatgtccaaggccacccaggttttgacaagcaaggaactagatttaagcgattaatcaaggatcagaatgatcactctgatcttgaagaaggcatcagaagattggtactttgctccggaaaggtctattatgagcttgatgatgaacggaagaaggttggcgcaacagatgttgctatctgtagagttgaacagctttgtcctttcccatatgatctcattcagcgtgagctcaagagatatccaaatgcggagatcgtttggtgccaagaagaggcgatgaacatgggagcattcagctacatatctccacggctatggacagcaatgagaagcgtaaacagaggagatatggaagacattaagtatgttggtcgtggtccttctgctgcaactgccacgggtttctatactttccatgtcaaagagcaagccgggcttgtccagaaagccatcggaaaggaacccatcaattaa

SEQ ID NO: 6092 - protein, 1017 aa, Arabidopsis thaliana
MVWFRAGSSVTKLAVRRILNQGASYATRTRSIPSQTRSFHSTICRPKAQSAPVPRAVPLSKLTDSFLDGTSSVYLEELQRAWEADPNSVDESWDNFFRNFVGQAATSPGISGQTIQESMRLLLLVRAYQVNGHMKAKLDPLGLEQREIPEDLDLALYGFTEADLDREFFLGVWQMSGFMSENRPVQTLRSILTRLEQAYCGNIGFEYMHIADRDKCNWLREKIETPTPWRYNRERREVILDRLAWSTQFENFLATKWTTAKRFGLEGGESLIPGMKEMFDRAADLGVESIVIGMSHRGRLNVLGNVVRKPLRQIFSEFSGGIRPVDEVGYTGTGDVKYHLGTSYDRPTRGGKKIHLSLVANPSHLEAADSVVVGKTRAKQYYSNDLDRTKNLGILIHGDGSFAGQGVVYETLHLSALPNYTTGGTIHIVVNNQVAFTTDPRAGRSSQYCTDVAKALSAPIFHVNGDDVEAVVHACELAAEWRQTFHSDVVVDLVCYRRFGHNEIDEPSFTQPKMYKVIKNHPSTLQIYHKKLLECGEVSQQDIDRIQEKVNTILNEEFVASKDYLPKKRDWLSTNWAGFKSPEQISRVRNTGVKPEILKTVGKAISSLPENFKPHRAVKKVYEQRAQMIESGEGVDWALAEALAFATLVVEGNHVRLSGQDVERGTFSHRHSVLHDQETGEEYCPLDHLIMNQDPEMFTVSNSSLSEFGVLGFELGYSMESPNSLVLWEAQFGDFANGAQVIFDQFISSGEAKWLRQTGLVMLLPHGYDGQGPEHSSARLERYLQMSDDNPYVIPDMEPTMRKQIQECNWQIVNATTPANYFHVLRRQIHRDFRKPLIVMAPKNLLRHKDCKSNLSEFDDVQGHPGFDKQGTRFKRLIKDQNDHSDLEEGIRRLVLCSGKVYYELDDERKKVGATDVAICRVEQLCPFPYDLIQRELKRYPNAEIVWCQEEAMNMGAFSYISPRLWTAMRSVNRGDMEDIKYVGRGPSAATATGFYTFHVKEQAGLVQKAIGKEPIN

SEQ ID NO: 6093 - DNA, 3078 bp, Arabidopsis thaliana
  CDS (1)..(3078)
atggtttggtttagaatcggttcttctgtggcaaagcttgccataagaaggacactgtctcagtctcgttgtggttcatatgccactagaacaagggttttgccttgtcaaaccagatgttttcactctacaatactcaaatcaaaggcagagtctgctgcacctgttccacgtcctgtcccactttctaagctaactgatagcttcttagatggaacaagcagtgtgtatctagaggagttacaaagagcttgggaggctgatcccaacagtgttgatgagtcgtgggataacttttttaggaattttgtgggtcaggcttctacatcgcctggtatctcggggcaaaccattcaagaaagcatgcgtttgttgttgctagttagagcttaccaggttaatggccacatgaaggccaagcttgatcctttaggtctagagaagagagagattccagaggatctcacgccaggtctttatgggtttactgaggctgatcttgatcgggaattctttctgggtgtatggaggatgtcgggttttctctctgagaaccgcccggttcaaacactgaggtcgatactgtcgaggcttgagcaagcttactgtgggactatagggtatgagtacatgcacattgctgatagggataaatgtaactggttgagagacaagatcgagaccccaactcctcgacagtacaatagtgagcgtcggatggttatttatgataggcttacctggagcacacagtttgagaatttcttggctactaagtggaccacggctaaaaggtttggactggaaggtgctgaatctttgattcctggcatgaaggagatgttcgataggtctgcagatctcggggtagagaacatagttatcggtatgccccataggggtcgacttaatgttttgggtaatgttgttagaaaacctctacgccaaatattcagcgagtttagcggtggtactaggccagtagatgaagttgggctttacaccggaacaggtgatgtgaaataccacttgggtacatcttatgatcgtccaactagaggaggcaaacatctccacttgtctttggtagcaaatcccagtcacttggaagcagtagatcctgttgtgataggtaaaaccagagcgaaacaatattacacgaaagacgagaacagaacaaagaacatgggtattttgatccatggggatggtagctttgccggacaaggagtggtgtatgaaactctccatcttagtgcacttcctaactactgtaccggtggaacagtgcacattgtggtgaataatcaagtggctttcacaaccgatcccagggaaggaaggtcttcacagtattgcactgatgttgcaaaggctttgagcgccccaattttccatgtcaatgcagatgacattgaagcagtagtgcatgcttgtgagcttgctgctgagtggcgccagacgttccattctgatgttgttgttgatttagtatgctaccgtcgctttgggcataacgagatagacgaaccgtcattcacacaaccaaaaatgtacaaggtgatacgcagtcatccctcgtcacttcaaatctaccaggagaagctcttgcaatctggacaggtaacccaagaagatattgataagattcaaaagaaagtaagctctatcctcaatgaagaatatgaggcaagtaaagattatattccacaaaaacgtgactggctggcaagtcactggactggattcaagtctccggagcagatttctaggattcgaaacaccggagtgaagccagagattttgaagaatgtgggaaaggcaatctcaaccttccctgagaactttaagccacacagaggagttaaaagagtttatgaacaacgtgctcaaatgattgaatcgggagaaggcattgactggggacttggagaagcacttgcttttgctacactggttgtggaagggaaccatgttcggctaagtggtcaagatgttgaaagaggaactttcagtcatagacactcagtgcttcatgatcaagaaaccggggaggaatattgtcccctcgatcacctaatcaaaaaccaagaccctgaaatgttcactgtcagcaacagctccctttcagaatttggtgttctcggtttcgaactgggttattcgatggaaaatcccaattctctggtgatatgggaagctcagtttggagactttgctaatggcgcacaagttatgtttgatcagttcataagcagtggggaagccaaatggctccgtcaaactggtctagtagttttacttcctcatggatatgatggtcagggtcctgaacattccagtggaagattggaacgtttccttcagatgagtgatgacaatccttacgttatccctgagatggacccaactcttcgaaagcagattcaagaatgtaattggcaagttgttaatgttactacacctgccaactatttccatgttctgcgtcggcagatacacagggactttcgcaagcctcttatagtgatggcccccaaaaacttgcttcgtcacaaacagtgtgtatctaatctctcggaattcgatgatgttaaaggacatcctggatttgacaagcaaggaactcgatttaaacggttgatcaaagatcaaagtggccactctgatcttgaagaaggtatcagacgtctagtcctctgctctgggaaggtctactatgagcttgacgaagagcgaaagaagtctgaaacaaaggatgtagccatttgcagagtagagcagctttgcccatttccatatgatctcatccaaagagaactaaagcgatatccaaatgcagagatcgtgtggtgtcaagaagagccgatgaacatgggaggataccaatacatagccctaaggctttgcaccgcgatgaaagcactgcaaagaggaaacttcaacgacatcaaatacgttggtcgtcttccctcagctgctacagccacaggattttaccagcttcatgttaaggagcagactgatcttgtgaagaaagctcttcaacctgaccccatcacccccgtcatcccttaa

SEQ ID NO: 6094 - protein, 1025 aa, Arabidopsis thaliana
MVWFRIGSSVAKLAIRRTLSQSRCGSYATRTRVLPCQTRCFHSTILKSKAESAAPVPRPVPLSKLTDSFLDGTSSVYLEELQRAWEADPNSVDESWDNFFRNFVGQASTSPGISGQTIQESMRLLLLVRAYQVNGHMKAKLDPLGLEKREIPEDLTPGLYGFTEADLDREFFLGVWRMSGFLSENRPVQTLRSILSRLEQAYCGTIGYEYMHIADRDKCNWLRDKIETPTPRQYNSERRMVIYDRLTWSTQFENFLATKWTTAKRFGLEGAESLIPGMKEMFDRSADLGVENIVIGMPHRGRLNVLGNVVRKPLRQIFSEFSGGTRPVDEVGLYTGTGDVKYHLGTSYDRPTRGGKHLHLSLVANPSHLEAVDPVVIGKTRAKQYYTKDENRTKNMGILIHGDGSFAGQGVVYETLHLSALPNYCTGGTVHIVVNNQVAFTTDPREGRSSQYCTDVAKALSAPIFHVNADDIEAVVHACELAAEWRQTFHSDVVVDLVCYRRFGHNEIDEPSFTQPKMYKVIRSHPSSLQIYQEKLLQSGQVTQEDIDKIQKKVSSILNEEYEASKDYIPQKRDWLASHWTGFKSPEQISRIRNTGVKPEILKNVGKAISTFPENFKPHRGVKRVYEQRAQMIESGEGIDWGLGEALAFATLVVEGNHVRLSGQDVERGTFSHRHSVLHDQETGEEYCPLDHLIKNQDPEMFTVSNSSLSEFGVLGFELGYSMENPNSLVIWEAQFGDFANGAQVMFDQFISSGEAKWLRQTGLVVLLPHGYDGQGPEHSSGRLERFLQMSDDNPYVIPEMDPTLRKQIQECNWQVVNVTTPANYFHVLRRQIHRDFRKPLIVMAPKNLLRHKQCVSNLSEFDDVKGHPGFDKQGTRFKRLIKDQSGHSDLEEGIRRLVLCSGKVYYELDEERKKSETKDVAICRVEQLCPFPYDLIQRELKRYPNAEIVWCQEEPMNMGGYQYIALRLCTAMKALQRGNFNDIKYVGRLPSAATATGFYQLHVKEQTDLVKKALQPDPITPVIP

SEQ ID NO: 6095 - DNA, 2811 bp, Vibrio cholerae O1 biovar eltor str. N16961
  CDS (1)..(2811): transl_table=11
atgcacaacggcgtgatgaaggcatggctcgagtcttcacacttggctggcgccaatgcaacttacgtagaagatctctacgaactgtatctaagtgatcccgatctggtaagtgaggagtggaaacgtgtttttgatgggttgcctgcgcacccaacgaatgtggttgaacaaccgcactcacgcgtccgtgactacttccgacgactcgctcaagagactaagcattacaatgtccaagttagtgatcctgaagtcgatgcaaaacaagtaaaagtactgcagctaattaacgcataccgtttccgcggtcatgaagctgccaagcttgaccctctcggtttatggaaccgccctgaagtggcggaactgaatccctcattccataatttgacccaagaagatatggaagagaccttcaacgtgggctcctttgcgattggcaaagacacgatgaagctgaaagatatctatcaatccctacaaaaaatctactgtggctctgtcggtgcagaatacatgcacatcaccgacactgagcagaagcgttggattcaacagcgtctcgaaccagttgtgggtacccctgtattcagtaaagaagaaaagcgtactttccttgaagagctgactgcagctgaaggtttagagcgctatcttggtgcgaaattccctggtgctaaacgtttctctctcgaagggggggatgccttagttccgatgaccaaagagatgatccgtcacgcgggtgccagtggcatgcgtgaagtggtgattgggatggcgcaccgcggtcgcttgaacatgctggtcaacgttctgggtaaaaaaccgcaagatctgtttgatgagtttgccggtaaacatggcgaaggctggggcacaggtgatgtgaaatatcaccaaggtttctccgctgactttgcgacaccgggcggtgatgttcacttagcactggctttcaacccatcgcatcttgagattgtgaaccctgttgtgatgggttcagtgcgcgcgcgtcaagaccgcctaggtgatgaagatggcagtaaagtgctacctatcactatccatggtgactctgcgattgcaggacaaggtgtggtggctgaaaccttcaacatgtctcaagcgcgtggtttctgcgtcggtggtacagtacgtatcgtggtcaataaccaagtgggcttcacgacatcaaacccacgcgatactcgctcaaccatgtactgtaccgatattgccaagatggtacaggcaccgattttccacgtgaattcagacgatcctgaagctgtagcctttgtcactcgtctagcgcttgattaccgtaatgaattcaaacgcgatgtggtgattgatctggtgtgttatcgccgtcatggtcataacgaagcggatgagccaaacgcaactcagccattgatgtaccaaaaaatcaagaagcatccaacacctcgcaagctgtatgcagatgtgttaactgagcgtggtgagtgcgatctcgaaaccgcgactcaactggtgaatgaatatcgcgatgccctagatcacggtgaagtggtggtcaaagaatggcgtccaatggcgatgcactctgtggactggtcaccgtatttaggtcacgactggcatatcccttggaatagcgaatatgcgatggagcgattgcaagatcttggtcgtcgtgtttgccaatatccggaaagccatgtgttgcatagccgtgtagaaaaaatctatcaagatcgtctctctatgatctctggcgagaagatgctggattggggtatggctgaaacgcttgcgtatgccacattgcttgatgacggtaagcgcatccgtatctcgggtcaggactctggtcgtggaaccttcttccaccgtcacgccgttctgcataaccaaaacgatgcgagtacttatattccactctcacagatccatgctggccaaggcccgtttgaagtctttgactcagtattgtcagaagaggcggtattggcattcgaatacggctatgcgacagcggagcctagcggtttgacgttgtgggaagcacagtttggtgattttgctaacggtgcgcaggtggttattgaccagtttatctcctctggtgaacagaagtggggtcgtctatgtggcctgactatgttgctgccacacggttatgaaggccaaggccctgagcactcctctgcacgtttagagcgttacttgcagctgtgtgctgagcaaaacatgcaggtggttgttccgtctacccctgctcaggtttaccacatgattcgtcgtcaagtggttcgcccaatgcgccgccctctggtggtgatgtctcctaaatcgctgctgcgtcatccactgtgtgtctccagtatggaagatcttgcccacggtactttccagccggcgattggtgaaattgatgcgctgaatccgtcgcaagtaaaacgcgttgtgttctgttctggtaaggtttattacgatctccttgaacagcgccgagccaatgaacagcaagacgtggcgattgttcgtatcgaacagttgtacccattccctctggaagaagtacaagcggccattgcaaattacaccaatgtggtggattacgtctggtgtcaggaagaaccgcaaaaccaaggtgcttggtacagtagccaacataacttccgcgctgcgattccagcgggtgctgatctgaaatacgcaggtcgtcccgcttcggcatctcctgcggtcggctatatgtcggtgcacatgaaacaacaaaaagcgttgattgaagacgctctgaccctagcgtaa

SEQ ID NO: 6096 - protein, 936 aa, Vibrio cholerae O1 biovar eltor str. N16961
MHNGVMKAWLESSHLAGANATYVEDLYELYLSDPDLVSEEWKRVFDGLPAHPTNVVEQPHSRVRDYFRRLAQETKHYNVQVSDPEVDAKQVKVLQLINAYRFRGHEAAKLDPLGLWNRPEVAELNPSFHNLTQEDMEETFNVGSFAIGKDTMKLKDIYQSLQKIYCGSVGAEYMHITDTEQKRWIQQRLEPVVGTPVFSKEEKRTFLEELTAAEGLERYLGAKFPGAKRFSLEGGDALVPMTKEMIRHAGASGMREVVIGMAHRGRLNMLVNVLGKKPQDLFDEFAGKHGEGWGTGDVKYHQGFSADFATPGGDVHLALAFNPSHLEIVNPVVMGSVRARQDRLGDEDGSKVLPITIHGDSAIAGQGVVAETFNMSQARGFCVGGTVRIVVNNQVGFTTSNPRDTRSTMYCTDIAKMVQAPIFHVNSDDPEAVAFVTRLALDYRNEFKRDVVIDLVCYRRHGHNEADEPNATQPLMYQKIKKHPTPRKLYADVLTERGECDLETATQLVNEYRDALDHGEVVVKEWRPMAMHSVDWSPYLGHDWHIPWNSEYAMERLQDLGRRVCQYPESHVLHSRVEKIYQDRLSMISGEKMLDWGMAETLAYATLLDDGKRIRISGQDSGRGTFFHRHAVLHNQNDASTYIPLSQIHAGQGPFEVFDSVLSEEAVLAFEYGYATAEPSGLTLWEAQFGDFANGAQVVIDQFISSGEQKWGRLCGLTMLLPHGYEGQGPEHSSARLERYLQLCAEQNMQVVVPSTPAQVYHMIRRQVVRPMRRPLVVMSPKSLLRHPLCVSSMEDLAHGTFQPAIGEIDALNPSQVKRVVFCSGKVYYDLLEQRRANEQQDVAIVRIEQLYPFPLEEVQAAIANYTNVVDYVWCQEEPQNQGAWYSSQHNFRAAIPAGADLKYAGRPASASPAVGYMSVHMKQQKALIEDALTLA

SEQ ID NO: 6097 - DNA, 2802 bp, Escherichia coli O157:H7 EDL933
  CDS (1)..(2802): transl_table=11
  misc_feature (283)..(283): y is t or c
  misc_feature (300)..(300): y is t or c
  misc_feature (2724)..(2724): y is t or c
atgcagaacagcgctttgaaagcctggttggactcttcttacctctctggcgcaaaccagagctggatagaacagctctatgaagacttcttaaccgatcctgactcggttgacgctaactggcgttcgacgttccagcagttacctggtacgggagtcaaaccggatcaattccactctcaaacgcgtgaatatttccgccgcctggcgaaagacgcttcacgttactcttcaacgatctccgaccctgacaccaatgtgaagcaggtaaaagtcctgcagytcattaacgcataccgyttccgtggtcaccagcatgcgaatctcgatccgctgggactgtggcagcaagataaagtggccgatctggatccgtctttccacgatctgaccgaagcagacttccaggagaccttcaacgtcggttcatttgccagcggcaaagaaaccatgaaactcggcgagctgctggaagccctcaagcaaacctactgcggcccgattggtgccgagtatatgcacattaccagcaccgaagaaaaacgctggatccaacagcgtatcgagtctggtcgcgcgactttcaatagcgaagagaaaaaacgcttcctaagcgaactgaccgccgctgaaggccttgaacgttacctcggtgcaaaattccctggcgcaaaacgcttctcgctggaaggcggtgacgcgttaatcccgatgcttaaagagatgattcgccacgctggcaacagcggcacccgcgaagtggttctcgggatggcgcaccgtggtcgtctgaacgtgctggtgaacgtgctgggtaaaaaaccgcaagacttgttcgacgagtttgccggtaaacataaagaacacctcggcacgggtgacgtgaaataccacatgggcttctcgtctgacttccagaccgatggcggcctggtacatctggcgctggcgtttaacccgtctcaccttgagattgtcagcccggtcgttatcggttctgttcgtgcccgtctggacagacttgatgagccgagcagcaacaaagtgctgccaatcaccattcacggtgacgccgcagtgaccgggcagggcgtggttcaggaaactctgaacatgtcgaaagcgcgtggttatgaagttggcggtacggtacgtatcgttatcaacaaccaggttggcttcaccacctctaacccgctggatgcccgttcaacgccgtactgtactgatatcggtaagatggttcaggcaccgatttttcacgttaacgcggatgatccggaagccgttgcctttgtgacccgtctggcgctcgatttccgtaacacctttaaacgtgatgtcttcatcgacctggtgtgctaccgccgtcacggccacaacgaagccgacgagccgagcgcaacccagccgctgatgtatcagaaaatcaaaaaacatccgacgccgcgcaaaatctatgctgacaagctggagcaggaaaaagtggcgacgctggaagatgccaccgagatggttaacctgtaccgcgatgcgctggatgctggcgattgcgtagtggcagagtggcgtccgatgaacatgcactctttcacctggtcgccgtacctcaaccacgaatgggacgaagagtacccgaataaagttgagatgaagcgcctgcaggagctggcgaaacgcatcagcacggtgccggaagcggttgaaatgcagtctcgcgttgccaaaatttatggcgatcgccaggcgatggctgccggtgagaaactgttcgactggggcggcgcggaaaacctcgcttacgccacgctggttgacgaaggcattccggttcgcctgtcgggtgaagactccggtcgcggtaccttcttccaccgccacgcggtgatccacaaccagtctaacggttccacttacacgccgctgcaacacatccataacggccagggcgcgttccgtgtctgggactccgtactttctgaagaagcagtgctggcgtttgaatacggttatgccaccgcagaaccacgcactctgactatctgggaagctcagttcggtgacttcgccaacggtgcgcaggtggttatcgaccagttcatctcctctggcgaacagaaatggggccggatgtgtggtctggtgatgttgctgccgcacggttacgaagggcaggggccggagcactcctccgcgcgtctggaacgttatctgcaactttgtgctgagcaaaacatgcaggtgtgcgtaccgtctaccccggcacaggtttaccacatgctgcgtcgtcaggcgctgcgcgggatgcgtcgtccgctggtcgtgatgtcgccgaaatccctgctgcgtcatccgctggcggtttccagcctcgaagaactggcgaacggcaccttcctgccagccatcggtgaaatcgacgagcttgatccgaagggcgtgaagcgcgtagtgatgtgttctggtaaggtttattacgacctgctggaacagcgtcgtaagaacaatcaacacgatgtcgccattgtgcgtatcgagcaactctacccgttcccgcataaagcgatgcaggaagtgttgcagcagtttgctcacgtcaaggattttgtctggtgccaggaagagccgctcaaccagggcgcatggtactgcagccagcatcatttccgtgaagtgattccgtttggggcttctctgcgttatgcaggccgcccggcctccgcytctccggcggtagggtatatgtccgttcaccagaaacagcaacaagatctggttaatgacgcgctgaacgtcgaataa

SEQ ID NO: 6098 - protein, 933 aa, Escherichia coli O157:H7 EDL933
  misc_feature (95)..(95): The Xaa at location 95 stands for Leu, or Phe.
MQNSALKAWLDSSYLSGANQSWIEQLYEDFLTDPDSVDANWRSTFQQLPGTGVKPDQFHSQTREYFRRLAKDASRYSSTISDPDTNVKQVKVLQXINAYRFRGHQHANLDPLGLWQQDKVADLDPSFHDLTEADFQETFNVGSFASGKETMKLGELLEALKQTYCGPIGAEYMHITSTEEKRWIQQRIESGRATFNSEEKKRFLSELTAAEGLERYLGAKFPGAKRFSLEGGDALIPMLKEMIRHAGNSGTREVVLGMAHRGRLNVLVNVLGKKPQDLFDEFAGKHKEHLGTGDVKYHMGFSSDFQTDGGLVHLALAFNPSHLEIVSPVVIGSVRARLDRLDEPSSNKVLPITIHGDAAVTGQGVVQETLNMSKARGYEVGGTVRIVINNQVGFTTSNPLDARSTPYCTDIGKMVQAPIFHVNADDPEAVAFVTRLALDFRNTFKRDVFIDLVCYRRHGHNEADEPSATQPLMYQKIKKHPTPRKIYADKLEQEKVATLEDATEMVNLYRDALDAGDCVVAEWRPMNMHSFTWSPYLNHEWDEEYPNKVEMKRLQELAKRISTVPEAVEMQSRVAKIYGDRQAMAAGEKLFDWGGAENLAYATLVDEGIPVRLSGEDSGRGTFFHRHAVIHNQSNGSTYTPLQHIHNGQGAFRVWDSVLSEEAVLAFEYGYATAEPRTLTIWEAQFGDFANGAQVVIDQFISSGEQKWGRMCGLVMLLPHGYEGQGPEHSSARLERYLQLCAEQNMQVCVPSTPAQVYHMLRRQALRGMRRPLVVMSPKSLLRHPLAVSSLEELANGTFLPAIGEIDELDPKGVKRVVMCSGKVYYDLLEQRRKNNQHDVAIVRIEQLYPFPHKAMQEVLQQFAHVKDFVWCQEEPLNQGAWYCSQHHFREVIPFGASLRYAGRPASASPAVGYMSVHQKQQQDLVNDALNVE

SEQ ID NO: 6099 - DNA, 2802 bp, Salmonella typhimurium LT2
  CDS (1)..(2802): transl_table=11
atgcagaacagcgctttgaaagcctggttggactcttcttacctctctggttcgaatcagagctggatagaacagctctatgaagacttcttaaccgatcctgactcggtagacgctaactggcgtttgacgttccagcagttacctggtaccggagtcaaaccggatcaactccattcaaaaacacgtgaatatttccggcggcaggcgttggctggctcacgtcactcttctacgatttccgaccctgacaccaatgtgaagcaggttaaagtcctgcagcttatcaacgcttatcgtttccgtggccatcaacatgcaaacctcgatccgctgggactgtggaagcaagaacgcgtggcggatctcgatccttctttccatgatttgaccgaggccgatttccaggaaaccttcaatgtcggctcctttgccagcggcaaagagacgatgaagctgggcgagctgctcgacgcgctcaaacagacctactgcggcccgattggcgctgagtatatgcacatcaccagcaccgaagagaaacgctggatccaacagcgcatcgaatccggtcgtgcggcctttagcgctgacgagaaaaaacgcttcctgaacgaactgaccgccgctgaagggctggaacgttatctgggcgccaaattcccgggtgcgaaacgtttctcgctcgaggggggagatgcgctgatacccatgctgaaagagatggttcgccatgcgggtaacagcggcactcgcgaagtggtgctggggatggcgcaccgcggtcgcctgaacgtgctgatcaacgtactgggtaaaaaaccgcaggatctgttcgacgaatttgccggtaagcataaagaacatctgggtaccggcgacgtgaagtatcacatgggcttctcgtcagatatcgaaaccgaaggcggtctggttcacctggcgctggcgtttaacccatcgcatctggaaattgtgagcccggtggtgatgggctccgtgcgcgcccgtctggacagactggacgaaccgagcagcaacaaagtgttgccgatcactattcacggcgacgccgcggtgaccggccagggcgtggttcaggaaaccctgaacatgtcgaaagcgcgcggttacgaagtgggcggtacggtacgtatcgttatcaacaaccaggtgggtttcaccacctctaacccactggatgcgcgttcaacgccttactgcaccgatatcggtaaaatggtccaggcgccgattttccacgtcaatgcggacgatccggaagccgtcgcttttgtgacccgtctggcgctggacttccgtaatacctttaaacgcgatgtctttatcgatctggtgtgctaccgccgtcacggccacaacgaagccgacgagccaagcgcaacccagccgctgatgtaccagaaaatcaaaaagcatccgacgccgcgtaaaatctacgccgacaaactggaagctgataaggtcgcaacgctggaagatgccactgaaatggtcaacctctatcgcgatgcgctggatgcaggcgaatgcgtggtgaaagagtggcgtccgatgaatatgcactcgttcacctggtcgccgtatctaaaccacgaatgggatgaagcatacccgaacaaggtagaaatgaagcgtctgcaggagctggcaaaacgtatcagcaccgtgccggaagccattgaaatgcagtctcgcgtggcgaaaatttatggcgaccgtcaggcaatggcggcaggcgagaaattgtttgactggggcggcgcggaaaatctggcttacgccacgctggtcgatgaaggcattccggtgcgcctgtccggggaagactctggtcgcggcaccttcttccatcgtcatgcggtgatccacaaccagacgaacggctcaacgtatacgccgttgcagcatattcacagcggtcagggacagtttaaagtctgggactccgtgctgtctgaagaagcggtactggcttttgaatacggttatgccacggcggaaccacgtaccctgactatctgggaagcgcagtttggcgattttgccaacggcgcgcaggtagtgattgaccagttcatctcctccggcgagcagaaatggggccggatgtgcggtctggtgatgctgttgccgcatggctatgaagggcagggcccggagcactcttccgcgcgtctggaacgttatctgcaactttgcgccgagcagaatatgcaggtttgcgtgccgtccaccccggcgcaggtctaccatatgctgcgccgtcaggcgctgcgcgggatgcgtcgtccgctggtggtgatgtcgccgaaatcgctgctgcgtcacccgctggcggtttccacgcttgatgaactggcgaacggttccttccagccggccattggcgaaattgacgagctggaccctaaagccgtaaaacgcgtggtaatgtgttctggtaaggtttattacgacctgctggaacaacgtcgcaaaaacgaccagaaagatgtcgctatcgtgcgcatcgaacagctctatccgttcccgcataaagcggtgcaggaagcgctgcaaccatacgctcacgtccatgattttgtctggtgccaggaagagccgctcaaccagggcgcatggtactgcagtcagcatcatttccgtgaagtgactccgtttggggccgctctgcgttatgcaggtcgcccggcctccgcctctccggcggtagggtatatgtccgttcaccagaaacagcaacaagatctggttaatgacgcgctgaacgtcgattaa

SEQ ID NO: 6100 - protein, 933 aa, Salmonella typhimurium LT2
MQNSALKAWLDSSYLSGSNQSWIEQLYEDFLTDPDSVDANWRLTFQQLPGTGVKPDQLHSKTREYFRRQALAGSRHSSTISDPDTNVKQVKVLQLINAYRFRGHQHANLDPLGLWKQERVADLDPSFHDLTEADFQETFNVGSFASGKETMKLGELLDALKQTYCGPIGAEYMHITSTEEKRWIQQRIESGRAAFSADEKKRFLNELTAAEGLERYLGAKFPGAKRFSLEGGDALIPMLKEMVRHAGNSGTREVVLGMAHRGRLNVLINVLGKKPQDLFDEFAGKHKEHLGTGDVKYHMGFSSDIETEGGLVHLALAFNPSHLEIVSPVVMGSVRARLDRLDEPSSNKVLPITIHGDAAVTGQGVVQETLNMSKARGYEVGGTVRIVINNQVGFTTSNPLDARSTPYCTDIGKMVQAPIFHVNADDPEAVAFVTRLALDFRNTFKRDVFIDLVCYRRHGHNEADEPSATQPLMYQKIKKHPTPRKIYADKLEADKVATLEDATEMVNLYRDALDAGECVVKEWRPMNMHSFTWSPYLNHEWDEAYPNKVEMKRLQELAKRISTVPEAIEMQSRVAKIYGDRQAMAAGEKLFDWGGAENLAYATLVDEGIPVRLSGEDSGRGTFFHRHAVIHNQTNGSTYTPLQHIHSGQGQFKVWDSVLSEEAVLAFEYGYATAEPRTLTIWEAQFGDFANGAQVVIDQFISSGEQKWGRMCGLVMLLPHGYEGQGPEHSSARLERYLQLCAEQNMQVCVPSTPAQVYHMLRRQALRGMRRPLVVMSPKSLLRHPLAVSTLDELANGSFQPAIGEIDELDPKAVKRVVMCSGKVYYDLLEQRRKNDQKDVAIVRIEQLYPFPHKAVQEALQPYAHVHDFVWCQEEPLNQGAWYCSQHHFREVTPFGAALRYAGRPASASPAVGYMSVHQKQQQDLVNDALNVD

SEQ ID NO: 6101 - DNA, 3051 bp, Agrobacterium tumefaciens str. C58
  CDS (1)..(3051): transl_table=11
gtgaacggccctaacggcatcgaggaggcggacggacaagtccgcaggaacacaatggcaaggcaagaagcgaacgagcagtttcagatcacgtcgtttctggacggcgcgaatgcagcctatatcgagcagctctatgcccggtacgaagaggatccctcttccgtgtcgccggagtggcagagcttcttcaaggcactgtccgataatccggaagatgtgaagaaggcggccaagggcgcctcctggaagcgtgccaactggccgatcccggcgaatggcgaactggtctccgcactcgacggtaactgggccacggtcgaaaaggccattgagaaaaaggtccaggcgaaggctgaagccaagagcgccgatacaggcaagcccgtcagcgaagcggaagtgctgcaagcgacccgtgacagcgttcgcgccatcatgatgatccgcgcctaccgcatgcgcggccacctgcacgccaagctcgatccgctcggcatcgccagcgccgtcgaggattacaacgagctttcgccgaagtcctatggcttcgaggaaagcgactacgaccgcaagattttcatcgataacgtgctcggcctcgaatatgcgaccgtgcgcgaaatggtcgagattctcgagcgtacctattgctcgacgctcggcgtcgaattcatgcacatgtccaacccggaagaaaagggctggattcaggaacgcatcgaaggcccggacaagggtgtggatttcacgccggaaggcaagaaagccattctgtccaagctggtcgaagccgaaggttacgagcagttcctcgacgtgcgtttcaagggcaccaagcgtttcggcctcgatggcggtgaatcgctgatcccggcactcgagcagatcatcaagcgcggcggccaggacggactggaagaagtcgtgctcggcatggcccaccgcggtcgcctgaacgttctgaccaacgtgatgggcaagccgcaccgcgccgtgttccacgagtttaagggcggttcgttcaagccagacgacgttgaaggttcgggtgacgtgaagtaccatctcggtgcctcctccgaccgcgaattcgacggcaacaaggttcacctgtcgctgacggccaacccgtcgcaccttgaaatcgtcaatcctgtcgtcatgggcaaggcccgcgccaagcaggaccaactggccaagacatgggacggcgacatcattccgctgtccgaacgcgccaaagtgctgccgctgcttctgcacggcgatgccgcttttgcgggtcagggcgtggttgccgaaattctcggtctttccggcctgcgtggccatcgcgttgccggcaccatgcacttcatcatcaacaaccagatcggcttcacgaccaatccggccttctcgcgctcgtcgccttatccgtccgacgttgcgaagatgatcgaagcgccgatcttccacgtcaacggtgacgatccggaagcggtggtctatgcggcgaaggtcgcgaccgaatatcgcatgaagttccacaagcctgtcgtcatcgacatgttctgttaccgccgcttcggccataacgaaggcgatgagccggcgttcacgcagccgaagatgtacaaggtcatccggggccacaagaccgtcgcccgtatctatgccgaccgcctgatcgcggaaggcctgatcaccgagggcgatttcgagaaggtcaaggccgactggcgcgctcatctcgagcaggagttcgaggcaggccagtcctacaagcctaacaaggccgactggctggatggtcagtggtccggcctgcgcgccgccgacaatgccgatgagcagcgtcgtggcaagaccggcgtgccgatgaagcagctgaaggaaatcggcaagaagctgtcgaccattcctgaaggtttcaccgcgcatcgcacgatccagcgtttcatggaaaaccgctcgcagatgatcgaaacgggcgaaggcatcgactgggctatggcggaagcgctggctttcggttcgctcgttgttgacggccacaagatccgtctttccggtcaggattgcgaacgcggcaccttctcgcagcgccactcggttctttacgatcaggagaccgaagagcgttacatcccgctggcgaacctcgccccgacgcaggcccgttacgaagtcatcaactcgatgctttcggaagaagccgttctcggtttcgaatacggctattcgcttgcccgcccgaatgcgctgacgctctgggaagcccagttcggcgacttcgccaacggcgcgcaggtggtgttcgaccagttcatctcctcgggtgaacgcaagtggctgcgcatgtccggtctcgtctgccttctgccgcatggttatgaaggccagggcccggaacattcgtccgctcgtctggaacgctggttgcagatgtgcgccgaagacaatatgcaggtcgccaacgttacgacgccggctaactacttccatatcctgcgccgccagatgaagcgtgacttccgcaagccgctgatcctgatgacgccgaagtcgctgctgcgtcacaagcgcgccacctcgtctctggcggaactggccggcgagtcctccttccaccgtctcctgtgggacgatgctgaagtcatcaaggacggcccgatcaagctgcagaaggatgcgaagatccgccgtgtcgtcatgtgcaccggcaaggtctattacgatcttctcgaagagcgtgaaaagcgcggtatcgacgacgtctacctgctgcgcgtcgaacagctttatccgttcccggcaaaggcgctcatcaacgagctttcccgtttccgccacgcggaaatggtctggtgccaggaagagccgaagaacatgggttcgtggtcgttcatcgatccttacctggaatgggttctggcgcatatcgacgccaagtaccagaaggtccgttacacgggccgtccggcggccgcctctccggcgaccggcctgatgtccaaacatctggcgcagcttgctgcgttcctggaagacgcgctgggagagtga

SEQ ID NO: 6102 - protein, 1016 aa, Agrobacterium tumefaciens str. C58
MNGPNGIEEADGQVRRNTMARQEANEQFQITSFLDGANAAYIEQLYARYEEDPSSVSPEWQSFFKALSDNPEDVKKAAKGASWKRANWPIPANGELVSALDGNWATVEKAIEKKVQAKAEAKSADTGKPVSEAEVLQATRDSVRAIMMIRAYRMRGHLHAKLDPLGIASAVEDYNELSPKSYGFEESDYDRKIFIDNVLGLEYATVREMVEILERTYCSTLGVEFMHMSNPEEKGWIQERIEGPDKGVDFTPEGKKAILSKLVEAEGYEQFLDVRFKGTKRFGLDGGESLIPALEQIIKRGGQDGLEEVVLGMAHRGRLNVLTNVMGKPHRAVFHEFKGGSFKPDDVEGSGDVKYHLGASSDREFDGNKVHLSLTANPSHLEIVNPVVMGKARAKQDQLAKTWDGDIIPLSERAKVLPLLLHGDAAFAGQGVVAEILGLSGLRGHRVAGTMHFIINNQIGFTTNPAFSRSSPYPSDVAKMIEAPIFHVNGDDPEAVVYAAKVATEYRMKFHKPVVIDMFCYRRFGHNEGDEPAFTQPKMYKVIRGHKTVARIYADRLIAEGLITEGDFEKVKADWRAHLEQEFEAGQSYKPNKADWLDGQWSGLRAADNADEQRRGKTGVPMKQLKEIGKKLSTIPEGFTAHRTIQRFMENRSQMIETGEGIDWAMAEALAFGSLVVDGHKIRLSGQDCERGTFSQRHSVLYDQETEERYIPLANLAPTQARYEVINSMLSEEAVLGFEYGYSLARPNALTLWEAQFGDFANGAQVVFDQFISSGERKWLRMSGLVCLLPHGYEGQGPEHSSARLERWLQMCAEDNMQVANVTTPANYFHILRRQMKRDFRKPLILMTPKSLLRHKRATSSLAELAGESSFHRLLWDDAEVIKDGPIKLQKDAKIRRVVMCTGKVYYDLLEEREKRGIDDVYLLRVEQLYPFPAKALINELSRFRHAEMVWCQEEPKNMGSWSFIDPYLEWVLAHIDAKYQKVRYTGRPAAASPATGLMSKHLAQLAAFLEDALGE

SEQ ID NO: 6103 - DNA, 3030 bp, Schizosaccharomyces pombe 972h-
  CDS (1)..(3030)
atgcttcgtttcataccctcttcagctaaagcaagggctttacgtcgtagcgccgtaactgcctaccgtctcaacagattgacgtgtctttcttctcttcaacaaaatcgtacctttgctactcaacctactgatgattttttgactggaggcgccgccgattacgtagatgaaatgtatgatgcatggaaaaaagatcctaacagtgtacatgcatcttggcaagcatatttcaaaaacgttcaggaacgtggagtttccccttccaaagcttttcaggctccacctttgctggactatgctgattcttatactgctttggactcttctctcattaatggtaataactatgctgatatcgatgttggtatttacatgaaagttcagctcttggttcgtgcctatcaatcccgtggtcatcatttggccaagctcgatccgcttggcatcaacgttaaccacaaccgtccttccgaattaacacttgaacattatggttttacggaatctgaccttaatcgcacaattcatctgggtcctggtattttgcctaactttcgtgaagctggccggaaaaccatgactttacgtgagattgtggaaacttgcgaaaaaatttattgcggaagctttgccgttgagttcactcatatttcctcacgtaagcgctccaattggatactgtctcacttagagactcccactcctttcagatactctcatgatcaaaaaattatgatttttgatcgtctgagttgggctgatagttttgaacgtttcctgttcaccaagtttcctaacgataagcgctttggcctcgaagggtgtgaagccatggttcccggtatgaaagcgcttattgatcgttctgttgatgagggtattagtaacattgttattggcatggctcatcgaggtcgtctgaatcttcttcacaatattgttcgtaagcctgctcaagctatcttctcagaatttcgtggtacccaggatcctgacgatgagggatctggtgacgtaaagtaccatctaggtatgaattatcaacgtcccacaccatctggtaaacgtgttagcctgtctcttgtagctaatccttcacatttggaagccgaggatcctgtggtacttggtaaagttcgtgctatccaacattatactagtgatgaggctagtcacgaacagtctatgggtattttgattcatggtgatgcggcttttgctgctcagggtgttgtatatgaaacatttggtttacatgctttacctggctacagcactggtggtactgttcacattgtcattaataatcaaattggatttactactgatcctcgttttgctcgctctaccccctactgtacggacattgccaagtctatggaggctcctattttccatgtcaatggagatgatgtagaggccgtcactttcatctgccaacttgcagcagattggcgtaaagctttcaaaacggatgttgttgttgatattgtttgttaccgtcgacatggtcacaatgaaaccgatcagccttctttcacgcaaccaagaatgtataaggctattgccaagcatccccctacgtttaaaatatacacacaacaacttttacaagaaaagacggtttcaaaagcagaagttgacgcacaagagaagagagtctgggacattctcgagagctctttcgagagcagcaaaaactacaagtctgaccatagggaatggttatccaatccttgggttggttttgcatctcctaaagatttaatgactaaaatccttccttcttatcctactggtgtaaacatcgatacattgaagcaaattggcaaggcattgtatactcttccggaaggttttgatgcccacagaaatcttaaaaggatcttgaacaatcgtaacaagtcaattagctcaggtgaaggtatcgatatgccaaccgccgaggcattggcctttggtactcttttagaagaaggtcatcacgttcgtgtgagcggtcaagatgtcgaacgtggcacattttcccaaagacacgctgttttacacgatcagagttccgaaaacgtttacattccattgaatcatctaagccctaatcaagcaagctttgttattcgtaactcttctctgtctgaatatggtgttttaggttttgagtatggttactctttgtcatcacctaatgctcttgtcgtctgggaagctcaatttggtgattttgctaacaatgctcaatgtatcatagatcaatttattgcagctggtgaaactaagtggcttcaacgtaccggtatcgtactttctttaccacatggttatgatggtcaaggtcctgagcactcttctgctcgtatggaaagatatttacaattatgtaatgaagaccctcgagagttcccttccgaagagaagttgcaacgtcaacatcaagattgtaatattcaagccatttatgttactaagccatcgcagtatttccatgctcttaggcgtaacattcaccggcaattccgtaaaccattagttatctttttctcaaaatcattacttcgtcaccctgctgcccgttccactatcgatgagtttgacgaaaagcatggatttaagctgattcttgaagaggaggagcatggaaaatctattttaccacctgaaaagattgaaaagctgattatctgctccggccaagtttgggtcgccctctctaaagctcgtgaagaaaacaaaattgataacattgctattactcgtgttgagcaattgcatccttttggctggaaacagatggcagccaatatttcgcagtatcctaatttgaaggaaattatttggtgccaagaagagcccctgaatgcaggtgcttggacttacatggaaccacgtatttatacaattttgaagcaccttggacgtgatttgccagttcgctatgctggacgtccgccatctgcaagtgtcgctgctggaaacaagcagcagcatttggctgaacaagagcaatttttgaatgatgccctactttaa

SEQ ID NO: 6104 - protein, 1009 aa, Schizosaccharomyces pombe 972h-
MLRFIPSSAKARALRRSAVTAYRLNRLTCLSSLQQNRTFATQPTDDFLTGGAADYVDEMYDAWKKDPNSVHASWQAYFKNVQERGVSPSKAFQAPPLLDYADSYTALDSSLINGNNYADIDVGIYMKVQLLVRAYQSRGHHLAKLDPLGINVNHNRPSELTLEHYGFTESDLNRTIHLGPGILPNFREAGRKTMTLREIVETCEKIYCGSFAVEFTHISSRKRSNWILSHLETPTPFRYSHDQKIMIFDRLSWADSFERFLFTKFPNDKRFGLEGCEAMVPGMKALIDRSVDEGISNIVIGMAHRGRLNLLHNIVRKPAQAIFSEFRGTQDPDDEGSGDVKYHLGMNYQRPTPSGKRVSLSLVANPSHLEAEDPVVLGKVRAIQHYTSDEASHEQSMGILIHGDAAFAAQGVVYETFGLHALPGYSTGGTVHIVINNQIGFTTDPRFARSTPYCTDIAKSMEAPIFHVNGDDVEAVTFICQLAADWRKAFKTDVVVDIVCYRRHGHNETDQPSFTQPRMYKAIAKHPPTFKIYTQQLLQEKTVSKAEVDAQEKRVWDILESSFESSKNYKSDHREWLSNPWVGFASPKDLMTKILPSYPTGVNIDTLKQIGKALYTLPEGFDAHRNLKRILNNRNKSISSGEGIDMPTAEALAFGTLLEEGHHVRVSGQDVERGTFSQRHAVLHDQSSENVYIPLNHLSPNQASFVIRNSSLSEYGVLGFEYGYSLSSPNALVVWEAQFGDFANNAQCIIDQFIAAGETKWLQRTGIVLSLPHGYDGQGPEHSSARMERYLQLCNEDPREFPSEEKLQRQHQDCNIQAIYVTKPSQYFHALRRNIHRQFRKPLVIFFSKSLLRHPAARSTIDEFDEKHGFKLILEEEEHGKSILPPEKIEKLIICSGQVWVALSKAREENKIDNIAITRVEQLHPFGWKQMAANISQYPNLKEIIWCQEEPLNAGAWTYMEPRIYTILKHLGRDLPVRYAGRPPSASVAAGNKQQHLAEQEQFLNDALL

SEQ ID NO: 6105 - DNA, 2760 bp, Drosophila melanogaster
  CDS (1)..(2760)
atgctgcgttatctggcgctttcggaggcgggaatcgcaaaactgccacgcccacaatcgcggtgctatcacagcgaaaagggcgtttggggctataagccgattgcccagcgtgaatttcaagtggccgaggatgtgcgggcctcaaggaactcgcaggccaacgtctatcgctttgtggaggcctttcgccagcatgggcacaaattggcagccgtaaatcccatcagcatcaggacgagccagcaggagctgcaggaattaagtcccgcattttatggactgcagacacaggagccggtgcgcaccgatggccttttaagtggtccgcaggtggcccacaacgtcgcccagctggagcagctgctcaaggacatttactgcggccgctcaaccagcgccgagttctcctacgtcgaggacatcgaggagcgtgagtggctggcccggaactttgagacgctggaccagcagcagctgggaaaaagcgagcgctgcgaaatcgccgagctgttaattaagtcgcaggcctgggacaatttcatggcactcaagtttcccacagtcaagcgatacggaggcgaaggagccgagtccatgctagccttcttctggcaactgctccgtgacagtgtccaagcgaacatcgagcacgtggtcctggcgatgccccatcgaggaaggactccgctgcaggcggcgctcctcaacatgcggccggcgaaagttttccgcaaactcagcggcgcatccgagttttccgaagacatcgaggccatgtccgacgtcataagtcatttccatgtttccgagcagctgaaaatactgggcaagaagctgagcttcagcatggtgcggaatccctcccatctggaggcggccaatcctgtggccatgggaaaaacgcgatcgaaacagcaagccagaggagagggtgccttcggggatggcagtcagccctttggagagcacgtgctcaacgtaatccttcatggtgatgctgcgttcgccggccagggaatcaaccaggagtgcctcaacatggcctatgtgcctcacttcgaggtgggcggaagtctgcacctgattgtcaacaaccaggtgggattcaccacgcccggagatcgaggacgatccactgcctacacctcagacttggccaagtctattcaggctcctgtgttccatgtcaacggcgatgatcccgaggctttggccagggtcacaagcttggcctttaggtaccagagggaattccgcaaagacatctttattgatctgaactgcttcagaaggtggggtcacaacgagctggatgaccccaccttcaccaatcccttggtctacaagattgttcaccagcgggaatcggttccggacttgtatgcccagcagttggccaaggagcaggttctatcagaatcgaaggccaaggagatgagggatgagtacatgaaatatctaggcgaggagctagccttggctcctgcataccagccaccaccttcctacttcgagaagcagtggacgaactttcagttggctccctccaaggagctaacctattgggacactggcttggattactcactacttcattacattggtcagcagagtgtgactttccccgaagactttaacatccatccccacctgctgaaaacgcatgtcaatgctcggctgaagaaactggaaaacggagtcaagatcgattggtccacagccgaagccctggctattgggagcctgatgtaccagggacacaatgtgaggatcagtggtgaggacgtgggtcggggaaccttctcccatcgccacgccatgctggtggatcagcagaccaacgagatgttcattcccttgaacagcatggagggcggaaacggtggaaaactggagctggctcacagtattctgtcggaggaggcggtgctgggattcgagtacggcatggccattgacaatcccaacaacctgattatctgggaagcgcagtttggtgactttgccaatggagcacaaattataatcgacaccttcatcgtctcgggagaaaccaagtggatggagtccaacgcccttgtgatgctactgccccacggatacgacggcgctgcatcggagcacagttcctgtcgcatcgagcgcttcctgcagctctgcgactccaaggaaacatccgccgatggcgattccgtcaacgtgcacatcgtgaaccccaccacgcccgcccaatactatcatgtgctgcgtcgccaactggcaaggaacttccgcaagcccctcgtggtggtggcccccaaaacgttgctccgtcttcctgcggccacatccacgcacgaggacttccagccgggcacgctcttccacaatgtcctgggagacaccatagcgaagcctgagcaggtgcgcaaggtcatcctgtgcagtggaaagcactactacactctcgccgaggagcgggagaagcggcaggcctacgacacggccattctgcgcctggagtccctgtgtcctttccccatccaggagctgcaggcccagctggcccagtacggcaacgtgcaatcttttgtttggagccaggaggagcatcgcaacatgggcgcctggacgtttgtgcggccacgttttgaaaatttaattggccaacagctccactactgcggtcgctgcgaggcacccacccccgccaccggaatcggaaaagtgcataaacgggaagtcgatgagattgttgctgccccattcgaactttag

SEQ ID NO: 6106 - protein, 919 aa, Drosophila melanogaster
MLRYLALSEAGIAKLPRPQSRCYHSEKGVWGYKPIAQREFQVAEDVRASRNSQANVYRFVEAFRQHGHKLAAVNPISIRTSQQELQELSPAFYGLQTQEPVRTDGLLSGPQVAHNVAQLEQLLKDIYCGRSTSAEFSYVEDIEEREWLARNFETLDQQQLGKSERCEIAELLIKSQAWDNFMALKFPTVKRYGGEGAESMLAFFWQLLRDSVQANIEHVVLAMPHRGRTPLQAALLNMRPAKVFRKLSGASEFSEDIEAMSDVISHFHVSEQLKILGKKLSFSMVRNPSHLEAANPVAMGKTRSKQQARGEGAFGDGSQPFGEHVLNVILHGDAAFAGQGINQECLNMAYVPHFEVGGSLHLIVNNQVGFTTPGDRGRSTAYTSDLAKSIQAPVFHVNGDDPEALARVTSLAFRYQREFRKDIFIDLNCFRRWGHNELDDPTFTNPLVYKIVHQRESVPDLYAQQLAKEQVLSESKAKEMRDEYMKYLGEELALAPAYQPPPSYFEKQWTNFQLAPSKELTYWDTGLDYSLLHYIGQQSVTFPEDFNIHPHLLKTHVNARLKKLENGVKIDWSTAEALAIGSLMYQGHNVRISGEDVGRGTFSHRHAMLVDQQTNEMFIPLNSMEGGNGGKLELAHSILSEEAVLGFEYGMAIDNPNNLIIWEAQFGDFANGAQIIIDTFIVSGETKWMESNALVMLLPHGYDGAASEHSSCRIERFLQLCDSKETSADGDSVNVHIVNPTTPAQYYHVLRRQLARNFRKPLVVVAPKTLLRLPAATSTHEDFQPGTLFHNVLGDTIAKPEQVRKVILCSGKHYYTLAEEREKRQAYDTAILRLESLCPFPIQELQAQLAQYGNVQSFVWSQEEHRNMGAWTFVRPRFENLIGQQLHYCGRCEAPTPATGIGKVHKREVDEIVAAPFEL

SEQ ID NO: 6107 - DNA, 2802 bp, Shigella flexneri 2a str. 301
  CDS (1)..(2802): transl_table=11
atgcagaacagcgctttgaaagcctggttggactcttcttacctctctggcgcaaaccagagctggatagaacagctctatgaagacttcttaaccgatcctgactcggttgacgctaactggcgttcgacgttccagcagttacctggtacgggagtcaaaccggatcaattccactctcaaacgcgtgaatatttccgccgcctggcgaaagacgcttcacgttactcttcaacgatctccgaccctgacaccaatgtgaagcaggttaaagtcctgcagctcattaacgcataccgcttccgtggtcaccagcatgcgaatctagatccgctgggactgtggcagcaagataaagtggccgatctggatccgtctttccacgatctgaccgaagcagacttccaggaaaccttcaacgtcggttcatttgccagcggcaaagaaaccatgaaactcggcgagcttatttccgccctcaagcaaacctactgcggcccgattggtgccgagtatatgcacatcaccagcaccgaagaaaaacgctggatccaacagcgtatcgagtctggtcgcgcgactttcaatagcgaagagaaaaaacgcttcttaagcgaactgaccgccgctgaaggccttgagcgttacctcggcgcaaaattccctggcgcaaaacgcttctcgctggaaggcggtgacgcgttaatcccgatgcttaaagagatgatccgccacgctggcaacagcggcacccgcgaagtggttctcgggatggcgcaccgtggtcgtctgaacgtgctggtgaacgtgctgggtaaaaaaccgcaagacttgttcgacgagttcgccggtaaacataaagaacacctcggcacaggcgacgtgaaataccacatgggcttctcgtctgacttccagaccgatggcggcctggtgcacctggcgctggcgtttaacccgtctcaccttgagattgtaagcccggtcgttatcggctctgttcgtgcccgtctggacagacttgatgagccgaacagcaacaaagtgctgccaatcaccatccacggtgacgccgcagtgaccgggcagggcgtggttcaggaaactctgaacatgtcgaaagcgcgtggttatgaagttggcggtacggtacgtatcgttatcaacaaccaggttggtttcaccacctctaacccgctggatgcccgttctacaccgtactgtactgatatcggtaagatggttcaggcaccgattttccacgttaacgcggatgatccggaagccgttgcctttgtgacccgtctggcgctcgatttccgtaacacctttaaacgtgatgtcttcatcgacctggtatgctaccgccgtcacggccacaacgaagccgacgagccgagcgcaacccagccactgatgtatcagaaaatcaaaaaacatccgacaccgcgcaaaatctacgctgacaagctggagcaggaaaaagtggcgacgctggaagatgccaccgagatggttaacctgtaccgcgatgcgctggatgctggcgattgcgtagtggcagagtggcgtccgatgaacatgcactctttcacctggtcgccgtacctcaaccacgaatgggacgaagagtacccgaacaaagttgagatgaagcgcctgcaggaactggctaaacgtatcagtacggtaccagaagcagttgaaatgcagtctcgcgttgccaagatttatggcgatcgccaggcgatggcagccggtgagaaactgttcgactggggcggtgcggaaaacctcgcttacgccacgctggttgatgaaggcattccggttcgcctgtcgggtgaagactccggtcgcggtaccttcttccaccgccacgcggtgatccacaaccagtctaacggttccacttacacgccgctgcaacacatccataacggtcagggcgcgttccgtgtctgggactccgtactgtcagaagaagccgtgctggcgtttgaatatggttatgccaccgcagaaccacgcaccctgaccatctgggaagcgcagttcggtgacttcgccaacggtgcgcaggtggttatcgaccagttcatctcctctggcgagcagaaatggggccggatgtgtggtctggtgatgttgctgccgcacggttacgaagggcaggggccggagcactcctccgcgcgtctggaacgttatctgcaactttgtgctgagcaaaacatgcaggtttgcgtaccgtctaccccggcacaggtttaccacatgctgcgtcgtcaggcgctgcgcgggatgcgtcgtccgctggtcgtgatgtcgccgaaatccctgctgcgtcatccgctggcggtttccagcctcgaagaactggcgaacggcaccttcctgccagccatcggtgaaatcgacgagcttgatccgaagggcgtgaagcgcgtagtgatgtgttctggtaaggtttattacgacctgctggaacagcgtcgtaagaacaatcaacacgatgtcgccattgtgcgtatcgagcaactctacccgttcccgcataaagcgatgcaggaagtgttgcagcagtttgctcacgtcaaggattttgtctggtgccaggaagagccgctcaaccagggcgcatggtactgcagccagcatcatttccgtgaagtgattccgtttggggcttctctgcgttatgcaggccgcccggcctccgcctctccggcggtagggtatatgtccgttcaccagaaacagcaacaagatctggttaatgacgcgctgaacgtcgaataa

SEQ ID NO: 6108 - protein, 933 aa, Shigella flexneri 2a str. 301
MQNSALKAWLDSSYLSGANQSWIEQLYEDFLTDPDSVDANWRSTFQQLPGTGVKPDQFHSQTREYFRRLAKDASRYSSTISDPDTNVKQVKVLQLINAYRFRGHQHANLDPLGLWQQDKVADLDPSFHDLTEADFQETFNVGSFASGKETMKLGELISALKQTYCGPIGAEYMHITSTEEKRWIQQRIESGRATFNSEEKKRFLSELTAAEGLERYLGAKFPGAKRFSLEGGDALIPMLKEMIRHAGNSGTREVVLGMAHRGRLNVLVNVLGKKPQDLFDEFAGKHKEHLGTGDVKYHMGFSSDFQTDGGLVHLALAFNPSHLEIVSPVVIGSVRARLDRLDEPNSNKVLPITIHGDAAVTGQGVVQETLNMSKARGYEVGGTVRIVINNQVGFTTSNPLDARSTPYCTDIGKMVQAPIFHVNADDPEAVAFVTRLALDFRNTFKRDVFIDLVCYRRHGHNEADEPSATQPLMYQKIKKHPTPRKIYADKLEQEKVATLEDATEMVNLYRDALDAGDCVVAEWRPMNMHSFTWSPYLNHEWDEEYPNKVEMKRLQELAKRISTVPEAVEMQSRVAKIYGDRQAMAAGEKLFDWGGAENLAYATLVDEGIPVRLSGEDSGRGTFFHRHAVIHNQSNGSTYTPLQHIHNGQGAFRVWDSVLSEEAVLAFEYGYATAEPRTLTIWEAQFGDFANGAQVVIDQFISSGEQKWGRMCGLVMLLPHGYEGQGPEHSSARLERYLQLCAEQNMQVCVPSTPAQVYHMLRRQALRGMRRPLVVMSPKSLLRHPLAVSSLEELANGTFLPAIGEIDELDPKGVKRVVMCSGKVYYDLLEQRRKNNQHDVAIVRIEQLYPFPHKAMQEVLQQFAHVKDFVWCQEEPLNQGAWYCSQHHFREVIPFGASLRYAGRPASASPAVGYMSVHQKQQQDLVNDALNVE

SEQ ID NO: 6109 - DNA, 2820 bp, Shewanella oneidensis MR-1
  CDS (1)..(2820): transl_table=11
atgcaccaaggcatcatgaaagcctggctcgaatcatctcacttaagtggtgcaaattcgacctacgtagaagagatgtatgaagcctatcaagaagaccctcagtcagtttctgacgattggcgtgcggtttttgataatctccctccggtgaacggtgcctctaaagacgcgcctgaagcggctcactccaaagtacgtgattattttcgcagtttagcgatggaagggcgtcataagagcgcagctcgtgtgaccgatcctgagttggatgctaagcaagttaaagtgctacagctgatcaacgcccaccgtttccgtggtcaccaaggtgctaaccttgacccgttagaattgtggaaacgtgaacctgttgccgatttagatcccgcattccacggtctgaccaaagaagacatggagcgtgagttcaatactggctcgttcgcccacggcggcgaaaccatgaagttggcggatttagtcaaagcgcttaaagccacatattgtggttctatcggcgccgaatacatgcatattaccgacaccgatgaaaagcgttggatccaacaacgtctcgaaccatccttaggtaaagccaactacgataaaagcgttaagacccgcattctcgaaggcctaaatgctgctgaaggcattgaaaaatatttaggcgctaaattccctggtgcaaaacgcttctctttagaaggtggcgatgcgttagtgccaatgatgagagaaatcatttatcgcgcaggcgaagctggcactaaagaaatcgtggtcggtatggctcaccgtggtcgtttaaacgtcctcgtgaacgtattaggtaagcgtcctgctgagctgtttgacgagttcgcgggtaagcatgctgatacccacggttctggtgacgttaagtaccaccaaggtttctcatctgattttgaaacaccaggtggcaatgtgcatttggcgctggctttcaacccgtctcaccttgaaatcgttaatcctgtggttatggggtctgtacgtgctcgtcaagaccgtcgtggttgcaaagatggtttacaggtgatgcctatcactatccacggcgattctgctattactggtcaaggtatcgtacaagagacattcaacatgtctcaaacccgtggctttaaagtgggtggtagtatccgtatcgttgtgaacaaccaagtgggctttaccacttcaaatcattacgatgtgcgttcaactgaatactgtactgatatcgcgaagatggtacaggcaccgattttccacgtaaattcagacgatccagaagccgtcgcctttgttgcgcagcttgccgttgattaccgtaacgagtttaaacgtgatgtggtgatcgacttagtgtgttatcgccgtcatggccataacgaagctgatgagccaagcgcaactcagccactaatgtatgccaagatcaagaaacacccaacgccacgtaagatttacgctgacaaactgatcgcagaaaacaccattgctgccgatgacgtgaccggcatgatcaacacttaccgcgatgctttagaccaaggtgattgcgtagtgaaagaatggcgtccaatgacactgcataccgtagattggactccttatattggtcgcgaatgggatgaagcctatgacgcttcactgcctatcgaacgtttgcagaaactagccgataagctgagctacgtgcctgaaagccattctctgcaatcccgtgttgctaagatttatagtgaccgtgttgcaatggcaaaaggggagaagccacttgattggggctttgctgaaaccttagcttacgcaacgattcttgaagataagcaacgtgttcgcattactggtcaagactctggccgcgggactttcttccaccgtcatgcggttctgcataaccaaaacgatgcgactacgtatttaccactgcgtaatattagcgatggtcaaggtccaatcgacattactgactcagtactctctgaagcctcagtattggcattcgaatatggttacgcaacggcagagcctagtggtttagccatttgggaagcgcaatttggtgactttgctaactgtgcacaggtcgtgattgaccagttcttatcttctggtgagcaaaagtggggccgtttatgcggtctgaccatgctgttgcctcacggctacgaaggtcaaggtccagagcactcaagcgcccgtttagagcgtttcttacagctttgtgctaaccacaatatgcaagtgtgtgtaccatcaacgcctgcacaggtttaccacatgctgcgtcgccaagtggtgcgcccaatgcgccgtccactggtggtgatgtcacctaagtcattgctacgtcacccattagcggtttctagcatggacgaattggccaatggcagcttccaaaacgtgattggtgaaatcgatacgttagaagcgagcaaggtcgatcgcgtggtgttctgtagcggtaaggtgtacttcgaactactcgaaaaacgccgtaaagaaaacatcaataacatcgcaattatccgtgtcgaacagttatatccgttcccacatgaagaaatggttgcagcattagctgactaccaacatgtgaaggattttgtttggtgtcaggaagagccgcaaaaccaaggtgcttggtactctagccaacatcacttttgggctgctatccctgcgggagcaaaactcacttacgctggccgtgaagcgtctgctgcaccagcttgtggttaccctgagttgcatgctcaccaacaagaatctttagtgaacagtgccttaaagctctaa

SEQ ID NO: 6110 - protein, 939 aa, Shewanella oneidensis MR-1
MHQGIMKAWLESSHLSGANSTYVEEMYEAYQEDPQSVSDDWRAVFDNLPPVNGASKDAPEAAHSKVRDYFRSLAMEGRHKSAARVTDPELDAKQVKVLQLINAHRFRGHQGANLDPLELWKREPVADLDPAFHGLTKEDMEREFNTGSFAHGGETMKLADLVKALKATYCGSIGAEYMHITDTDEKRWIQQRLEPSLGKANYDKSVKTRILEGLNAAEGIEKYLGAKFPGAKRFSLEGGDALVPMMREIIYRAGEAGTKEIVVGMAHRGRLNVLVNVLGKRPAELFDEFAGKHADTHGSGDVKYHQGFSSDFETPGGNVHLALAFNPSHLEIVNPVVMGSVRARQDRRGCKDGLQVMPITIHGDSAITGQGIVQETFNMSQTRGFKVGGSIRIVVNNQVGFTTSNHYDVRSTEYCTDIAKMVQAPIFHVNSDDPEAVAFVAQLAVDYRNEFKRDVVIDLVCYRRHGHNEADEPSATQPLMYAKIKKHPTPRKIYADKLIAENTIAADDVTGMINTYRDALDQGDCVVKEWRPMTLHTVDWTPYIGREWDEAYDASLPIERLQKLADKLSYVPESHSLQSRVAKIYSDRVAMAKGEKPLDWGFAETLAYATILEDKQRVRITGQDSGRGTFFHRHAVLHNQNDATTYLPLRNISDGQGPIDITDSVLSEASVLAFEYGYATAEPSGLAIWEAQFGDFANCAQVVIDQFLSSGEQKWGRLCGLTMLLPHGYEGQGPEHSSARLERFLQLCANHNMQVCVPSTPAQVYHMLRRQVVRPMRRPLVVMSPKSLLRHPLAVSSMDELANGSFQNVIGEIDTLEASKVDRVVFCSGKVYFELLEKRRKENINNIAIIRVEQLYPFPHEEMVAALADYQHVKDFVWCQEEPQNQGAWYSSQHHFWAAIPAGAKLTYAGREASAAPACGYPELHAHQQESLVNSALKL

SEQ ID NO: 6111 - DNA, 3027 bp, Drosophila melanogaster
  CDS (1)..(3027)
atgcatagagcccacacagccttcagcctggccttgtcgccgatggcgcacaagaacttcgccacatggctgctcaagagcagcagcagtcagcagatggccaaggtaactgcagcggccgctgtgcgcacctacaactccgcagctgccgaaccttttgccaacggcagcaccgcctcctacgtggaggagatgtacaacgcctggcttcgggatcccacttccgtgcacacctcctgggacgcgtacttccgcagcaacagctacgttagcccgcccaacttggcgcccgtgcaggccaacactctgccgctgaccgccttcaactttggaggagccgtcgccggcgctgcgcccgactccaagaccattgacgaccatctggccgtccaggccatcatcaggagctaccagattcgaggacataatattgctcacctcgatccacttgaaattaatacaccagaattgcctggcaactcctcgacgaaatccatttacgctaatttcagttttggcgagcaggacatggatcgccagttcaagctgcccagcactaccttcatcggaggcgatgaggcttcgttgcccctaaaggaaatcctgaaccgcctggagaatgtctactgtaataagattggcgtggagttcatgttcatcaactctctggagcaatgcaactggatccgcaagcgttttgagacccccggcgtccttaacttctcgcccgaggagaagcgtctgatcctggcccgtttgacccgtgccaccggctttgaggctttcctggccaagaagtactcttctgagaaacgtttcggtctggagggttgcgagatcatgatcccagccctgaaggagatcatcgacgtatcaacggagttgggagtggagtcggtcatcatgggcatgccccatcgtggacgtcttaacaccttggccaatgtatgccgcaagcccttgaaccagatcttcacccagttcgctggactggaggctgctgatgatggctctggtgatgtcaagtaccatctcggtacatacatcgagcgattgaaccgcgttacaaacaagaacatccgcctggctgtcgtggccaacccgtcccatctggaggctgtggatcccgtggtgcagggcaagacccgtgccgagcagttctaccgtggcgaccaggagggcaagaaggttatgtccattttgatccacggtgatgccgccttctgcggacagggcgtcgtctatgaaactatgcatctttcggacctgcccgactacaccacccacggaactatccatgtggtggccaacaaccagatcggtttcaccaccgatccccgtttctcgaggtcctctccctactgtacggatgtggctcgtgtcgtcaatgctcctattttccacgtcaacgctgacgatccagaggccgtgatgcatgtgtgcaaggtggctgctgagtggcgtgctactttccacaaggattgtgttattgatttggtcggataccgccgcaatggacacaacgagatcgacgagcccatgttcacgcaacccttgatgtaccagaagatccgcaagcacaagaactgtctcgacctgtatgccgacaaactgatcgccgagggcactgtcaccgccgaggaggttaagtcggttgccgctaaatacgagaacatttgcgaggaggcattcgctctggccaagaccgagacccacgtcaagtacaaggactggctcgactcgccctggtccggctttttcgagggcaaagacccattgaaggtagcgcccactggagtgaaggaggagaccctcatccacatcggcaaccgcttctcgtcgccaccaccgaacgctgctgaattcgtgattcacaagggtctattgcgagtgttggccgctcgcaaggcaatggtggacgaaaaggtcgctgattgggctttgggagaggccatggccttcggctctctgctgaaggagggaatccatgtgcgcctttcgggacaggatgtcgagcgtggtaccttctcgcatcgccaccatgtgctgcaccaccagctggtcgacaaggccacttacaactcgctgcagcacatgtacccagatcaggcgccctactccgtctccaacagctcgctgtcggagtacgcagtgcttggtttcgagcacggttactcgatgaccaatcccaatgccctggtgctgtgggaggctcagttcggagacttcagcaacacggcccagtcgatcatcgatcagttcatctccagcggtcagtcaaagtgggtgcgccaatcgggtctggtaatgctcctgccccacggcatggaaggcatgggccccgagcactcctcgtgccgcgtggagcgcttcctgcaaatgagcagtgacgatcccgactacttcccaccagagtccgatgagttcggagtgcgacagctgcacgacattaactggatcgtggcaaactgctcgacgcccgccaactactaccacatcctgcgccgacagatcgcattgcctttccgcaagcccctgattctgtgcacgcccaaatcgctgctgcgtcaccccgaggctaagagtcctttcagcgagatgagcgagggcagcgagttccagcgcatcatccccgacaacggtcccgccggccagaatcccagcaatgtgaagaaggtcgtcttctgctcgggccgcgtctactacgatttgaccaagacacgtagggaaaagcagctggagggcgaaatcgccattgtgcgcgtggagcagatctctcccttccccttcgatctggtcaaggagcaggccaacctgtacaagaatgccgaactcgtgtgggcccaagaggagcacaagaaccagggcagctggacctatgtgcaacctcgtttcctcaccgccttgaaccacagccgcgacgtcagctacgtcggacgcgcctgcggagcctccaccgccaccggatccaaggcccagcacatccgtgagctgaatgcgctgctcaacgacgcgatttcgacctaa

SEQ ID NO: 6112 - protein, 1008 aa, Drosophila melanogaster
MHRAHTAFSLALSPMAHKNFATWLLKSSSSQQMAKVTAAAAVRTYNSAAAEPFANGSTASYVEEMYNAWLRDPTSVHTSWDAYFRSNSYVSPPNLAPVQANTLPLTAFNFGGAVAGAAPDSKTIDDHLAVQAIIRSYQIRGHNIAHLDPLEINTPELPGNSSTKSIYANFSFGEQDMDRQFKLPSTTFIGGDEASLPLKEILNRLENVYCNKIGVEFMFINSLEQCNWIRKRFETPGVLNFSPEEKRLILARLTRATGFEAFLAKKYSSEKRFGLEGCEIMIPALKEIIDVSTELGVESVIMGMPHRGRLNTLANVCRKPLNQIFTQFAGLEAADDGSGDVKYHLGTYIERLNRVTNKNIRLAVVANPSHLEAVDPVVQGKTRAEQFYRGDQEGKKVMSILIHGDAAFCGQGVVYETMHLSDLPDYTTHGTIHVVANNQIGFTTDPRFSRSSPYCTDVARVVNAPIFHVNADDPEAVMHVCKVAAEWRATFHKDCVIDLVGYRRNGHNEIDEPMFTQPLMYQKIRKHKNCLDLYADKLIAEGTVTAEEVKSVAAKYENICEEAFALAKTETHVKYKDWLDSPWSGFFEGKDPLKVAPTGVKEETLIHIGNRFSSPPPNAAEFVIHKGLLRVLAARKAMVDEKVADWALGEAMAFGSLLKEGIHVRLSGQDVERGTFSHRHHVLHHQLVDKATYNSLQHMYPDQAPYSVSNSSLSEYAVLGFEHGYSMTNPNALVLWEAQFGDFSNTAQSIIDQFISSGQSKWVRQSGLVMLLPHGMEGMGPEHSSCRVERFLQMSSDDPDYFPPESDEFGVRQLHDINWIVANCSTPANYYHILRRQIALPFRKPLILCTPKSLLRHPEAKSPFSEMSEGSEFQRIIPDNGPAGQNPSNVKKVVFCSGRVYYDLTKTRREKQLEGEIAIVRVEQISPFPFDLVKEQANLYKNAELVWAQEEHKNQGSWTYVQPRFLTALNHSRDVSYVGRACGASTATGSKAQHIRELNALLNDAIST

SEQ ID NO: 6113 - DNA, 2832 bp, Pseudomonas putida KT2440
  CDS (1)..(2832): transl_table=11
atgcaagaaagcgtgatgcagcgcatgtgggatagcgcccacctttcaggtggtaacgctgcatatgtggaagagctctacgagctctacctgcacgaccctaacgctgtgccagaagagtggcgcacttacttccagaagttgccagccgacggcagcaccgctactgatgtatcgcactcgacaatccgcgaccatttcgtactgctggcaaagaaccagcgccgcgcccaaccggtttccgccgggagcgtgagcagtgaacacgagaagaagcaggttgaagttctgcgactgatccaggcctatcgtatgcgcggccatcaggctgccaagctcgacccgttggggttgtggcagcgccctgcgcccgtagacctgtcgatcaatcactacggcttgaccaatgccgatcttgatacgaccttccgtgccggcgacctgttcatcggcaaagaggaggcgagcctacgcgacatcttcgatgcactccagaagacatattgtcgcaccattggcgccgaattcacccacatcgtcgattccgagcagcgcagctggttccagcagcgcctggaaagcgtgcgcggccgtccggagtattccgctgacgtgcaggcccacctgctcgagcgcgtaaccgccggtgagggcctggaaaagtacctgggcaccaagtacccgggcaccaagcgattcggccttgaaggcggcgagagcctgattccgatgctggatgaaatgatccagcgttccggctcttacggcgccaaggaggtcgtgatcggcatggcccaccgtggccgcctgaacgtgctggtgaacaccttcggcaagaacccgcgcgagctgttcgacgagttcgaaggcaagaagatgaacgagctgggctccggtgacgtgaagtatcaccagggcttctcctcgaacgtgatgaccccgggtggcgaagtgcacctggccatggcgttcaacccgtcccacctggaaatcgtttcgccggtggtcgagggttcggtgcgcgcccgtcaggaccgccgcaacgacaccgttggcgacaaggtggtgccgatctcgatccacggcgacgctgcgttcgctggccagggcgtggtcatggaaaccttccagatgtcgcagacccgcggtttcaagaccggcggtaccgtgcacatcgtgatcaacaaccaggttggtttcaccatcagcaacccgctggatgcgcgctccaccgagtacgcgaccgacgttgccaagatgatccaggcaccgatcctgcacgtgaacggcgatgacccggaagccgtgctgttcgttacccagctggccatcgactatcgcatgcagttcaagcgtgacgtggtcatcgacctggtctgctaccgtcgccgtggccacaacgaggctgacgagcctaacggcacccagccgctgatgtaccagcagatcagcaagcagcgcactacccgtgagctgtatgccgagcagctgatccaggccggtcgcatcgacgccgagcgcgctcaggccaagatcgacgagtaccgcaacgcgctggacaatggcctgcacgtggtaaaaagcctggtcaaggagccgaaccgcgagctgttcgtcgactggcgtccgtacctgggccatgcctggaccgcgcgtcacgacacccgtttcgacctcaagaccctgcaggatctgtcggccaagctgctcgagctgccggaaggtttcgtggtccagcgtcaggtgtcgaagatctacgaagaccgtcagaagatgcaggccggtggcttgccgatcaactggggttatgcagagaccatggcttacgccaccctgcagttcgaaggtcacccgatccgcatgaccggccaggacatcggccgtggcaccttctcgcaccgtcacgcggtgttgcacaaccagaaggacgccagcacctacattccgttgcagaacctgttcccaggccagccacgtttcgatctgtacgattcgttcctgtccgaggaagcggtactggccttcgaatacggctactccaccaccatgccgaacgcgctggtgatctgggaagcccagttcggcgacttcgccaacggtgcgcaagtggtgatcgaccagttcatcaccagtggtgagcacaagtggggccgcctgtgcggtctgaccatgctgctgccacacggctatgaagggcaggggccggagcactcctccgcgcgtctggagcgttacctgcagctgtgcgccgagcacaacatccaggtctgcgtaccgacgacgccggcacagatttaccacctgctgcgtcgccaggtcattcgcccgctgcgcaagccgctggtagtcctgacgccgaagtcgctgctgcgccacaagctggccatctcgaccctggaagacctggcagaaggctcgttccagaccgtgatcccggaaatcgacgcaatcgatccggccaaggtcgagcgtctggtgctgtgcagcggcaaggtctactacgacctgctggaaaaacgccgtgccgaaggccgcgaagacatcgccatcctgcgtatcgagcagctgtatccgttccctgaggacgatctggtcgaaatcctcgccccttacaccaacctcaagcatgcggtctggtgtcaggaagagccgatgaaccagggcgcctggtacagcagccagcaccacatgcgccgtatcctgggccgccacaacaaggcactggtcctggaatacgccggtcgcgacgcttctgccgcgccagcctgtggttacgcttcgaagcacgccgaacagcaggaaaaactgctgcaagacgccttcactgtctaa

SEQ ID NO: 6114 - protein, 943 aa, Pseudomonas putida KT2440
MQESVMQRMWDSAHLSGGNAAYVEELYELYLHDPNAVPEEWRTYFQKLPADGSTATDVSHSTIRDHFVLLAKNQRRAQPVSAGSVSSEHEKKQVEVLRLIQAYRMRGHQAAKLDPLGLWQRPAPVDLSINHYGLTNADLDTTFRAGDLFIGKEEASLRDIFDALQKTYCRTIGAEFTHIVDSEQRSWFQQRLESVRGRPEYSADVQAHLLERVTAGEGLEKYLGTKYPGTKRFGLEGGESLIPMLDEMIQRSGSYGAKEVVIGMAHRGRLNVLVNTFGKNPRELFDEFEGKKMNELGSGDVKYHQGFSSNVMTPGGEVHLAMAFNPSHLEIVSPVVEGSVRARQDRRNDTVGDKVVPISIHGDAAFAGQGVVMETFQMSQTRGFKTGGTVHIVINNQVGFTISNPLDARSTEYATDVAKMIQAPILHVNGDDPEAVLFVTQLAIDYRMQFKRDVVIDLVCYRRRGHNEADEPNGTQPLMYQQISKQRTTRELYAEQLIQAGRIDAERAQAKIDEYRNALDNGLHVVKSLVKEPNRELFVDWRPYLGHAWTARHDTRFDLKTLQDLSAKLLELPEGFVVQRQVSKIYEDRQKMQAGGLPINWGYAETMAYATLQFEGHPIRMTGQDIGRGTFSHRHAVLHNQKDASTYIPLQNLFPGQPRFDLYDSFLSEEAVLAFEYGYSTTMPNALVIWEAQFGDFANGAQVVIDQFITSGEHKWGRLCGLTMLLPHGYEGQGPEHSSARLERYLQLCAEHNIQVCVPTTPAQIYHLLRRQVIRPLRKPLVVLTPKSLLRHKLAISTLEDLAEGSFQTVIPEIDAIDPAKVERLVLCSGKVYYDLLEKRRAEGREDIAILRIEQLYPFPEDDLVEILAPYTNLKHAVWCQEEPMNQGAWYSSQHHMRRILGRHNKALVLEYAGRDASAAPACGYASKHAEQQEKLLQDAFTV

SEQ ID NO: 6115 - DNA, 2826 bp, Vibrio vulnificus CMCP6
  CDS (1)..(2826): transl_table=11
atgcacaacggcgtgatgaaggcatggctcgagtcttcacacttggctggcgccaatgcaacttacgtagaggatctctacgaactgtatctaagtgaccccgatctggtaagtgaggagtggaaacgtgtttttgaaggcttgcctaagccaacaaaagaagtggccgaacagccgcattcacgggtccgtgactacttccgacgactagctcaagaaacaaagcattatagtgtccaggtaagtgatcctgatgtcgatgctaagcaagttaaggtactacagctgattaatgcttaccgcttccgcggacatgaagcagcagaattggatccactcggtttatggcaacgcccaacagtggctgagctagaccctgcattccacaatctcaccgaagatgacttcgaagaaacattcaacgtaggttcttttgctgttggtcaagagaccatgccgctgaaagatatctacaccgcacttaagaaaacctactgtggttcgattggtgcagaatacatgcacatgacagacacagagcaaaagcgttggatccaacaacgtttagaatctgtggtaggtcaaccttcctttgataaagatgaaaaacgtacattccttgctgagctaacggcagcagaaggtcttgagcgctatcttggtgcaaaattcccaggagcgaagcgtttctctctcgaaggtggcgacgcaatgattccgatgatgaaagagttaattcgtcatgcgggtcgtagcggaatgcgcgaagtggttatcggcatggctcaccgtggccgtctcaatatgcttgttaacgtcttgggcaaaaagccacaggacctatttgacgagtttgctggtaaacatggcgagagttggggtacgggcgatgtaaaatatcaccaaggtttctcagcggacttcgcaacaccaggtggcgacgttcacttagcccttgcgtttaacccatctcatttagagatcgttaacccagtagttatgggttctgtgcgtgcgcgtcaagatcgcttgggcgacgatgacggtagcaaagtgttgccgattaccatccatggtgactctgcgatcgcgggtcaaggggttgttgctgaaacattcaacatgtctcaagcacgtggcttctgcgttggtggcacggtgcgtgtggtcgtcaataaccaagttggttttacgacgtctaacccacgcgacacccgctcaacgatgtactgtactgatattgcgaagatggtacaggcaccgattttccacgtaaacgcagatgaccctgaagcggtagctttcgtgactcgtattgcgttggattaccgtaacgagtttaaacgcgatgtggtgattgacttggtttgttaccgccgtcatggccacaatgaagcggacgagccgaatgctactcagcctttgatgtaccaaaagatcaaaaaacatcctacgcctcgtaagttgtatgctgatgttttgattgatcgtaacgagtgcgacattgaaaccgcaacgcaaatggtcaacgagtatcgtgatgcactcgatcacggcgaagtggttgttaaagaatggcgtccaatggcattacattctgtcgattggtctccatatctgggccatgagtgggatacgccttggagcaatacctacgataaacaacgcctagtcgagctaggtaagcgtttatgccaatacccagaaagtcacacgcttcacagccgagtgagcaagctttacaacgaccgtacggcaatgaccaatggtgaaaaagagctagattgggggatggcagaaactttggcctacgccacactagtggatgatggcaagcgcattcgtatttcaggtcaggattctggtcgtggtaccttcttccatcgtcatgctgtactgcacaaccaaaacgatgccagtacgtatgttcctcttgccaatattcatgataagcaaggtccttttgaagtattcgattcggttctttctgaagaagcggtacttgcctttgaatatggttacgcaacggcagagccaagtggcttgacgctttgggaagcacaatttggtgactttgctaacggcgcacaagtggttattgaccagttcatctcttcgggtgaacagaagtgggctcgactatgtgggttaaccatgttgttgcctcacggctatgaaggtcaaggtccagagcactcatctgcgcgccttgagcgttacctacaactgtgtgctgaacaaaacatgcaagtggttgtgccatcaacccctgcgcaggtttatcacatgatccgtcgtcaagttgtgcgtccaatgcgtcgtccactgattgtgatgtctcctaaatcattgctacgccacccattatgcacatcgtcactcgatgacttggcaaatggtacctttatgcccgcgattccagaaatcgatgaactggatccggcaaaagtgaaacgtgttgtgttctgttcaggtaaagtctacttcgaccttctagagcagcgtcgcaataacgagcaagatgatgtcgcgattgtacgtattgaacagctgtacccattcccaatggatgacgtgaaagcggcaatagcaccttatgtgaatgttgaagattttgtttggtgtcaggaagaaccgcaaaaccaaggggcttggtactgtagccaacataacttccgtgcagctatcccggcaggaactgagttgaaatacgctggtcgtccagcgtcagcttctccagccgttggctatatgtcggtgcacttgaaacagcagaaagcgctgattgatgacgcgctaaacgtgaacgaaaagacttcggattaa

SEQ ID NO: 6116 - protein, 941 aa, Vibrio vulnificus CMCP6
MHNGVMKAWLESSHLAGANATYVEDLYELYLSDPDLVSEEWKRVFEGLPKPTKEVAEQPHSRVRDYFRRLAQETKHYSVQVSDPDVDAKQVKVLQLINAYRFRGHEAAELDPLGLWQRPTVAELDPAFHNLTEDDFEETFNVGSFAVGQETMPLKDIYTALKKTYCGSIGAEYMHMTDTEQKRWIQQRLESVVGQPSFDKDEKRTFLAELTAAEGLERYLGAKFPGAKRFSLEGGDAMIPMMKELIRHAGRSGMREVVIGMAHRGRLNMLVNVLGKKPQDLFDEFAGKHGESWGTGDVKYHQGFSADFATPGGDVHLALAFNPSHLEIVNPVVMGSVRARQDRLGDDDGSKVLPITIHGDSAIAGQGVVAETFNMSQARGFCVGGTVRVVVNNQVGFTTSNPRDTRSTMYCTDIAKMVQAPIFHVNADDPEAVAFVTRIALDYRNEFKRDVVIDLVCYRRHGHNEADEPNATQPLMYQKIKKHPTPRKLYADVLIDRNECDIETATQMVNEYRDALDHGEVVVKEWRPMALHSVDWSPYLGHEWDTPWSNTYDKQRLVELGKRLCQYPESHTLHSRVSKLYNDRTAMTNGEKELDWGMAETLAYATLVDDGKRIRISGQDSGRGTFFHRHAVLHNQNDASTYVPLANIHDKQGPFEVFDSVLSEEAVLAFEYGYATAEPSGLTLWEAQFGDFANGAQVVIDQFISSGEQKWARLCGLTMLLPHGYEGQGPEHSSARLERYLQLCAEQNMQVVVPSTPAQVYHMIRRQVVRPMRRPLIVMSPKSLLRHPLCTSSLDDLANGTFMPAIPEIDELDPAKVKRVVFCSGKVYFDLLEQRRNNEQDDVAIVRIEQLYPFPMDDVKAAIAPYVNVEDFVWCQEEPQNQGAWYCSQHNFRAAIPAGTELKYAGRPASASPAVGYMSVHLKQQKALIDDALNVNEKTSD

SEQ ID NO: 6117 - DNA, 3054 bp, Drosophila melanogaster
  CDS (1)..(3054)
atgcatagagcccacacagccttcagcctggccttgtcgccgatggcgcacaagaacttcgccacatggctgctcaagagcagcagcagtcagcagatggccaaggtaactgcagcggccgctgtgcgcacctacaactccgcagctgccgaaccttttgccaacggcagcaccgcctcctacgtggaggagatgtacaacgcctggcttcgggatcccacttccgtgcacacctcctgggacgcgtacttccgcagcaacagctacgttagcccgcccaacttggcgcccgtgcaggccaacactctgccgctgaccgccttcaactttggaggagccgtcgccggcgctgcgcccgactccaagaccattgacgaccatctggccgtccaggccatcatcaggagctaccagtcacgaggtcatttggcatctgatctggatccgcttggaattttgactcgcgaaaaaaccgtctgcaaggatgggctagcacgtcgtgctaacgaagatgtgctcaggcagcactctgggtttttgtttggcgagcaggacatggatcgccagttcaagctgcccagcactaccttcatcggaggcgatgaggcttcgttgcccctaaaggaaatcctgaaccgcctggagaatgtctactgtaataagattggcgtggagttcatgttcatcaactctctggagcaatgcaactggatccgcaagcgttttgagacccccggcgtccttaacttctcgcccgaggagaagcgtctgatcctggcccgtttgacccgtgccaccggctttgaggctttcctggccaagaagtactcttctgagaaacgtttcggtctggagggttgcgagatcatgatcccagccctgaaggagatcatcgacgtatcaacggagttgggagtggagtcggtcatcatgggcatgccccatcgtggacgtcttaacaccttggccaatgtatgccgcaagcccttgaaccagatcttcacccagttcgctggactggaggctgctgatgatggctctggtgatgtcaagtaccatctcggtacatacatcgagcgattgaaccgcgttacaaacaagaacatccgcctggctgtcgtggccaacccgtcccatctggaggctgtggatcccgtggtgcagggcaagacccgtgccgagcagttctaccgtggcgaccaggagggcaagaaggttatgtccattttgatccacggtgatgccgccttctgcggacagggcgtcgtctatgaaactatgcatctttcggacctgcccgactacaccacccacggaactatccatgtggtggccaacaaccagatcggtttcaccaccgatccccgtttctcgaggtcctctccctactgtacggatgtggctcgtgtcgtcaatgctcctattttccacgtcaacgctgacgatccagaggccgtgatgcatgtgtgcaaggtggctgctgagtggcgtgctactttccacaaggattgtgttattgatttggtcggataccgccgcaatggacacaacgagatcgacgagcccatgttcacgcaacccttgatgtaccagaagatccgcaagcacaagaactgtctcgacctgtatgccgacaaactgatcgccgagggcactgtcaccgccgaggaggttaagtcggttgccgctaaatacgagaacatttgcgaggaggcattcgctctggccaagaccgagacccacgtcaagtacaaggactggctcgactcgccctggtccggctttttcgagggcaaagacccattgaaggtagcgcccactggagtgaaggaggagaccctcatccacatcggcaaccgcttctcgtcgccaccaccgaacgctgctgaattcgtgattcacaagggtctattgcgagtgttggccgctcgcaaggcaatggtggacgaaaaggtcgctgattgggctttgggagaggccatggccttcggctctctgctgaaggagggaatccatgtgcgcctttcgggacaggatgtcgagcgtggtaccttctcgcatcgccaccatgtgctgcaccaccagctggtcgacaaggccacttacaactcgctgcagcacatgtacccagatcaggcgccctactccgtctccaacagctcgctgtcggagtacgcagtgcttggtttcgagcacggttactcgatgaccaatcccaatgccctggtgctgtgggaggctcagttcggagacttcagcaacacggcccagtcgatcatcgatcagttcatctccagcggtcagtcaaagtgggtgcgccaatcgggtctggtaatgctcctgccccacggcatggaaggcatgggccccgagcactcctcgtgccgcgtggagcgcttcctgcaaatgagcagtgacgatcccgactacttcccaccagagtccgatgagttcggagtgcgacagctgcacgacattaactggatcgtggcaaactgctcgacgcccgccaactactaccacatcctgcgccgacagatcgcattgcctttccgcaagcccctgattctgtgcacgcccaaatcgctgctgcgtcaccccgaggctaagagtcctttcagcgagatgagcgagggcagcgagttccagcgcatcatccccgacaacggtcccgccggccagaatcccagcaatgtgaagaaggtcgtcttctgctcgggccgcgtctactacgatttgaccaagacacgtagggaaaagcagctggagggcgaaatcgccattgtgcgcgtggagcagatctctcccttccccttcgatctggtcaaggagcaggccaacctgtacaagaatgccgaactcgtgtgggcccaagaggagcacaagaaccagggcagctggacctatgtgcaacctcgtttcctcaccgccttgaaccacagccgcgacgtcagctacgtcggacgcgcctgcggagcctccaccgccaccggatccaaggcccagcacatccgtgagctgaatgcgctgctcaacgacgcgatttcgacctaa

SEQ ID NO: 6118 - protein, 1017 aa, Drosophila melanogaster
MHRAHTAFSLALSPMAHKNFATWLLKSSSSQQMAKVTAAAAVRTYNSAAAEPFANGSTASYVEEMYNAWLRDPTSVHTSWDAYFRSNSYVSPPNLAPVQANTLPLTAFNFGGAVAGAAPDSKTIDDHLAVQAIIRSYQSRGHLASDLDPLGILTREKTVCKDGLARRANEDVLRQHSGFLFGEQDMDRQFKLPSTTFIGGDEASLPLKEILNRLENVYCNKIGVEFMFINSLEQCNWIRKRFETPGVLNFSPEEKRLILARLTRATGFEAFLAKKYSSEKRFGLEGCEIMIPALKEIIDVSTELGVESVIMGMPHRGRLNTLANVCRKPLNQIFTQFAGLEAADDGSGDVKYHLGTYIERLNRVTNKNIRLAVVANPSHLEAVDPVVQGKTRAEQFYRGDQEGKKVMSILIHGDAAFCGQGVVYETMHLSDLPDYTTHGTIHVVANNQIGFTTDPRFSRSSPYCTDVARVVNAPIFHVNADDPEAVMHVCKVAAEWRATFHKDCVIDLVGYRRNGHNEIDEPMFTQPLMYQKIRKHKNCLDLYADKLIAEGTVTAEEVKSVAAKYENICEEAFALAKTETHVKYKDWLDSPWSGFFEGKDPLKVAPTGVKEETLIHIGNRFSSPPPNAAEFVIHKGLLRVLAARKAMVDEKVADWALGEAMAFGSLLKEGIHVRLSGQDVERGTFSHRHHVLHHQLVDKATYNSLQHMYPDQAPYSVSNSSLSEYAVLGFEHGYSMTNPNALVLWEAQFGDFSNTAQSIIDQFISSGQSKWVRQSGLVMLLPHGMEGMGPEHSSCRVERFLQMSSDDPDYFPPESDEFGVRQLHDINWIVANCSTPANYYHILRRQIALPFRKPLILCTPKSLLRHPEAKSPFSEMSEGSEFQRIIPDNGPAGQNPSNVKKVVFCSGRVYYDLTKTRREKQLEGEIAIVRVEQISPFPFDLVKEQANLYKNAELVWAQEEHKNQGSWTYVQPRFLTALNHSRDVSYVGRACGASTATGSKAQHIRELNALLNDAIST

SEQ ID NO: 6119 - DNA, 2832 bp, Pseudomonas syringae pv. tomato str. DC3000
  CDS (1)..(2832): transl_table=11
atgcaagaaagcgtgatgcagcgcatgtggaacagtgcccacctatccggtggtaacgctgcctatgtggaagagctctatgagctctacctgcacgaccctaacgctgtgccagaagaatggcgcacctactttcagaagttgccagcagacggcagctctgccactgatgtatcgcattcgactattcgcgatcatttcgtgttgctggctaaaaaccagcgccgcgctcaaccggtgtccgccggcagtgtgagcagcgagcacgaaaagaagcaggttgaagtgctgcgactgatccaggcgtatcggatgcgtggccatcaggctgctcagctcgatccgctgggcctttggcagcgtcctgcacccgcagatctgtcgatcaatcactacggcttgaccaatgccgatctggacacgactttccgcgctggcgacttgttcatcggcaaagaggaagcgagcctacgcgaaattcacgaagcgttgcagcagacatattgtcgcaccataggctccgagttcacccacatcgtggattccgagcagcgcaactggttcatgcagcgtctcgaaagtgttcgtggtcgtccggcgttttcggctgacatccagagccacttgcttgagcgtgtcactgcggcggaaggtctcgagaaatacctgggcaccaaatacccaggcaccaagcgtttcggtctggaaggcggcgaaagtctgattccgatgctcgacgagctgattcagcgttccgggtcctatggcaccaaggaagtcgtgatcggcatggcccaccgtggtcgtctgaacgtactggtcaacaccttcggcaagaacccgcgcgacctgttcgacgagttcgaaggcaagaaaaaagtggaactgggttccggtgacgtcaaataccaccagggcttctcttccaacgtcatgaccgcaggcggtgaagttcacctggccatggcattcaacccgtctcacctggagatcgtttctccggtggtcgagggttcagtgcgcgcgcgtcaggatcgtcgcaacgatccgaacggtgacaaggttctgccgatttccctccacggcgatgcggcttttgccggtcagggcgtggtcatggaaaccttccagatgtcgcagactcgcggcttcaagacgggcggcacgatccacatcgttatcaacaaccaggtcggtttcaccatcagcaacccgctggactcgcgttccaccgagtacgccaccgacgttgccaagatgattcaggcgccgatcctccatgtaaatggtgatgatccggaagccgtgatgttcgtcacccagttggcgatcgactaccgcatgcagttcaagcgggacatcgtcatcgatctggtctgctaccgccgtcgcggtcacaacgaagctgacgagcccagcggcacccagcctctgatgtatcagcagatcaccaagcagcgcaccacccgtgagctgtacgccgagcatctgatcaagaccggcgtcctcgatgaagcccgcgttcaggccaaggtcgatgactaccgcagcgcgctggacaacggcctgcacgtggtgaaaagcctggtcaaggagccgaacaaggaattgttcgtcgactggcgtccgtatctgggccatgcctggactgcgcgtcacgacacccgattcgatctcaagaccctgcaggaactgtccgccaagctgatggagttgccagaaggcttcgtcgtgcagcgtcaggtgcagaagatctacgaagatcgccagaagatgcaggccggtggcttgccgatcaactggggctacgccgaaaccatggcatacgccacgctggcgttcgaaggccacccgatccgcatgacaggccaggacatcggtcgcggtacgttctcgcaccgtcacgctgtgctgcacaaccagaaagacgccgggacttacattccgctacagaatctgtacgccggtcagccgcgtttcgacctgtacgactcgttcctgtcggaagaggccgtgctggcatttgaatacggttactcgactacccagccggatgcactggttatctgggaagcgcagttcggcgactttgccaacggcgcccaagtggttgtcgaccagttcatcaccagtggtgaacacaagtggggccgtctgtgcggtctgaccatgctgttgcctcacggctacgaaggccaagggccggagcactcttcggcacgtcttgagcgctacctgcaattgtgcgcagagcacaacattcaggtgtgcgtaccgacgactccggcgcagatctaccacctgttgcgtcgtcaggtcatccgtccgctgcgcaaaccgttgatcgtgctgactccgaaatcgctgctgcgtcacaagctggctgtttcgacgctggaagatctggccgaaggctcgttccagaccgtcattccggaaatcgataccctcgatccggccaaggtcacgcgtctggtgctgtgcagcggcaaggtctactacgacctgctggaaaaacgccgtgccgaaggtcgtgaagacatcgctatcgttcgtctcgagcagctgtacccgtttcctgaagacgacctgatggaaaccatcgcgccgtacaccaacctgcagcatgtggtctggtgtcaggaagagccgatgaaccagggtgcctggtacagcagccaacaccatttgcgtcgcagcatgggcaaccacaaacgcgaactcgttctcgagtacgccggtcgtgatgcttctgccgcaccagcctgtggttacgcttcgatgcacgctgagcagcaggaaaaactcctgcgcgatgccttcactgtttaa

SEQ ID NO: 6120 - protein, 943 aa, Pseudomonas syringae pv. tomato str. DC3000
MQESVMQRMWNSAHLSGGNAAYVEELYELYLHDPNAVPEEWRTYFQKLPADGSSATDVSHSTIRDHFVLLAKNQRRAQPVSAGSVSSEHEKKQVEVLRLIQAYRMRGHQAAQLDPLGLWQRPAPADLSINHYGLTNADLDTTFRAGDLFIGKEEASLREIHEALQQTYCRTIGSEFTHIVDSEQRNWFMQRLESVRGRPAFSADIQSHLLERVTAAEGLEKYLGTKYPGTKRFGLEGGESLIPMLDELIQRSGSYGTKEVVIGMAHRGRLNVLVNTFGKNPRDLFDEFEGKKKVELGSGDVKYHQGFSSNVMTAGGEVHLAMAFNPSHLEIVSPVVEGSVRARQDRRNDPNGDKVLPISLHGDAAFAGQGVVMETFQMSQTRGFKTGGTIHIVINNQVGFTISNPLDSRSTEYATDVAKMIQAPILHVNGDDPEAVMFVTQLAIDYRMQFKRDIVIDLVCYRRRGHNEADEPSGTQPLMYQQITKQRTTRELYAEHLIKTGVLDEARVQAKVDDYRSALDNGLHVVKSLVKEPNKELFVDWRPYLGHAWTARHDTRFDLKTLQELSAKLMELPEGFVVQRQVQKIYEDRQKMQAGGLPINWGYAETMAYATLAFEGHPIRMTGQDIGRGTFSHRHAVLHNQKDAGTYIPLQNLYAGQPRFDLYDSFLSEEAVLAFEYGYSTTQPDALVIWEAQFGDFANGAQVVVDQFITSGEHKWGRLCGLTMLLPHGYEGQGPEHSSARLERYLQLCAEHNIQVCVPTTPAQIYHLLRRQVIRPLRKPLIVLTPKSLLRHKLAVSTLEDLAEGSFQTVIPEIDTLDPAKVTRLVLCSGKVYYDLLEKRRAEGREDIAIVRLEQLYPFPEDDLMETIAPYTNLQHVVWCQEEPMNQGAWYSSQHHLRRSMGNHKRELVLEYAGRDASAAPACGYASMHAEQQEKLLRDAFTV

SEQ ID NO: 6121 - DNA, 2826 bp, Vibrio parahaemolyticus RIMD 2210633
  CDS (1)..(2826): transl_table=11
atgcacaacggcgtgatgaaggcatggctcgagtcttcacacttggctggcgccaatgcaacgtatgtagaggacctctacgaactgtatctaagtgatcccgatctggtaagtgaggagtggaaacgtgtttttgagggcttgcctaagccatcagaagaagtggcagaacagccgcattcacgtgtccgtgactacttccgacgactcgctagagaaacaaagcattacaatgtccaagttagtgatccagatgtcgatgcaaaacaagtaaaagttctacagcttatcaacgcataccgcttccgcggacacgaggctgcagaattggatccactaggtctgtggcaacgtccacctgtggcggagctagacccagcatttcataatcttaccgaagacgacttcgaagaaactttcaacgtaggttcttttgctgttgggcaagaaaccatgaagttgaaagacatctacgcagccctcaagaaaacttactgcggttccatcggtgctgaatacatgcacatgactgacacagagcaaaagcgttggatccaacaacgtcttgagtctgtcgtaggccagccatcattcaaccaagatgaaaaacgcacgttccttgaagagttgactgcagcggaaggccttgagcgttatttaggcgcaaaattccctggtgcgaagcgattctctctagaaggtggtgatgcgcttatcccaatgacgaaagaactgattcgtcatgcgggtaagagtggcatgcgtgaagtggttattggtatggctcaccgtggtcgtttgaacatgctggtgaacgtactgggtaagaaaccacaagatctattcgatgagttcgcgggtaagcacgatgaaacgtggggtaccggtgacgttaaataccaccaaggtttctctgcagacttcgcaactcctggtggcgatgttcacttagcgcttgcgtttaacccatctcacttagaaatcgtaaacccagtggttatcggttcagtgcgtgcacgtcaagaccgtttgggtgacaaccacggcagcaaagttcttcctatcactattcatggtgactctgcgattgctggccaaggtgtagtggctgaaacgttcaacatgtcacttgctcgtggtttctgtgttggcggtacggttcgtattgttgtaaacaaccaggttggctttacaacgtctaacccgcgtgacactcgatcaaccatgtattgtactgacatcgctaagatggttcaggcgccgattttccacgttaacgccgatgatccagaagcggttgcttttgttactcgcattgcattggattaccgcaacgagttcaagcgtgacgtcgtgattgatttggtttgttaccgccgtcatggtcacaacgaagcggatgaaccgaacgcaactcagccgttgatgtaccaaaaaatcaaaaagcacccaactcctcgtaaactgtacgccgatgttctgattgataagaatgagtcggatattgaaactgcaacgcagttggtgaacgagtatcgtgatgcacttgaccgcggtgaagtcgtggtgaaagagtggcgtccgatggcattgcattctgtagactggtctccttacttaggacacgagtgggatatgcaatgggaatcgacctacgataagcaacgccttgtcgagctaggtaatcgtttatgtcagtacccggaaagccacaagctgcaaagccgagtaaacaagctgtacaacgatcgcttagcaatgatgacaggtgagaaggctattgactggggtatggctgaaacattggcttacgcgacattggtagacgatggtaagcgtatccgtatttctggtcaggactcaggtcgtggtactttcttccatcgtcactcagttcttcacaaccaatcagatgcaagcacttacatcccgctagcgaatatccatgacaagcaggggcctttccaagtttttgactctgtgttgtcggaagaagctgttcttgcatttgagtacggttatgcaacagctgaacctggcggtttgaccatttgggaagcgcagtttggtgacttcgctaacggcgcacaagtggttattgaccaattcatttcgtctggtgagcaaaagtggggacgtttgtgcggcctgacgatgcttctgcctcatggttacgaaggccaaggtccggagcactcatctgctcgtctagagcgttaccttcaattgtgtgctgagcaaaacatgcaggtcgttgtaccatcaacgccagctcaggtgtaccacatgattcgtcgtcaagtagtacgcccaatgcgtcgaccattgattgtaatgtctcctaaatcattgcttcgtcatcctctttgtacttcgactctagaagaccttgcagaaggtgcgttccaagcagcgatccctgaagtggataacttggagccaagcaaagtgaaacgcgtcgtgttctgttcgggtaaggtgtatttcgaccttcttgagcagcgtcgcaacaacgagcaagaagacgtagcaatcgtgcgtattgagcagctttacccattcccgatggaagaagtacaagcggctattgctcaatacactaacgttgaagacttcgtgtggtgtcaggaagagcctcagaaccaaggtgcttggtactgtagtcaacataacttccgtgccgctattcctgcaggtgcagatcttaaatacgcaggtcgcccagcttctgcttcgccagcagttggctacatgtcggtgcacttgaaacaacaaaaagcgttggttgaagacgctctgaacgtgaactcaaaaacttcggactaa

SEQ ID NO: 6122 - protein, 941 aa, Vibrio parahaemolyticus RIMD 2210633
MHNGVMKAWLESSHLAGANATYVEDLYELYLSDPDLVSEEWKRVFEGLPKPSEEVAEQPHSRVRDYFRRLARETKHYNVQVSDPDVDAKQVKVLQLINAYRFRGHEAAELDPLGLWQRPPVAELDPAFHNLTEDDFEETFNVGSFAVGQETMKLKDIYAALKKTYCGSIGAEYMHMTDTEQKRWIQQRLESVVGQPSFNQDEKRTFLEELTAAEGLERYLGAKFPGAKRFSLEGGDALIPMTKELIRHAGKSGMREVVIGMAHRGRLNMLVNVLGKKPQDLFDEFAGKHDETWGTGDVKYHQGFSADFATPGGDVHLALAFNPSHLEIVNPVVIGSVRARQDRLGDNHGSKVLPITIHGDSAIAGQGVVAETFNMSLARGFCVGGTVRIVVNNQVGFTTSNPRDTRSTMYCTDIAKMVQAPIFHVNADDPEAVAFVTRIALDYRNEFKRDVVIDLVCYRRHGHNEADEPNATQPLMYQKIKKHPTPRKLYADVLIDKNESDIETATQLVNEYRDALDRGEVVVKEWRPMALHSVDWSPYLGHEWDMQWESTYDKQRLVELGNRLCQYPESHKLQSRVNKLYNDRLAMMTGEKAIDWGMAETLAYATLVDDGKRIRISGQDSGRGTFFHRHSVLHNQSDASTYIPLANIHDKQGPFQVFDSVLSEEAVLAFEYGYATAEPGGLTIWEAQFGDFANGAQVVIDQFISSGEQKWGRLCGLTMLLPHGYEGQGPEHSSARLERYLQLCAEQNMQVVVPSTPAQVYHMIRRQVVRPMRRPLIVMSPKSLLRHPLCTSTLEDLAEGAFQAAIPEVDNLEPSKVKRVVFCSGKVYFDLLEQRRNNEQEDVAIVRIEQLYPFPMEEVQAAIAQYTNVEDFVWCQEEPQNQGAWYCSQHNFRAAIPAGADLKYAGRPASASPAVGYMSVHLKQQKALVEDALNVNSKTSD

SEQ ID NO: 6123 - DNA, 2808 bp, Photorhabdus luminescens subsp. laumondii TTO1
  CDS (1)..(2808): transl_table=11
atgcagaacggcgcaatgaaggactggctggattcaagcttcctggctggttcaaaccagtcttacgtagagcagatctatgaagactatataaccgatccaaactccgttgatgcaagttggagagagattttccaacaattgccgaatgcgggactcagcggtgaacaactccactcgcagacgcgtgattacttccgccgtcttgcgaaagatactacgcgttatcattcctctgtcagcgatccagcgatggatgcaaaacaagttaaagttttgcagctcatcaacgcatttcgcttccgcggtcatcaaaatgcgaaccttgacccgttgggattatggaaacaggatagtgttcctgatttagatccggctttccataatctgacggaagcggattttgcagaaacatttaacgtaggttcttttgcgatcggcaaagagacgatgaaattggctgatttgtatgaagcactgaaacgcacttattgcggttctattggtgctgaatacatgcatatcaccaatacggaagaaaaacgttggattcagcagcgtctggagtctgtcactgtcagctctcagtttagcgtagaggaaaaacatcgttttctggcggaactgacggcagccgaaggtttggagcgttatctgggagcgaagtttccgggagcgaaacgtttctctcttgaagggggtgatgcgctgatccccatgttgaaggatcttatccgccatgcaggtaaacatgacacacgagaagttgtgctgggaatggctcaccgtggtcgcctcaacgtcttggttaatatcttaggtaaaaaaccggctgatctgtttgatgagttttcgggtaagcataaagagcatctcggtaccggtgacgtgaaatatcatcaaggtttctcgtctgattttgccactgagggggctaaggttcatttggcattagcatttaacccatctcaccttgagattgttagccctgtcgttattggttcagtacgtgcccgccgtgaccgtctggatgaaggtcgcagtaatatggtattgccaatcactatccacggtgatgctgctgttaccggccaaggcgtggtgcaggaaactctgaacatgtctcaagctcgtggttatgaagtgggtggtacaattcgtatcatcatcaataaccagatcggtttcacaacgtctaacccaaaagatgcccgttcaacacaatactgtaccgatattatcaaaatggtacaggcaccgattttccacgttaatgcagacgatccagaagcggtggcatttgttacccgcctagcactggatttccgtaataccttcaaatgtgatgtgatgatcgatttggtttgctaccgccgtcatggtcacaacgaagctgatgagccaagtgcaactcagccaatgatgtatcagaaaattaagaaacacccaacgccacgtaaaatctatggtgacaagctggtggctgagaacttgatatcagtcgatgatgtgaccgagatagttaacctgtatcgtgatgcccttgaccgtggtgattgtgtcgttgatgagtggcgttcaatggggctgcactcatttacttgggagccttatcttaatcacgaatgggatgaagaatacctacataaagttgatgttaaacgtttgcaggatctcggtagacgcatcagttctgtcccggaagaagtgacaatgcactcgcgtgtagcgaaaatttataacgaccgtgcagagatggcaaacggcgataaattgttcgactggggtgccgcggaaacattgacctatgcaactttagtggatgaaggggttccggtacgtttgtctggtgaagatgccggtcgtggtactttcttccatcgtcatgcggttatccataatcaggctaacggttctgtttatgttcctctggcgaacgttcataacggtcagggagcatttaatgtttgggattctgttctgtcggaagaggcggtactggcgtttgagtatggctatgcaacaacagaacctcgcgctctgacaatctgggaagcacagtttggtgattttgccaatggtgcacaggttgttattgaccaattcatcagctctggtgaacagaaatggggccgtatgtgcggtctggtaatgttgctaccgcatggttatgaagggcagggacctgaacactcttcagcccgtttggagcgttatctgcaactgtgtgcagaacagaacatgcaggtttgtgtgccgtcaacgccggctcaggtctaccacatgcttcgccgtcaggctttgcgcggtatgcgccgtccgttgatcgttatgtcaccaaaatcactgttgcgtcatccattagccgtttctagcctggatgagttggctaacggtaaattccagacggttattggtgaaactgatgctctggatccgaaaggtattaaacgagtggtactttgctcaggtaaagtctattacgacctgttggagcaacgccgtaaaaatgaacaaactgatgttgctatcgtgcgtattgaacaactatatccattccctcatcaagatgttcagtcaacactggaacagtatgctcatgtacatgattttgtctggtgccaggaagagccattaaatcagggggcctggtattgcagtcagcacaacttccgtgaagtgatcccgttcggggcttctttacgttatgcaggtcgtcctgcgtctgcttccccggcagttggatatatgtcagttcaccagcaacaacaacaagagctggttaatgacgcactgaacgttgaataa

SEQ ID NO: 6124 - protein, 935 aa, Photorhabdus luminescens subsp. laumondii TTO1
MQNGAMKDWLDSSFLAGSNQSYVEQIYEDYITDPNSVDASWREIFQQLPNAGLSGEQLHSQTRDYFRRLAKDTTRYHSSVSDPAMDAKQVKVLQLINAFRFRGHQNANLDPLGLWKQDSVPDLDPAFHNLTEADFAETFNVGSFAIGKETMKLADLYEALKRTYCGSIGAEYMHITNTEEKRWIQQRLESVTVSSQFSVEEKHRFLAELTAAEGLERYLGAKFPGAKRFSLEGGDALIPMLKDLIRHAGKHDTREVVLGMAHRGRLNVLVNILGKKPADLFDEFSGKHKEHLGTGDVKYHQGFSSDFATEGAKVHLALAFNPSHLEIVSPVVIGSVRARRDRLDEGRSNMVLPITIHGDAAVTGQGVVQETLNMSQARGYEVGGTIRIIINNQIGFTTSNPKDARSTQYCTDIIKMVQAPIFHVNADDPEAVAFVTRLALDFRNTFKCDVMIDLVCYRRHGHNEADEPSATQPMMYQKIKKHPTPRKIYGDKLVAENLISVDDVTEIVNLYRDALDRGDCVVDEWRSMGLHSFTWEPYLNHEWDEEYLHKVDVKRLQDLGRRISSVPEEVTMHSRVAKIYNDRAEMANGDKLFDWGAAETLTYATLVDEGVPVRLSGEDAGRGTFFHRHAVIHNQANGSVYVPLANVHNGQGAFNVWDSVLSEEAVLAFEYGYATTEPRALTIWEAQFGDFANGAQVVIDQFISSGEQKWGRMCGLVMLLPHGYEGQGPEHSSARLERYLQLCAEQNMQVCVPSTPAQVYHMLRRQALRGMRRPLIVMSPKSLLRHPLAVSSLDELANGKFQTVIGETDALDPKGIKRVVLCSGKVYYDLLEQRRKNEQTDVAIVRIEQLYPFPHQDVQSTLEQYAHVHDFVWCQEEPLNQGAWYCSQHNFREVIPFGASLRYAGRPASASPAVGYMSVHQQQQQELVNDALNVE

SEQ ID NO: 6125 - DNA, 3027 bp, Magnaporthe grisea 70-15
  CDS (1)..(3027)
atgcttcgcatcaaccggaccgtccggaacgtccggcctcttgcctctcgggcggcggccaggaccgttccgtgtagccgtcgttggcatgccaccgatagcttcctcactggcgagagcgccgactaccgcgacgagatgtacaaccaatggaggaaaaacccagagagcgtgcacatctcatggcaaatatatttcaaaaacctagagtcgggcaagatgcccaccgctcaggccttccaaccccctccatcaattgtgcccagtgcaactggcggcgttccaagtatcgcggccggctcttcttcagaggttacaaaccatctcaaggttcagctcctcgtccgcgcataccaggcccgcggtcatctcaaggccaatatcgacccgctcggcattcgtaacgagtccaagggcggctttgccatcaagcccaaggagctcagcttagagcactaccaattcaccgaggcagacctcgacaccgagtactcgcttggccccggtatcctgccgcgcttcaagaaggacggccgcgaaaagatgacactgcgcgagattatcgctgcttgcgagaagatatactgcggctcatatggtgtcgagttcatccacatccctgaccgtgagaagtgcgactggctaagggaacgcctcgaggttccccaaccattcaagtactcgatcgacgagaagcgcaggatcctcgaccgcctcatctggagctctctcttcgagattttcctggccacaaaataccccaacgacaagcgtttcggtctcgagggttgcgaggctctcgtccctggtatgaaggccctgatcgaccgtagcgtcgactacggcatcaaggacatcgtcattggtatgcctcatcgtggtcgtctcaacgtcctgagcaacgtcgtcaggaaaccgaacgagtccattttcagcgagtttgccggcacaactggagccgaggagggttctggcgacgtcaagtaccatctgggcatgaacttcgagcgcccgactccctcaggcaagcgtgtgcaactgtccctggttgccaacccttcgcatcttgaggccgaggaccctgtcgtcctcggaaagacccgcgctatccagcactacaacaacgacgagaagactcatcggaccgccatgggtgttctgttgcacggtgacgctgctattgccggccagggcgttgtctacgaatgtcttggattccactccctgcctggctattccactggcggtaccattcacctggttgtgaacaaccagatcggtttcaccaccgatcctcgttttgctcgctcgaccgcctattgcacagacattgccaaggccattgacgcacctgtcttccacgtcaacgctgatgatgtcgaggccgtgaactacatgtgccagcttgccgctgattggcgtgccgagttccaacaggatgttatcatcgacctcgtctgctaccgcaagcacggccacaacgagaccgaccagccctcgttcacccagccgctcatgtacaagaagatccagtccaaggacagccagcttgaaacctacatcaagaagctcattgaggacggcaccttcaccaaggaggatattgaggagcacaagaagtgggtgtggggaatgctggaggacagcttctccaagtccaaggaataccagcctacctccaaggagtggactacttcggcctggaacgggttcaagtcccccaaggagctcgccaccgaggtgcttccgcacaaccctactggtgtcgacaagcagaccctgcagcacatcggtgaggttatcggctcggcacctgaaaccttcaacctgcaccgcaacctgaagcgtattctcaccaatcgcaccaagaccgttgtcgagggcaagaacattgactggtcgactgccgaggctttggcctttggttcgctggtcactgagggtcaccatgtgcgtgtctctggtcaggatgttgagcgtggtaccttctcgcagcgccacgccgtcttccacgaccaggagaccgaggacacatacacccccctccagaacgtcagcaaggaccaggccaagtttgtcatctccaactcgtccctcagcgagtttggcgtgctcggttttgagtacggttactctcttacgtcacccaatgccttggtcatgtgggaggcccagtttggtgactttgccaacaatgcccagtgtgtgattgaccagttcatcgcctcgggtgaggtcaagtggatgcagcgcactggtcttgtcatgtcgctgccccacggttacgacggtcaaggtcccgagcactcttccggccgtctcgagaggtacctccagctttgtaacgaggacccccgtgacttccctactggcgagaagctcatgcgccagcatcaagactgcaacatgcagatcgcatacatgactacccctgccaacctgttccacattctccgtcgccagatgacgagacaattcaggaagccattgatcatcttcttctccaaggctctcctgagacaccctctggcgcgttccaacatcgaggacttcactggtgactctcagttccagtggattatccccgaccctgctcaccagaccggcgagatcaagtccaacgaggagattgaccgtgtcattctgtgcactggtcaggtctacaccgccctccacaagcaccgcgccgacaaccagattgacaacgtcgccatcactcgtgttgagcagctccaccccttcccttgggatgcgctccgtgagaacctcgaccagtaccccaacgccaagaccattgtctgggctcaggaggagccgctcaacgctggtgcctggagctacacacagcccaggattgagactctgttgaaccagactcaacaccacgaccgtaagcacgtgatgtatgctggtcgccaccccagcgcctcggtcgccacgggattgaagtcggcacacgtcaaggaggagaaggagctgctggagatggccttcagcgtcaagcaggacaagctgaagggcgagtag

SEQ ID NO: 6126 - protein, 1008 aa, Magnaporthe grisea 70-15
MLRINRTVRNVRPLASRAAARTVPCSRRWHATDSFLTGESADYRDEMYNQWRKNPESVHISWQIYFKNLESGKMPTAQAFQPPPSIVPSATGGVPSIAAGSSSEVTNHLKVQLLVRAYQARGHLKANIDPLGIRNESKGGFAIKPKELSLEHYQFTEADLDTEYSLGPGILPRFKKDGREKMTLREIIAACEKIYCGSYGVEFIHIPDREKCDWLRERLEVPQPFKYSIDEKRRILDRLIWSSLFEIFLATKYPNDKRFGLEGCEALVPGMKALIDRSVDYGIKDIVIGMPHRGRLNVLSNVVRKPNESIFSEFAGTTGAEEGSGDVKYHLGMNFERPTPSGKRVQLSLVANPSHLEAEDPVVLGKTRAIQHYNNDEKTHRTAMGVLLHGDAAIAGQGVVYECLGFHSLPGYSTGGTIHLVVNNQIGFTTDPRFARSTAYCTDIAKAIDAPVFHVNADDVEAVNYMCQLAADWRAEFQQDVIIDLVCYRKHGHNETDQPSFTQPLMYKKIQSKDSQLETYIKKLIEDGTFTKEDIEEHKKWVWGMLEDSFSKSKEYQPTSKEWTTSAWNGFKSPKELATEVLPHNPTGVDKQTLQHIGEVIGSAPETFNLHRNLKRILTNRTKTVVEGKNIDWSTAEALAFGSLVTEGHHVRVSGQDVERGTFSQRHAVFHDQETEDTYTPLQNVSKDQAKFVISNSSLSEFGVLGFEYGYSLTSPNALVMWEAQFGDFANNAQCVIDQFIASGEVKWMQRTGLVMSLPHGYDGQGPEHSSGRLERYLQLCNEDPRDFPTGEKLMRQHQDCNMQIAYMTTPANLFHILRRQMTRQFRKPLIIFFSKALLRHPLARSNIEDFTGDSQFQWIIPDPAHQTGEIKSNEEIDRVILCTGQVYTALHKHRADNQIDNVAITRVEQLHPFPWDALRENLDQYPNAKTIVWAQEEPLNAGAWSYTQPRIETLLNQTQHHDRKHVMYAGRHPSASVATGLKSAHVKEEKELLEMAFSVKQDKLKGE

SEQ ID NO: 6127 - DNA, 3039 bp, Nasonia vitripennis
  CDS (1)..(3039)
atgcgcgcattacgttcgatccgtctcgcgttaaatccgattacgctctcctcgcggctgcaacagcaacgaagatgcaaaagcgaccacgactccttcctcacgcagacgagtagccaatacattgagcacctcttctcaaagtggcgcaaagatccgagttctgtaccagaatcgtgggatgtttactttcgtaaagtcgaatcgggcgcacctctcggaccatcaccgaggaaatcctcgctgaagtcatcctcgaaaatgcaagatgtaccggcgaatttattgggcgcacagagaattgaatatgacctgatgacaaagcccagagtgaggctcaagtcagaagctgaaatacaaggcgaggcctacgtggagagcacgctggacattaatgccactatacgctcgtatcaagctcgaggacatctgatagcagacattgaccctctcggtatccaaaacccagactcagccagactccagaacacgagtgacttaccacccagactagtggtgcgcgagcatctgaaagggatgaccgagactgacttgaaccgtgagtttccacttggtaccatcacagtaatcggtggcgatagggaaacactccccctgcgagaaatcatcaagagactaaacaaagtttactgtggtcatttgggcttggagtacatctacatccacgattcgactgttctggaatggctgcgttacaagttcgaaataccaggcgcctgggaattagcagcggatcatcgcaagtggatctgggtgaacatcatgaaggcggtgacgttcgaaaactttctcgcgaagaaatacggtaccgaaaagcgctttggtttggagggttgcgagtctttcatcgcttcgatggcccagtgcttggaaactagttctgaacaaggcgtagaaactgtcgcgatcggtatggcacatcgcggtcgcttgaatacattagtcaacgtgtgttcaaagccacttcatcagctgcttacgcaattcaagccgatatccttagagggattaggatctggggatgtcaagtatcatctgggaacttgtgctgaaagagtcttggagagaagcggcaagaaaatgcacgtgtcagtaactgcgaatccctcacacttggaatccgtcgattcggtgacagtgggtcgcgttagagcagaacaggtggagaaaggggacatcaaaggtcaaaagtccttggccattctggtccacggagatgcagcttacagcggtcagggcatctgctatgaaacgatgcatcttactaaactccctgactacacgactgggggcgtcattcactctgttatcaataatcaaattggttttacaaccgacccaagatactcgcgttcgagtgcgcactgtacggacataggtcgtatcgtaaacgcaccaatattccacgtgcacgcggacgatccagatttagtcgcctattgcagcaaagtcgccagcgagtatcgagccgagtaccacaacgatgtagtgctcgacatagtaggctaccgcagaaatgggcacaacgagatggacgagcccatgcttacgcagccgcttatgtacaagcgcatccaatcccatcctaacgtcctcgccatatacactgataaattgctcaaggaaggcctgattgatgaggcgtttctcaaagaagaaacggataaatatctagctcactgcgaatccgaattcgagaaagcgaaggaaatcagttccatgcagatggccgattggcacgacgtcccctggactgactttttttcaaaccaaagtccgacaaatcccattccgtcaactggtatcgagaacgaagatatacagacgatttgcaagcatgtatcgacgccacccgaacacatgaagcttcataccatggtgcaccggatgatggacaagcgtcgcaagttgagcgaatcccgacaaatcgactgggccatggcagagtgtttggcttttttgagccttctcaaggacgggcatcacgtgcgcctctcgggcgaggacgtcgagcgcggaaccttttcccatcgcatgcatatcttgcacgaccaggagaaagacaaaacctgggtcaatttgctcaatgatgtctttcccggacaggcgacctatactgtcagtaattcttcgctctcggagtacggagtttgcggattcgagcttggctactcatcgtacaaccacaaaaatctagtgctgtgggaagctcaattcggtgactttgccaacagttgtcaggtgatcctggacaacctcctctgctctggccagtccaagtggggccgacaggttggcctaattcttctgttaccacacggcatggaaggccaaggtcccgagcactcgtccgcgcgactcgagcgtttcctgcaactatgcgacgacgagcccgggcacgacgacagcgacgacagccccacgcgacagcttttccacgtcaactggatcgtctgcaatctcaccacaccggccaacctcgtgcacgcgctgcgtaggcagatactcatgccattccgcaagccgctggttatcatgacgccgaaatcgctactgcgtcacccgttggcccagtcgagcttcgacgagatcggtcctgggacgagctttcggcctttgataccggaccaagcggtcaagccggagggtgtgaggaagatcctgttttgcagcggaaaggtctactacgagctctacgcggagaggaaagagaaaggactagagaacgagatagcgattctgagagtcgagcagatctgtccattcccctaccgactcgtcgcggagcaagtgtcgaagtatcccaagtgcaagataatgtggttgcaagaggagcatcgcaaccagggcgcctaccactacgtccgcgagcgtctggcccacgcgctgaacctgtccctggaggaggtgcgtttcggaggccgtccgagctcggcctcccccgccactggcagcaaggtcatctacgagaacgagcgccgcgacatgctggccgcggccatggacttgaaccgatga

SEQ ID NO: 6128 - protein, 1012 aa, Nasonia vitripennis
MRALRSIRLALNPITLSSRLQQQRRCKSDHDSFLTQTSSQYIEHLFSKWRKDPSSVPESWDVYFRKVESGAPLGPSPRKSSLKSSSKMQDVPANLLGAQRIEYDLMTKPRVRLKSEAEIQGEAYVESTLDINATIRSYQARGHLIADIDPLGIQNPDSARLQNTSDLPPRLVVREHLKGMTETDLNREFPLGTITVIGGDRETLPLREIIKRLNKVYCGHLGLEYIYIHDSTVLEWLRYKFEIPGAWELAADHRKWIWVNIMKAVTFENFLAKKYGTEKRFGLEGCESFIASMAQCLETSSEQGVETVAIGMAHRGRLNTLVNVCSKPLHQLLTQFKPISLEGLGSGDVKYHLGTCAERVLERSGKKMHVSVTANPSHLESVDSVTVGRVRAEQVEKGDIKGQKSLAILVHGDAAYSGQGICYETMHLTKLPDYTTGGVIHSVINNQIGFTTDPRYSRSSAHCTDIGRIVNAPIFHVHADDPDLVAYCSKVASEYRAEYHNDVVLDIVGYRRNGHNEMDEPMLTQPLMYKRIQSHPNVLAIYTDKLLKEGLIDEAFLKEETDKYLAHCESEFEKAKEISSMQMADWHDVPWTDFFSNQSPTNPIPSTGIENEDIQTICKHVSTPPEHMKLHTMVHRMMDKRRKLSESRQIDWAMAECLAFLSLLKDGHHVRLSGEDVERGTFSHRMHILHDQEKDKTWVNLLNDVFPGQATYTVSNSSLSEYGVCGFELGYSSYNHKNLVLWEAQFGDFANSCQVILDNLLCSGQSKWGRQVGLILLLPHGMEGQGPEHSSARLERFLQLCDDEPGHDDSDDSPTRQLFHVNWIVCNLTTPANLVHALRRQILMPFRKPLVIMTPKSLLRHPLAQSSFDEIGPGTSFRPLIPDQAVKPEGVRKILFCSGKVYYELYAERKEKGLENEIAILRVEQICPFPYRLVAEQVSKYPKCKIMWLQEEHRNQGAYHYVRERLAHALNLSLEEVRFGGRPSSASPATGSKVIYENERRDMLAAAMDLNR

SEQ ID NO: 6129 - DNA, 2700 bp, Unknown
  Unidentified
  CDS (1)..(2700)
atgcctcagaggctttatcacagcggctccggagtctacgggcatcgggacagagcgccacagcaattcgaagtgccgagagagcagctggctgctcgagcgcagcagagcaatttttacagactcctgacggcttatcgggaacacggccacaagcaggcggtcgtcaatccgatcgcgctctcgaaaccgcgagccctgccggaacttcgtccggaacacttcggcctcgatttggcggacaatgtgaggatggaaggtttgctgcgagccgacaaggccgatggtaccgtcgaggatgccctcgacattctgaacaggatctactgcggtacgatgtccgccgagtttagttacctcgagtcggaggaagagagagaatggttcgcgaagaacttcgaggaatgctattacgaagcgctcgacgacgagacgaggcgcgccatcgcccgagaaatgctcaagagccaagcgttcgacagattcctggctgtgaaattcgtgagcgtcaagagatacggaggcgaaggcgccgagagtatgatggcttttttccacgaactgttcaagctcgcctccaatgatacgttgaaggagctggtactctgtatgccgcatcgaggccgactgaacttcctcacgggaatgctcaagtttccagccgagaagctcttccgaaagttacgcggactgtcggaattcccagacgacgcgaaggcgacgggtgacgttataagccactttgtctcgtcgatggaactgcctctcactggtctccacgtcagtatgctgtacaatccgtctcacttggaggccgtcaatcctgtgtccatgggcagaactcgaggactcatgcagattcttaaggagggagcttactcagatgaccctaatgcgcagtggagcgaccaagttttgaacgtccaggttcacggagacgcagcttatacgggtcaaggaatcaatcaagagtgccttgcactcagtggagctcctcacttcgagatcggtggatctattcacatggtggtgaacaatcaggtaggtttcaccacaccagcagctcgaggcaggtcctcgaggtactgcacggatttggccaagttcatctcgtcgccggttatccatgtaaatgcggacgatccagagtcggtcgttaaagcaacgagaatagccttcaggtatcagagaaaattccggaaggacgtcttcgtagacctgaactgcttcagacgctggggacacaacgaactggacgatcccactttcacgaatcctctcacctacaaaatcattcacaacaggcgatcaattccagatcgatatctagacgaactcattaacgccaaggtcctgagccaggaacaagccaacatgatcgtcgagcagttcaccgaaaagttagcggaagctttgcgtcgggtcgacgactacgtgcctcaagcgacgtacttcactggccgatggtctcagctcaaacaggccgattccgcggtgactacctgggacaccggagtcgacacgaatcttctgcagttaatagccaacaagagtgtacagtcaccagaggaactgaacgtccacccaacgctgctgaaaagccacgtcgagagcaggctaaagaaaatcgaatccggcagccacatcgactggtctacagccgaggcgatggctttcggcagtctgctctaccagggatacaatgtcaggataagtggccaggacatcggacgtggaaccttttcacacagacacgccatgctcgtcgatcagtccacaggagaaatgtacatcccgttgaactcgatggtcgagggccagaccggcaagatcgaactggccaacagcattctgtcagaggaagcagtcctgggatacgagtacggcctgagcatcactctaccgaacaccttaccgatttgggaagctcaattcggcgacttcttcaacggagctcagacgataatcgacacgttcgtcagcagtggcgaagccaagtggatgaccactagtggactcacgatgctgctgcctcatggatacgacggtgctggtcctgagcacagcagttgcaagctcgagaggttcttgcagcttaccgacagccgagaggacagacctgatggtgacgacgttaacatgcaggtggtcaatccaacgacacccgcccagtacttccacttgctcaggcgacagatggtgaggaacttcaggaagcctttgatactcgtcgcgccaaagacgttacttcgtcacgtttcggccacgtcaggtttggacgaaatcgctcctggtactagcttcaagactgtcataggcgatgaaaaagcacaggaaaacgcagttcgtaaagttatactagtcagtggaaaacattattacgctctggagaaacatagagaaattctgggagctcaagacgttgcgattataagagtcgaaagcttatgtcccttcccagtggctgaactcaatgaagaaattcaaaaataccagcatgcaaaaactttcatttggagccaagaggaaccacagaatatgggtgcatggagttttgtcaggcccagattcgaaaacctgtgcggacgtcaattacgttattctgggcgagagcctctagcaacgtcagctgttggcattggccagttgcatcaacgtcaaagcgaagaagtcgtcgtaaaaccgtttgcaatgaaataa

SEQ ID NO: 6130 - protein, 899 aa, Unknown
  Unidentified
MPQRLYHSGSGVYGHRDRAPQQFEVPREQLAARAQQSNFYRLLTAYREHGHKQAVVNPIALSKPRALPELRPEHFGLDLADNVRMEGLLRADKADGTVEDALDILNRIYCGTMSAEFSYLESEEEREWFAKNFEECYYEALDDETRRAIAREMLKSQAFDRFLAVKFVSVKRYGGEGAESMMAFFHELFKLASNDTLKELVLCMPHRGRLNFLTGMLKFPAEKLFRKLRGLSEFPDDAKATGDVISHFVSSMELPLTGLHVSMLYNPSHLEAVNPVSMGRTRGLMQILKEGAYSDDPNAQWSDQVLNVQVHGDAAYTGQGINQECLALSGAPHFEIGGSIHMVVNNQVGFTTPAARGRSSRYCTDLAKFISSPVIHVNADDPESVVKATRIAFRYQRKFRKDVFVDLNCFRRWGHNELDDPTFTNPLTYKIIHNRRSIPDRYLDELINAKVLSQEQANMIVEQFTEKLAEALRRVDDYVPQATYFTGRWSQLKQADSAVTTWDTGVDTNLLQLIANKSVQSPEELNVHPTLLKSHVESRLKKIESGSHIDWSTAEAMAFGSLLYQGYNVRISGQDIGRGTFSHRHAMLVDQSTGEMYIPLNSMVEGQTGKIELANSILSEEAVLGYEYGLSITLPNTLPIWEAQFGDFFNGAQTIIDTFVSSGEAKWMTTSGLTMLLPHGYDGAGPEHSSCKLERFLQLTDSREDRPDGDDVNMQVVNPTTPAQYFHLLRRQMVRNFRKPLILVAPKTLLRHVSATSGLDEIAPGTSFKTVIGDEKAQENAVRKVILVSGKHYYALEKHREILGAQDVAIIRVESLCPFPVAELNEEIQKYQHAKTFIWSQEEPQNMGAWSFVRPRFENLCGRQLRYSGREPLATSAVGIGQLHQRQSEEVVVKPFAMK

SEQ ID NO: 6131 - DNA, 3030 bp, Anopheles gambiae str. PEST
  CDS (1)..(3030)
atgcatcgcgcaagaacggctctccatatggtgaacccgatgggtcagcagaactttggctcgtttctgctaaagaaacaagcctccaagctgaccacggaactggttgccgcctcgtccgtaaagctgtacaactccgccgcagcagaaccattcctgaatggttcgtcgtcaaactacatcgacgatatgtacaatgcgtggctgcgggatccggcctccgtgcatgcgtcctgggatgcatatttccgcaacaattcctacgcagcaccaccgagcctagcgccgtatctcggcagctcgctgccagccgtggccggcgctggcgccgccgtcggtggacgtatcgacgataagctcattgatgatcatcttgcagtgcaagccatcattcgtagctatcagtcccgtgggcatctggttgcggacattgatccgctgggcattctcaatgccgaaatcaacccggagcgagcgaatctgcgtgcgaatgaaaaagttacccgcagttatatgaacttcgaggaagccgacatggagcgcgtcttcaagctgccgagcacgacgttcatcggtggcaaggaaaagttcctgccgctgcgcgaaattctcggccggctggagaaggcgtactgcaacaaaatcggtgtcgagttcatgttcatcaactcgctcgagcagtgcaactggatccgcgagcgcttcgaaacgcccaacatcatgacgtacacgaacgaggagaagcgtctcatcctggcccgtctgacgcgtgcgaccgggttcgaggcgttcctggcgaagaagttctcgtccgagaagcggttcgggctggagggctgcgagatcatgattcccgcgatgaaggaggttatcgacgtgtcgacccggctgggcgtcgagtcgatcatcatgggcatgccgcatcgtggccgcctgaacgtgctggccaacgtgtgccgcaagccgctgcaccagatctttacgcagttcgctggtctggaggcggccgatgatggctccggtgatgtgaagtaccatctcggcacgtacatcgagcgtctgaaccgtgtgacgaacaagaacattcggctggcggtcgtcgccaacccgtcccatctggaggcggttgatccggtggtgcagggcaagacgcgggcggagcagttctaccgcggcgacggcgagggcaagaaggtgatgtcgatcctgctgcacggtgatgctgcgttctgcggccagggtgtggtgttcgagacgatgcacttgtccgacctgcccgactacaccacgcacggtacgatccacatcgtggtgaacaaccagatcggcttcacgaccgatccgcgccactcgcgctcgtcgccgtactgtacggatgtggcgcgcgtcgtcaatgcgcccatcttccacgtgaacggtgacgatccggaggcggtgatgcacgtgtgcaaggtggcggccgaatggcgtgccaccttccacaaggacgtgatcatcgacatcgtgagctaccggcgcaacggacacaacgagatcgacgagccgatgttcacgcagccgctgatgtacaagaagatccgcggcaccaagccggcgctggacatctacgccaaccagctgatcaccgagggtgtcgtgacggccgaggaggtgaagagcgtgaaggacaagtacgagaagatctgcgaggaggcgttcgagcaggccaagatcgaaacgcacatcaagtacaaggattggatcgattcgccgtggtcgggcttcttcgagggtaaggacccgctgaaggtggccccgaccggcgtgatcgaggagacgctggtgcacattggcaaccggttctcgtcgccaccgccgaacgcggccgagttcgtcatccacaagggtttgctgcgtgtgctggccgcccgcaaggagatgctggagaacaagacgatcgactgggcgctggcggaagcgatggcgttcggctcgctgctgaaggagggcatccacgtgcgcctgtccggccaggacgtggagcgtggcaccttctcgcaccggcaccacgtgctgcaccatcagacggtggacaaggcgacgtaccggccgctgtgccacctgtacccggaccaggcaccgtacaccgtctgcaacagctcgctgtccgagttcggtgtgctcggattcgagctcggctactcgatgaccaacccgaacgcgctcgtctgctgggaggcgcagttcggcgacttcaacaacaccgcgcagtgcattatcgaccagttcgtgtcgtccggccaggcgaaatgggtgcgccagagcggtctggtgatgctgctgccccacggcatggagggcatgggcccggagcattcgtcggcccgcgtcgagcggttcctgcagatgtgctcggacgatcccgactacttcccgcccgagtcggaggagtttgccatccggcagctgcacgacatcaactggatcgtggcgaactgctccacccccggcaactacttccatctgctgcggcgccagattgcgctgccgttccgcaagccgctgatcgtgctgacgcccaagtcgctgctgcgtcatccggagtgcaggagcaacttcagcgagatgaccgatggaactgagttcaagcgattgattccggatgcactgaccgccgaaaacccgaaccaggtgaagcgtgtcatcttctgtaccggccgtgtgtactacgacctgctgaaggcgcgccgtgaccgcaagctggatcacgacattgcaatcagccgcatcgaacagatttcgcccttcccgtacgatctggtgaaggccgagtgcgccaaatacccgaacgctgagctggtctgggcccaggaggaacacaagaaccagggctgctggacgtacgtgcagccgcgcttcgacaccgcgatcaactcgacccgtgatttcagctatgttggacgtccgtgcggtgcatctactgcaacgggctcgaaggcccaacacttgaaggaattgaaaaatctgctggacgacgcgatggccttgtaa

SEQ ID NO: 6132 - protein, 1009 aa, Anopheles gambiae str. PEST
MHRARTALHMVNPMGQQNFGSFLLKKQASKLTTELVAASSVKLYNSAAAEPFLNGSSSNYIDDMYNAWLRDPASVHASWDAYFRNNSYAAPPSLAPYLGSSLPAVAGAGAAVGGRIDDKLIDDHLAVQAIIRSYQSRGHLVADIDPLGILNAEINPERANLRANEKVTRSYMNFEEADMERVFKLPSTTFIGGKEKFLPLREILGRLEKAYCNKIGVEFMFINSLEQCNWIRERFETPNIMTYTNEEKRLILARLTRATGFEAFLAKKFSSEKRFGLEGCEIMIPAMKEVIDVSTRLGVESIIMGMPHRGRLNVLANVCRKPLHQIFTQFAGLEAADDGSGDVKYHLGTYIERLNRVTNKNIRLAVVANPSHLEAVDPVVQGKTRAEQFYRGDGEGKKVMSILLHGDAAFCGQGVVFETMHLSDLPDYTTHGTIHIVVNNQIGFTTDPRHSRSSPYCTDVARVVNAPIFHVNGDDPEAVMHVCKVAAEWRATFHKDVIIDIVSYRRNGHNEIDEPMFTQPLMYKKIRGTKPALDIYANQLITEGVVTAEEVKSVKDKYEKICEEAFEQAKIETHIKYKDWIDSPWSGFFEGKDPLKVAPTGVIEETLVHIGNRFSSPPPNAAEFVIHKGLLRVLAARKEMLENKTIDWALAEAMAFGSLLKEGIHVRLSGQDVERGTFSHRHHVLHHQTVDKATYRPLCHLYPDQAPYTVCNSSLSEFGVLGFELGYSMTNPNALVCWEAQFGDFNNTAQCIIDQFVSSGQAKWVRQSGLVMLLPHGMEGMGPEHSSARVERFLQMCSDDPDYFPPESEEFAIRQLHDINWIVANCSTPGNYFHLLRRQIALPFRKPLIVLTPKSLLRHPECRSNFSEMTDGTEFKRLIPDALTAENPNQVKRVIFCTGRVYYDLLKARRDRKLDHDIAISRIEQISPFPYDLVKAECAKYPNAELVWAQEEHKNQGCWTYVQPRFDTAINSTRDFSYVGRPCGASTATGSKAQHLKELKNLLDDAMAL

SEQ ID NO: 6133 - DNA, 3156 bp, Gibberella zeae PH-1
  CDS (1)..(3156)
atgttgaggaattcgctttgtagagctagctcgcagctccttcgcggtgctcgatgctctgctgcctcttctaccgcctccatctcgaccctctcggcccgcacctcatcatggaagctcgctgcctcccgtcgtcctctggctgtcggtgctcgtcgcacctatgcgaccagcgcgacctcgtcaccccccgaccccaacgataacttcctttccggaagcaccgccagctacatcgatgagatgtacatgcagtggagacaagatcccgagagcgtccacgtctcttggcaggtctacttcaagaacatggagggcggcgagatgcccatctctcaggctttccagcctcctcctaacctggttcctggcatgactggcggcgtccctcgtctttctggcaacttggccatggaggacggttccgatgtcaccaaccatctcaaggtccagcttctcgtccgcgcttaccagtctcgcggccaccacaccgccaagattgaccctctcggtatccgaggcaccaatgacgccaagggtttcgccaacatcaagcctaaggaattgactctcgagcactacggattcactgagaaggatatggacaccgagtacactctcggccccggtatcttgcctcgcttcaagcgtgatggccgtgagaagatgactctccgcgagatcgttgacgcttgcgagagaatctactgcggttctttcggtgttgagttcattcacattcctgaccgtgacaagtgcgactggctccgtgagcgtctcgaggtccccaaccctttcaagtactctgttgatgagaagcgccgtgtcctcgaccgtcttatctggagttccagctttgagtctttcctagccaccaagtaccccaacgataagcgattcggtctcgagggttgcgaaacccttgttcctggtatgaaggctcttattgaccgcagtgttgactacggtgtcaaggatatcgttatcggtatgccccatcgtggtcgtctcaacgtcctctccaacgtcgtccgaaagcccaacgagtcaatcttcagcgagtttgctggtacatctggtggtgaggatgagggctctggtgacgtcaagtaccatcttggtatgaactttgagcgccccacgccttctggcaagcgcgtgcagctttctctggtcgccaacccttcgcatctcgaggccgaggaccccgtcgtcctgggcaagacccgtgctatccagcactacaacaacgatgagaagacccaccgtactgccatgagtgttctcctccacggtgatgctgcctttgctgctcagggtatcgtctacgagtgtctcggcttccactctctccctgccttctccactggaggcaccatccacctggttgtcaacaaccagattggtttcacaaccgacccccgtttcgcccgatccaccgcctactgtaccgatattgccaaggctatcgacgcccccgtcttccacgttaacgccgacgatgtcgaggccgtcaactttgtctgccagctcgctgccgattggcgcgccgagttccagcacgatgttgtcatcgatctcaactgttaccgaaagtacggtcacaacgagacggatcagccttctttcacacagcctctcatgtacaagcgcatcaacgccaaggagcctcaaattgacatctacgtcaacaagcttatcgaggagggttctttctccaaggccgatgtcgaggagcacaagcagtgggtctggggtatgctcgaggagagcttcaccaagtccaaggattacacacctacctccaaggagtggaccacctccgcctggaacggcttcaagtcccctaaggagctggctactgaggttcttgccaccaacgagaccaacgtcaagagcactaccctcgagcacattggtaacgccattgggagcgttcccgagggcttccaagttcaccgcaacctgaagcgtatcctaagcaacagaaccaagtctgttgttgagggtaagaacatcgacttccctaccgctgaggccctggctttcggtactctcgtaactgagggttaccacgtccgtgtctccggtcaggatgttgagcgtggtactttctctcagcgtcacgctgtcttccacgaccaggagactgaggatacccacactcccctccagaacctgagccaggaccagggcaagtttgtcatctccaactcttctctgagtgagttcggtgcccttggtttcgagtacggttactctctgtcatctcctcatgctcttgtcatgtgggaggctcaattcggtgactttgccaacaacgctcaatgtatcatcgaccagttcatcgcctctggtgaagttaagtggatgcagcgaacaggtcttgtcatgtctctgccccacggttacgatggtcagggccctgagcactcctctggacgtctcgagcgatacctccagctcagcaacgaggaccctcgagagttccccactggcgagaagctcgtccgtcaacaccaggactgcaacatgcagatcgcctacttcacctctcccgccaacctgttccacgctctccgccgacagatgcaccgccagtaccgcaagccccttatcatcttcttctccaagtctctcctccgtcaccctcttgctcgcagcgacattgaggctttcactggcgagaacgccggattccagtggatcatccctgaccctgagcatgagactggtgctatcaagtctcctgaccagattgagcgtgttgttctgtgcaccggtcaagtttgggctgccctccacaagtaccgagctgacaacaacatcgacaacgtcgctttcactcgcattgagcagctgaaccccttcccttggcaacaactcaaggagaacctcgaccagtaccccaacgccaagaccatcgtctggtgccaggaggagcctctcaacgccggtgcctggagcttcactcagccccgtatcgagactctgctcaacaacaccgagcaccacacccgcaagcacgtcatgtacgctggccgaaaccccagtgcctctgtcgccactggtctcaagaacgtccacaccaaggaggagaaggacttcctcgagatggctttcactgtcaagcaggacaagctcaaaggcgagtaa

SEQ ID NO: 6134 - protein, 1051 aa, Gibberella zeae PH-1
MLRNSLCRASSQLLRGARCSAASSTASISTLSARTSSWKLAASRRPLAVGARRTYATSATSSPPDPNDNFLSGSTASYIDEMYMQWRQDPESVHVSWQVYFKNMEGGEMPISQAFQPPPNLVPGMTGGVPRLSGNLAMEDGSDVTNHLKVQLLVRAYQSRGHHTAKIDPLGIRGTNDAKGFANIKPKELTLEHYGFTEKDMDTEYTLGPGILPRFKRDGREKMTLREIVDACERIYCGSFGVEFIHIPDRDKCDWLRERLEVPNPFKYSVDEKRRVLDRLIWSSSFESFLATKYPNDKRFGLEGCETLVPGMKALIDRSVDYGVKDIVIGMPHRGRLNVLSNVVRKPNESIFSEFAGTSGGEDEGSGDVKYHLGMNFERPTPSGKRVQLSLVANPSHLEAEDPVVLGKTRAIQHYNNDEKTHRTAMSVLLHGDAAFAAQGIVYECLGFHSLPAFSTGGTIHLVVNNQIGFTTDPRFARSTAYCTDIAKAIDAPVFHVNADDVEAVNFVCQLAADWRAEFQHDVVIDLNCYRKYGHNETDQPSFTQPLMYKRINAKEPQIDIYVNKLIEEGSFSKADVEEHKQWVWGMLEESFTKSKDYTPTSKEWTTSAWNGFKSPKELATEVLATNETNVKSTTLEHIGNAIGSVPEGFQVHRNLKRILSNRTKSVVEGKNIDFPTAEALAFGTLVTEGYHVRVSGQDVERGTFSQRHAVFHDQETEDTHTPLQNLSQDQGKFVISNSSLSEFGALGFEYGYSLSSPHALVMWEAQFGDFANNAQCIIDQFIASGEVKWMQRTGLVMSLPHGYDGQGPEHSSGRLERYLQLSNEDPREFPTGEKLVRQHQDCNMQIAYFTSPANLFHALRRQMHRQYRKPLIIFFSKSLLRHPLARSDIEAFTGENAGFQWIIPDPEHETGAIKSPDQIERVVLCTGQVWAALHKYRADNNIDNVAFTRIEQLNPFPWQQLKENLDQYPNAKTIVWCQEEPLNAGAWSFTQPRIETLLNNTEHHTRKHVMYAGRNPSASVATGLKNVHTKEEKDFLEMAFTVKQDKLKGE

SEQ ID NO: 6135 - DNA, 3090 bp, Apis mellifera
  CDS (1)..(3090)
atgtataaggcaaggacagtatttaatacattaactcctttggcacctcgaatgtgcaaacctgaaaggtttgcttcatggctggtacgaagtcatcccttgacaagaactacacaagtgatggtagccaaatcagccagaaagtatagcaatcgggtagcaacagaaccttttctcaatggaagttctagttcttatgtagaagaaatgtataatgcatggttacaagatcctcatagtgtacatgtgtcttgggattcatttttccgtagtagtactgctggagctgcaccaggtcttgcatatcaggctcctccttcccttgctccaagtcataaccaagttccattaggagcattattaccacttggtggaagtactcaattaagccaaatacctattactgagaaagtaattgatgatcatctggctgttcaagctattattcgttcttatcaggctcgaggtcacttagttgctgatctggacccactgggtatcatgcaaacagacctgatacatacacattatgcagcccgcaagggatctccagaacaggttctgcgacaatatatgcttgaggagtcagacatggatcgtattttcaaattaccgtccaccacttttatcggaggcaaagaaaaatcattacctcttcgtgaaatcttaaaaagattagaagctgcttattgtggtcacattggtgtggaattcatgtttattaactccttagaacaatgcaattggattcggcaaaaaatggagacacctggtattatggaaatgacaaatgatgaaagaagacttattttggctagattaactcgagcaactggatttgaagcatttcttgcacgcaaatggtcatccgagaaaagatttggtttagagggatgtgaaattctaattcctgctatgaaacaagtaattgataaatcaactgaattaggagttgaatctattgttatgggtatgcctcatcgaggtcgtttaaatgtccttgctaatgtatgccgcaagcctttaagtcaaatatttactcaatttgctgctcttgaagcagctgatgatggatctggtgatgttaaatatcatttgggaacgtatattgagcgtctaaatcgagtaacaaataaaaacattcgtttggctgtagtggcaaatccatctcatttggaagctgttgatccggtagtacaaggaaagactcgtgcagaacaattctaccgtggtgatggtgaaggcaaaaaagtcatgtctattctcctgcatggtgatgctgcattttgtggacagggtatcgtttttgaaacaatgcacttatcagatttgcctgattacacaactcatggtactattcatatcgtggtaaataatcaaattggatttacaacagatccaagacattcacgatcatctccatactgtactgatgttgcaagagtagtgaacgcacctatctttcatgttaattcggatgatcctgaggctgtgatgcatgtttgcaaagttgctgcagaatggagagcaacttttcacaaagatgttgttattgatattgtatcatatagacgaaatggtcataatgaaattgatgaacctatgtttacacaacctttaatgtaccgcaaaattaaaaatactccaccagttctagacaaatatgctaaaactcttactgacgatggtgttgtcacttctgaagaagttaaggatgttaaagataaatatgaaaaaatctgtgaagaagcatatgtcaatgctaaacaagaaacgcatattaaatataaagattggctggattctccatggtctggtttctttgaaggaaaagatcctttaaaagtatctcctactggtattaaagaagacacactcattcatattggaaaaaaattctcatcaccaccacccaatgcagcagaatttgtagttcataaaggtatcgaacgtattttgaaatctcgtatggaaatgatagaagctcgaacagttgattgggctcttggagaagctatggcttttggttccttacttaaagagggcattcatgttagattgtcaggtcaagatgtagaaagaggaactttttcacatagacatcatgttcttcatcatcaaactgtagataaagctacttatagaccgttatgttatctttatccagatcaagctccatacactgtgtgcaatagttctttatcagagtttggtgttcttggatttgaattaggttattctatgacaaatcctaacgcattagtatgctgggaagcgcaatttggtgatttcaataatacagcacaatgcattatcgatcaatttattagcagtggtcaagctaaatgggtacgtcaatctggtcttgttatgctgcaacctcatggtctcgaaggaatgggacctgagcattccagtgctcgtttggaacgttttttacaaatgtcggctgatgatccagattattttcctcctgaaaatgaagaatttgctgtacgccaattgcatgatatcaactggattgtagctaattgcagtacaccagcaaattattttcatattttaagaagacaaattgcattgccatttagaaaacctttgattttaatgacaccaaaatcattacttcgtcatccagaagcgaaatctaatttcgatttaatgctagaaaatacagagtttcttagagtaataccagaagaaggtgtagcttctcagaatcctaataatgttaaaagagtgcttttttgttctggtaagatttactatgatctaaaaaaagcacgcgcagagaaaaatttggatgataaagttgctattataagaattgaacagatttcacctttcccatatgatttagttaaaaaagaagctgttaaatattccaatgcagatttagtatgggctcaagaagaacataaaaatcaaggtgcatggacatatattcagcctagattccatacagctcttaatggaactcgttctgtatcatatgttggtcgaccaacgggagcttcacccgcaacaggaagtaaaatgcagcatctcaaagaattgaaacaattacttgatgactccttcaatctttaa

SEQ ID NO: 6136 - protein, 1029 aa, Apis mellifera
MYKARTVFNTLTPLAPRMCKPERFASWLVRSHPLTRTTQVMVAKSARKYSNRVATEPFLNGSSSSYVEEMYNAWLQDPHSVHVSWDSFFRSSTAGAAPGLAYQAPPSLAPSHNQVPLGALLPLGGSTQLSQIPITEKVIDDHLAVQAIIRSYQARGHLVADLDPLGIMQTDLIHTHYAARKGSPEQVLRQYMLEESDMDRIFKLPSTTFIGGKEKSLPLREILKRLEAAYCGHIGVEFMFINSLEQCNWIRQKMETPGIMEMTNDERRLILARLTRATGFEAFLARKWSSEKRFGLEGCEILIPAMKQVIDKSTELGVESIVMGMPHRGRLNVLANVCRKPLSQIFTQFAALEAADDGSGDVKYHLGTYIERLNRVTNKNIRLAVVANPSHLEAVDPVVQGKTRAEQFYRGDGEGKKVMSILLHGDAAFCGQGIVFETMHLSDLPDYTTHGTIHIVVNNQIGFTTDPRHSRSSPYCTDVARVVNAPIFHVNSDDPEAVMHVCKVAAEWRATFHKDVVIDIVSYRRNGHNEIDEPMFTQPLMYRKIKNTPPVLDKYAKTLTDDGVVTSEEVKDVKDKYEKICEEAYVNAKQETHIKYKDWLDSPWSGFFEGKDPLKVSPTGIKEDTLIHIGKKFSSPPPNAAEFVVHKGIERILKSRMEMIEARTVDWALGEAMAFGSLLKEGIHVRLSGQDVERGTFSHRHHVLHHQTVDKATYRPLCYLYPDQAPYTVCNSSLSEFGVLGFELGYSMTNPNALVCWEAQFGDFNNTAQCIIDQFISSGQAKWVRQSGLVMLQPHGLEGMGPEHSSARLERFLQMSADDPDYFPPENEEFAVRQLHDINWIVANCSTPANYFHILRRQIALPFRKPLILMTPKSLLRHPEAKSNFDLMLENTEFLRVIPEEGVASQNPNNVKRVLFCSGKIYYDLKKARAEKNLDDKVAIIRIEQISPFPYDLVKKEAVKYSNADLVWAQEEHKNQGAWTYIQPRFHTALNGTRSVSYVGRPTGASPATGSKMQHLKELKQLLDDSFNL

SEQ ID NO: 6137 - DNA, 2943 bp, Apis mellifera
  CDS (1)..(2943)
atggacagtattcagtatttggaatatatgtatcaatcatggaaaaaggatccaagttctgtgagtgattcctggaatagatattttaaattaattgacgagaaagataaaaaatcggaggcagcttcccacaaatcatcaccaaaatcgacttcatcttctactcacggtggatcaccatcttcacagtcaacaaaatctcctgaacaaaatgcaaaatcgaagtcaaacagtgatatgcaaggtgataagtatataattggagctttcgatatcaatgccacgattcgagcttatcaagcacgtggtcatttgattgccgatactgatccattgggcatacaaaatccagaatcgcgtaagcttcaaggcactcctaatttaccacctgcgatcgtggtgcgacaatatttgaagggaatgaccgaagctgatatgaatagagaatttcctcttgcaccatttactgtaattggtggctctaaacgaagtcttcctttgcgtgatattctaattagattgaaccaagtttattgcgggcatttaggtcttgaatatacctatattcatgatcttgttatgttagattggttaagagataagtttgaaatacctggtgcttgggatcttccagcggatcataggaaatttatttggatgaatattatgaaggcagtaacattcgaaggatttttagcaagaaaatttcccactgaaaaaagatttggtttggaaggttgcgaatcttttataccatcaatgaatcagtgcttggaaacatcagcggaacatggagttgaaagtgttgtgataggaatggctcatcgaggtcgattaaacacattgatcaacgtttgtatgaaaccattacatcaacttcttacacaatttcattcgattgctttagaaggttttggttctggtgatgtcaaatatcatttaggaacgcatgcggaaagaatgttagaaagaagtcagaaacagattcgggttgctatgatggctaatccatctcatttggaggcaatagatcctgtcgtagttggtcgcgttcgagctgaacaagtagaaaagaatgatgccgaatttggcaaaaaatcggtggcttttttggttcatggtgatgctgctttctcgggtcaaggtattgtttacgaaacgatgcatttgactaatttaccgaattacacgacaggtggcgttattcacattgtaatcaacaatcaaattggtttcactacggatcctagatattctcggtcaagtgcgcattgcacagatgtagcacgtgttgtaaacgccccgatatttcatatacatgctgatgatcctgatttagtgacctattgtagtaaagttgccagcgaatacagagccgaatttcacaacgatgttgttgtagacatcgtaggatatcgaagattcgggcacaatgaattagatgagcctatgctcactcaacctttgatgtataaacgtattaagcaacatccgaatgtgcttaatatttacagcgataaattgttcaaagaaggagtgattactgaagcatttgccaaagaagaaattgaaaaatattggaactattgtgaaacagaattcgaaaaggcaaaaactatagattcaatgcaattgggtgattggcatgatgtaccttggagcgatttctttgctactcaaagtcccaaaaataaaattccaccgacaggtatcgacatagaaactataaagacaatttgtaaagcgatatcaactcctcctaatgacatcgaatcccatacacaggtattaagagtaatggaaaaaagagcgcaattgagtaaatctcgtcaggcagactgggctatgggtgaatgtttagcatttagtagtttattaaaagaaggttgccccgtgagattgtctggtgaagatgttgagcgaggcaccttttctcatcgcacacatgttattcacgatcagagtagagataaaacctataaaaatattttgcatgatatatttccgggacaagcaatgtatactgtcacgaattcttcattatcggaatatggcgtttgcggattcgaggtgggttattcgacatataaccataacacattaacaatttgggaagctcagtttggtgattttgcgaacacttgtcaggtcactttagatactattttaagttccggacaaacgaaatggggtagacaggtaggattagttcttcttttgccccacggattagaaggacagggacctgaacattcctctgcaaaaattgaacggtacctcgagctttgtgacgacgatttttcctatcttccgacggccgaaccaggagaaactatagatcaaattatgacacggcaattgttcgaaataaattggattatttgcaatttaacgacgcctgcaaatttttttcatgtccttcgtcgtcaaatccatatgccttttcggaaaccattgtgtataatgacacccaaatctttgcttcgtcatcctatggctctttcgcctttcgctgatatggagtctggcacttcatttaaacctattctctctgatccatttgtcaaaccaggaaatatacaaaaagtgttgatgtgtagtggaagagtattttatgatttggtgactgaacgtcaggggaaacaattggtagataaaatagcgattattcgcatcgaacaactttgtccatttccatatcatttattagctgaagaaatgaaaaaatatccgaatgctaaacttatgtggttacaagaagaacataaaaatcaaggtccatatttgtatgtgagagatagaatagcattagctttaggaatacgtttagaagatttggcttatggaggcagaccaccatcatcttctccagcaactggcagcaaagttattcacagaaatgaatacaatgatatgataacgatggctttgaaacttgattga

SEQ ID NO: 6138 - protein, 980 aa, Apis mellifera
MDSIQYLEYMYQSWKKDPSSVSDSWNRYFKLIDEKDKKSEAASHKSSPKSTSSSTHGGSPSSQSTKSPEQNAKSKSNSDMQGDKYIIGAFDINATIRAYQARGHLIADTDPLGIQNPESRKLQGTPNLPPAIVVRQYLKGMTEADMNREFPLAPFTVIGGSKRSLPLRDILIRLNQVYCGHLGLEYTYIHDLVMLDWLRDKFEIPGAWDLPADHRKFIWMNIMKAVTFEGFLARKFPTEKRFGLEGCESFIPSMNQCLETSAEHGVESVVIGMAHRGRLNTLINVCMKPLHQLLTQFHSIALEGFGSGDVKYHLGTHAERMLERSQKQIRVAMMANPSHLEAIDPVVVGRVRAEQVEKNDAEFGKKSVAFLVHGDAAFSGQGIVYETMHLTNLPNYTTGGVIHIVINNQIGFTTDPRYSRSSAHCTDVARVVNAPIFHIHADDPDLVTYCSKVASEYRAEFHNDVVVDIVGYRRFGHNELDEPMLTQPLMYKRIKQHPNVLNIYSDKLFKEGVITEAFAKEEIEKYWNYCETEFEKAKTIDSMQLGDWHDVPWSDFFATQSPKNKIPPTGIDIETIKTICKAISTPPNDIESHTQVLRVMEKRAQLSKSRQADWAMGECLAFSSLLKEGCPVRLSGEDVERGTFSHRTHVIHDQSRDKTYKNILHDIFPGQAMYTVTNSSLSEYGVCGFEVGYSTYNHNTLTIWEAQFGDFANTCQVTLDTILSSGQTKWGRQVGLVLLLPHGLEGQGPEHSSAKIERYLELCDDDFSYLPTAEPGETIDQIMTRQLFEINWIICNLTTPANFFHVLRRQIHMPFRKPLCIMTPKSLLRHPMALSPFADMESGTSFKPILSDPFVKPGNIQKVLMCSGRVFYDLVTERQGKQLVDKIAIIRIEQLCPFPYHLLAEEMKKYPNAKLMWLQEEHKNQGPYLYVRDRIALALGIRLEDLAYGGRPPSSSPATGSKVIHRNEYNDMITMALKLD

SEQ ID NO: 6139 - DNA, 3036 bp, Candida glabrata CBS 138
  CDS (1)..(3036)
atgttgagaactaaagcatggtcgtcctcttggcgtttggccaacaggaaggttctgcagcagcgcacagttttgaacactgtcagggccactgctgtgaggacatatgcgtcccaggacaactttgtcaacactaccaatgcagcatatattgacgaaatgtaccaggcctggcagcaggacccatcctcggttcatgcctcctggaatgcttacttcaagaacatgaaggacttgaagatacctgcatcccaggctttccaggccccacctatcctgttgggctcgccacaaggtactcacgaggcaccactatccactctatccggatctaacatcgacgagaacgtctctgtgcatttgaaagtacagctgctgtgtagagcttaccaggtgagaggtcacttgaaagcgcatatcgacccactgggcatctccttcggcagcaacaagaatgctactatccctaaggaattgaccctagattattacggattcaccgagcgtgatctcgatagagaaatcaacttgggtccaggtattttgcctagatttgccagggacggcaagaagtccatgacacttagagaaatcattgagcacatggaaaaactatactgtacctcttacggtatcgaatatacccacatcccatccaaggagaagtgtgagtggctaagagaaagaatcgaaatccctaccccttaccaatacacagttgatcaaaaaagacaaatcttggatagactaacttgggctacttctttcgagagtttcctatcgactaaatttccaaatgagaaaagatttggtctagaaggtctggaagccgtcgtcccaggtattaagaccttgatcgaccgttctgtcgagatgggtgtcgaggatgttgttttgggtatggctcaccgtggtagattgaatgttctatctaatgtggtccgtaaaccaaacgaatccatcttctcagaattccaaggcacaacaaagaaggacgtcgagggctctggtgatgtcaaataccacttgggtatgaactaccaaagaccaacaacttctggtaagtacgtcaacctatccttagttgcaaatccatcccacttggaagcccaagaccctgttgtccttggtagaactagatccatcttacacgccaaaaatgatttagagacaaagtcgaaggcattggctgttcttctgcatggtgatgccgcttttgctggacaaggtgttgtttatgaaacaatgggtttcgttaacttaccagaatactccactggtggtaccattcacatcattaccaacaatcaaatcggtttcactaccgatcctagattctccagatccacaccatacccatcagatttggcaaaagccatcgatgctcctatcttccatgtcaatgccaatgatgtcgaagcagtgacttacatttttggattagctgctgaatggagacaaacattccacactgatgccattattgatgtggttggttggagaaagcacggtcacaacgaaactgaccagccttcgtttactcaacctctaatgtacaagcagattgctaagactccatccgttattgatgtctacaccgataagctactgaaagagggctctttcagcaaatctgacatagaagagcacaaaaaatgggtgtggggaatgtttgaagaagcttttgaaaaggcaaaggactacgttccaacaccaagagagtggctaactgccgcttgggaggatttcaagtctccaaaagaactagcaactgaaattctaccacatgaaccaacaaaggtctcagaagatatattaaagaatatcggtaagactatctcttcttggccggaaaactttgaagttcacagaaacttgaagagaatcttgaatcaaagaggtaagtctgtcgaaaccggtgaaggcattgactgggcaactggtgaagctttggcttacggttctttagtgttggaaggccataacgtcagagtttcgggtgaagatgtcgaaagaggtacattctctcaacgtcactcggttttgcacgaccaagcctctgaagccacatacactccgttaaagaacctaagcgataagcaagcagacttcactattgctaactcatctttatctgagtatggtgttatgggtttcgaatatggttactccttaacttctccagagaacttgattgtttgggaggcgcaatttggtgattttgccaacactgcgcaagttataatcgatcagtttattgctggtggtgagcaaaagtggaagcaacgttctggtctagttctatcattacctcatggttacgatggtcaaggtccagagcactcttctggtagattggagagattcttgcagatggcaaatgaagacccaagatacttcccatctcctgaaaagctacaaagacaacaccaagattgtaactaccaagttgtttacccaactactccagccaatttgttccacattctaagaagacaacaacaccgtcaattccgtaaaccactggttctcttcttctccaagcaactattgcgtcacccattggcaagatccaacttgtctgaattcacagaaggtagcttccaatggataatagaagacgttgaacacggcaaggctatcggtaccaaagaggaaaccaagaagttggtattgatgagtggtcaagtctacactgctttgcacaagaagcgtgagcaattgggtgacaagactacagctttcttaaagattgaagaactacatccattcccattcgcacaactgcgtgatactttgaactcttatccaaacttggaagaaattgtttggtgtcaagaagagccattgaacatgggttcatggaactatgtagctccaagactacaaactgttttgaaggaaactgagcagtacaaggacaatgttgtaagatactgtggtagaagcccaagtggtgctgttgctgccggtaacaagaagttgcacttggcagaagaagaagcattcttgaaggatgtcttcaacgaatcttga

SEQ ID NO: 6140 - protein, 1011 aa, Candida glabrata CBS 138
MLRTKAWSSSWRLANRKVLQQRTVLNTVRATAVRTYASQDNFVNTTNAAYIDEMYQAWQQDPSSVHASWNAYFKNMKDLKIPASQAFQAPPILLGSPQGTHEAPLSTLSGSNIDENVSVHLKVQLLCRAYQVRGHLKAHIDPLGISFGSNKNATIPKELTLDYYGFTERDLDREINLGPGILPRFARDGKKSMTLREIIEHMEKLYCTSYGIEYTHIPSKEKCEWLRERIEIPTPYQYTVDQKRQILDRLTWATSFESFLSTKFPNEKRFGLEGLEAVVPGIKTLIDRSVEMGVEDVVLGMAHRGRLNVLSNVVRKPNESIFSEFQGTTKKDVEGSGDVKYHLGMNYQRPTTSGKYVNLSLVANPSHLEAQDPVVLGRTRSILHAKNDLETKSKALAVLLHGDAAFAGQGVVYETMGFVNLPEYSTGGTIHIITNNQIGFTTDPRFSRSTPYPSDLAKAIDAPIFHVNANDVEAVTYIFGLAAEWRQTFHTDAIIDVVGWRKHGHNETDQPSFTQPLMYKQIAKTPSVIDVYTDKLLKEGSFSKSDIEEHKKWVWGMFEEAFEKAKDYVPTPREWLTAAWEDFKSPKELATEILPHEPTKVSEDILKNIGKTISSWPENFEVHRNLKRILNQRGKSVETGEGIDWATGEALAYGSLVLEGHNVRVSGEDVERGTFSQRHSVLHDQASEATYTPLKNLSDKQADFTIANSSLSEYGVMGFEYGYSLTSPENLIVWEAQFGDFANTAQVIIDQFIAGGEQKWKQRSGLVLSLPHGYDGQGPEHSSGRLERFLQMANEDPRYFPSPEKLQRQHQDCNYQVVYPTTPANLFHILRRQQHRQFRKPLVLFFSKQLLRHPLARSNLSEFTEGSFQWIIEDVEHGKAIGTKEETKKLVLMSGQVYTALHKKREQLGDKTTAFLKIEELHPFPFAQLRDTLNSYPNLEEIVWCQEEPLNMGSWNYVAPRLQTVLKETEQYKDNVVRYCGRSPSGAVAAGNKKLHLAEEEAFLKDVFNES

SEQ ID NO: 6141 - DNA, 3054 bp, Kluyveromyces lactis NRRL Y-1140
  CDS (1)..(3054)
atgttgagaactataaggtcatctcagcgtttgttacatgcttctaaattcaccaggatcggtgctgtaagcaaaccgacttccttggctgttttcagtcgtggattggctagtggtgcatcttcgacggacaacttcctgtccaccaccaatgcatcatatatcgatgagatgtacgaagcttggcaaaaggatcccacttcagttcatgtctcttgggatgcttatttcaagaacatgggtaatctgaatattccagcctcttctgccttcaccgccccaccaacattaattccaataccaacgggtcctggtgtgcctcaagatatattgatagggggttcgttaagtggcgttgaccaagacatcacaacacatttaaaagtgcaacttttgtgccgtgcttaccaagtaagaggtcaccagaaggctcatattgatccgttacaaatttcatttggtgatgataagagtaaacctctacctcgtgagttgactttggaacactatggattcacagaaaaggatctagatagagatatcacattgggacccggtatcttgccacgtttctctcgtgatggtagaaagaccatgaaactaagagaaattattgctgctttggaaaaattgtactgttctggatacggtatcgaatacattcatatcccttcaaaagaacaatgtgaatggttaagagaaagaattgaaatcccacaaccttataattataccgtagaccaaaagagacaaattttggatagactgacttgggctacttcttttgaaactttcttatctactaaattccctaacgataagagattcggtttggaaggtttagaaggtgttgttcctggtatcaagaccttgattgaccgttccgttgaattaggtgttgaagatgttgtcttgggtatggctcatcgtggtagattaaacgttttgtctaatgtggtgcgtaaaccaaacgaatccatcttctcagaatttaagggttctgttgctccagaagaatacgagggttccggtgatgtgaaatatcatttgggtatgaattaccaaagaccaactacctctggtaaatacgttaacttgtctttggttgctaacccatctcatttggaagccgctgatcctgttgttttgggtagaactagagccatccagttctctaagaacgatattggcaagtatgacaaggccatcagcgtcctattgcacggtgatgctgctttcgctgctcaaggtatcgtttacgaaaccatgggtttcctacatttgccagcatactctactggtggtaccattcacgttatcacaaacaaccaaatcggtttcactactgatccaagattcgctagatcaactctatacccatctgatttgggtaaaaccattgatgctcctatcttccatgtaaatgccaacgatgttgaagctcttacattcattttcaacttggctgctgaatggagagctactttccacactgatgccattattgacgtcgtcggatggagaaagcatggtcataatgaaactgaccaaccttccttcacacaaccattaatgtaccaaaagatttctaagcaaaaatctgtcattgacgtttacacggaaaagttggtatctgaaggttccttcaccaagcaagatatcgatgaacataagaaatgggtttggggtctattcgaggaagcatatgagaaggcaaaggactataagccaacttcaagagaatggttaactgctgcttgggaaggtttcaagtctccaaaggctttagctactgaaatcttatcccacgaaccaaccgtcgttgatgctgatactttgaagaacattggtaagaccatctcctcatggccagagaacttcgaagttcataagaacttgaagagaattttaaccaacagaggtaaagcagttgaatccggtgaaggtattgactggtctaccggtgaagcattagctttcggttccttagtgttggaaggtaatcacgtcagagtttctggtgaagatgttgaaagaggtaccttttcacaaagacatgctgttcttcacgaccaaaaatccgagaatacttacactccattaaagcacttgtctgaaaaacaagctaacttcaccatctgtaattcttcgttgtctgaatacggttgtatgggtttcgagtatggttactctttgactaacccagattatttcgttgtttgggaagctcaattcggtgatttcgccaacactgctcaagtcatcatcgatcaattcattgccgctggtgaagtgaaatggaagcaaagatccgggttagtcttgtccttgcctcacggttacgatggtcaaggtccagagcattcttcaggtagattggagagattcttgcaactaggtaacgaagatccaagatatttcccaagtgaagaaaagttgcaaagacaacatcaagattgtaacttccaaattgtttatccaaccactccagccaacttattccacatcctaagaagacaacaacatagacaattccgtaagccactggcattgttcttctctaagcaattgttacgtcacccattggctagatccaacttgaacgaattcaccgaaggtggcttccaatggatcatagaagatgtcgaattaggtaagagcattgcaccaaaggaagagattaagcgagttgttttattgtcaggtcaagtttacactgctttgcataaaaaacgtgaaactatccaagacaagaacactgcattcattaagattgaacaactacatccattcccatacgctcaattgcgtgatgccttaaacacctatccaaacttggaagacatcgtttggtgtcaagaagaaccattaaacatgggtggatgggcatatgctcaaccaagattgcaaactaccttgaaggaaactgacaaatacaaggatgctattattagatatgctggtagaaacccaagtggttccgttgctgcgggttccaaggcattgcacaacgccgaagaagaagctttcttgaaggaagtctttggccaatag

SEQ ID NO: 6142 - protein, 1017 aa, Kluyveromyces lactis NRRL Y-1140
MLRTIRSSQRLLHASKFTRIGAVSKPTSLAVFSRGLASGASSTDNFLSTTNASYIDEMYEAWQKDPTSVHVSWDAYFKNMGNLNIPASSAFTAPPTLIPIPTGPGVPQDILIGGSLSGVDQDITTHLKVQLLCRAYQVRGHQKAHIDPLQISFGDDKSKPLPRELTLEHYGFTEKDLDRDITLGPGILPRFSRDGRKTMKLREIIAALEKLYCSGYGIEYIHIPSKEQCEWLRERIEIPQPYNYTVDQKRQILDRLTWATSFETFLSTKFPNDKRFGLEGLEGVVPGIKTLIDRSVELGVEDVVLGMAHRGRLNVLSNVVRKPNESIFSEFKGSVAPEEYEGSGDVKYHLGMNYQRPTTSGKYVNLSLVANPSHLEAADPVVLGRTRAIQFSKNDIGKYDKAISVLLHGDAAFAAQGIVYETMGFLHLPAYSTGGTIHVITNNQIGFTTDPRFARSTLYPSDLGKTIDAPIFHVNANDVEALTFIFNLAAEWRATFHTDAIIDVVGWRKHGHNETDQPSFTQPLMYQKISKQKSVIDVYTEKLVSEGSFTKQDIDEHKKWVWGLFEEAYEKAKDYKPTSREWLTAAWEGFKSPKALATEILSHEPTVVDADTLKNIGKTISSWPENFEVHKNLKRILTNRGKAVESGEGIDWSTGEALAFGSLVLEGNHVRVSGEDVERGTFSQRHAVLHDQKSENTYTPLKHLSEKQANFTICNSSLSEYGCMGFEYGYSLTNPDYFVVWEAQFGDFANTAQVIIDQFIAAGEVKWKQRSGLVLSLPHGYDGQGPEHSSGRLERFLQLGNEDPRYFPSEEKLQRQHQDCNFQIVYPTTPANLFHILRRQQHRQFRKPLALFFSKQLLRHPLARSNLNEFTEGGFQWIIEDVELGKSIAPKEEIKRVVLLSGQVYTALHKKRETIQDKNTAFIKIEQLHPFPYAQLRDALNTYPNLEDIVWCQEEPLNMGGWAYAQPRLQTTLKETDKYKDAIIRYAGRNPSGSVAAGSKALHNAEEEAFLKEVFGQ

SEQ ID NO: 6143 - DNA, 2994 bp, Debaryomyces hansenii CBS767
  CDS (1)..(2994)
atgcttagggcttttagaagcgcaattcctcgcgctcaattaatgaaagctcaagtaaaaccatttgttcgtttatttgctaccggtcaagactcgtttttattgagcaacaatgccaactatattgatgaaatgtatgctgcttggaaacatgatccatccagtgttcatatttcgtggaatgcttactttaagaacattgaatcaagtaacgttcctccatccaaggcgttcacggctccgccaaccattattcctacagtagcaggaggtgccgccggattcgttccaggatcatcaccaactaacgaggacgtcgttactcacttgaaggttcaattgttggtccgtgcataccaagttagggggcaccaaaaggccaagattgatcctttgggaatctcttttggtgacaacgatgttgttccaaaggaattgactttagaacactacggtttcaccgaggccgatatggacaagcagatcaccttaggtcctggtattttacctagatttgccgaaggtggtaagaaatcgttaacattgagagaaatcatttcaaactgtgaaagattatactgtcaatcgtacggtgttgaatacatccacattccatctaaggagcaatgtgactggttaagggaaagaattgaaattcctgagccatacaagtattctccggatgaaaagagacaaattttagaccgtgtgatttggtcttgttcttttgaatcattcttggctagtaagttccctaacgacaagagattcggtttagaaggtgcagaatccgttgtccctggtatgaaagccatgattgatacctcagttgagttcggagtcgaagacattgtcattggtatgccacacagaggtcgtttgaatatgttatctaatgttgtccgtaagccaaatgaatctattttctctgaattcactggttcaagagaatttgacgaaggttccggggatgttaagtaccatttaggtatgaactacgctagaccaactacatctggtaagcacgttaacttatctcttgtcgccaatccatctcatttagaatccgaagatggtgttgtgttaggtaagactagagctattcaacaatataagaatgacattggcgaatacaaaaaggctatgtccatcttattacatggtgatgcagctttctctggtcaaggtgttgtttatgaaactatgggtcttgctaacttaccagattattcaactggtggtactatccatattattgttaataaccaaattggtttcactactgacccaagatttgctagatctaccttatacccatctgatattgccaagtccattaatgccccaattttccacgtcaacgcagatgatgtagaagccaatatctttattttcaacttagctgctgaatggagggctaccttccacaccgatgttattattgatcttgttggttaccgtaaacatggtcataatgaaactgatcaaccagctttcactcaaccattgatgtaccaaaagattgctgagaagaaacctgttattgattactacaccaagcaattaattgaagaaggtactttcaccaaggaagatattgatgaacataagaaatgggtttggaatatcttagacgaatcgttctctaagtcgaaggaatatcaatcaacttctagagaatggttaaccactgcttgggaagacttcaagtctccaaaggaattggctaccgaagtcttacctcatttgccaactgctgttgaagaagacaccttaaagaagatcggtacagctatttcagaagctccagaaggtttcgaagttcaccgtaacttgaagcgtattttgaatgccagaaagaagtccgttgaaaccggtgaaggtattgactggtcgactggtgaagccttagcctatggttctttagcattagaaggttaccatgtaagagtttctggtcaagatgttgaaagaggtactttctctcaacgtcatgctgttttgcatgaccaatcctctgaacagacctacactccattaaacaatttatctgaggatcaaggtgcatttgttatctgtaactcttcattgtctgaatacggtgttatgagtttcgaatatggttactcgttaacttctccagacgctttagttcaatgggaagctcaatttggtgattttgctaatactgctcaagtcatcgttgatcaattcatttctgctgctgaatctaaatggaaacaacgttctggtttagtcctttcattaccacatggttatgatggtcaaggtccggaacattcctccggtagaatcgaaagatatttacaattgtgtaatgaagatcaaagatatttcccatctcctgaattgttagaaagacaacatcaagatgccaacatgcaggttgcttacccaactacaccagcaaatattttccacttgttacgtcgtcaaatgcatagacaattcagaaagccattggtcttattcttttctaaacagttattacgtcatccattagccaagtctgaattatctgaattcactggtgaatctcacttccaatggatcattgaagatcccgaattaggtaagagtattaatgctaaggaagacataaaacgtgttattctctgttctggtcaagtctttactgccttacacaagaaacgtgctgatattgaagataaatctacggctttcatcaaaattgaacaattacacccattcccattcgctcaattacgtgatgctttagacagctaccctgcattagaagacttagtctggtgtcaagaagaaccattgaacatgggttcctactcttactctgctccacgtattgcaactgtcttagaaaatactgagaaacataaggataaatctttacgttatgccggtcgtgatccatcagcttctgtagctgccggaactaaggctatgcataattccgaagaagaagagttcttgaaagaagttttccagaactaa

SEQ ID NO: 6144 - protein, 997 aa, Debaryomyces hansenii CBS767
MLRAFRSAIPRAQLMKAQVKPFVRLFATGQDSFLLSNNANYIDEMYAAWKHDPSSVHISWNAYFKNIESSNVPPSKAFTAPPTIIPTVAGGAAGFVPGSSPTNEDVVTHLKVQLLVRAYQVRGHQKAKIDPLGISFGDNDVVPKELTLEHYGFTEADMDKQITLGPGILPRFAEGGKKSLTLREIISNCERLYCQSYGVEYIHIPSKEQCDWLRERIEIPEPYKYSPDEKRQILDRVIWSCSFESFLASKFPNDKRFGLEGAESVVPGMKAMIDTSVEFGVEDIVIGMPHRGRLNMLSNVVRKPNESIFSEFTGSREFDEGSGDVKYHLGMNYARPTTSGKHVNLSLVANPSHLESEDGVVLGKTRAIQQYKNDIGEYKKAMSILLHGDAAFSGQGVVYETMGLANLPDYSTGGTIHIIVNNQIGFTTDPRFARSTLYPSDIAKSINAPIFHVNADDVEANIFIFNLAAEWRATFHTDVIIDLVGYRKHGHNETDQPAFTQPLMYQKIAEKKPVIDYYTKQLIEEGTFTKEDIDEHKKWVWNILDESFSKSKEYQSTSREWLTTAWEDFKSPKELATEVLPHLPTAVEEDTLKKIGTAISEAPEGFEVHRNLKRILNARKKSVETGEGIDWSTGEALAYGSLALEGYHVRVSGQDVERGTFSQRHAVLHDQSSEQTYTPLNNLSEDQGAFVICNSSLSEYGVMSFEYGYSLTSPDALVQWEAQFGDFANTAQVIVDQFISAAESKWKQRSGLVLSLPHGYDGQGPEHSSGRIERYLQLCNEDQRYFPSPELLERQHQDANMQVAYPTTPANIFHLLRRQMHRQFRKPLVLFFSKQLLRHPLAKSELSEFTGESHFQWIIEDPELGKSINAKEDIKRVILCSGQVFTALHKKRADIEDKSTAFIKIEQLHPFPFAQLRDALDSYPALEDLVWCQEEPLNMGSYSYSAPRIATVLENTEKHKDKSLRYAGRDPSASVAAGTKAMHNSEEEEFLKEVFQN

SEQ ID NO: 6145 - DNA, 3201 bp, Apis mellifera
  CDS (1)..(3201)
atgtataaggcaaggacagtatttaatacattaactcctttggcacctcgaatgtgcaaacctgaaaggtttgcttcatggctggtacgaagtcatcccttgacaagaactacacaagtgatggtagccaaatcagccagaaagtatagcaatcgggtagcaacagaaccttttctcaatggaagttctagttcttatgtagaagaaatgtataatgcatggttacaagatcctcatagtgtacatgtgtcttgggattcatttttccgtagtagtactgctggagctgcaccaggtcttgcatatcaggctcctccttcccttgctccaagtcataaccaagttccattaggagcattattaccacttggtggaagtactcaattaagccaaatacctattactgagaaagtaattgatgatcatctggctgttcaagctattattcgttcttatcagattcgtggccatcatatcgctaaattggatccacttggcatcaacagcgctgatcttgatgatagacatccacaagagttgctctataatcattattcattcgaggagtcagacatggatcgtattttcaaattaccgtccaccacttttatcggaggcaaagaaaaatcattacctcttcgtgaaatcttaaaaagattagaagctgcttattgtggtcacattggtgtggaattcatgtttattaactccttagaacaatgcaattggattcggcaaaaaatggagacacctggtattatggaaatgacaaatgatgaaagaagacttattttggctagattaactcgagcaactggatttgaagcatttcttgcacgcaaatggtcatccgagaaaagatttggtttagagggatgtgaaattctaattcctgctatgaaacaagtaattgataaatcaactgaattaggagttgaatctattgttatgggtatgcctcatcgaggtcgtttaaatgtccttgctaatgtatgccgcaagcctttaagtcaaatatttactcaatttgctgctcttgaagcagctgatgatggatctggtgatgttaaatatcatttgggaacgtatattgagcgtctaaatcgagtaacaaataaaaacattcgtttggctgtagtggcaaatccatctcatttggaagctgttgatccggtagtacaaggaaagactcgtgcagaacaattctaccgtggtgatggtgaaggcaaaaaagtcatgtctattctcctgcatggtgatgctgcattttgtggacagggtatcgtttttgaaacaatgcacttatcagatttgcctgattacacaactcatggtactattcatatcgtggtaaataatcaaattggatttacaacagatccaagacattcacgatcatctccatactgtactgatgttgcaagagtagtgaacgcacctatctttcatgttaattcggatgatcctgaggctgtgatgcatgtttgcaaagttgctgcagaatggagagcaacttttcacaaagatgttgttattgatattgtatcatatagacgaaatggtcataatgaaattgatgaacctatgtttacacaacctttaatgtaccgcaaaattaaaaatactccaccagttctagacaaatatgctaaaactcttactgacgatggtgttgtcacttctgaagaagttaaggatgttaaagataaatatgaaaaaatctgtgaagaagcatatgtcaatgctaaacaagaaacgcatattaaatataaagattggctggattctccatggtctggtttctttgaaggaaaagatcctttaaaagtatctcctactggtattaaagaagacacactcattcatattggaaaaaaattctcatcaccaccacccaatgcagcagaatttgtagttcataaaggtatcgaacgtattttgaaatctcgtatggaaatgatagaagctcgaacagttgattgggctcttggagaagctatggcttttggttccttacttaaagagggcattcatgttagattgtcaggtcaagatgtagaaagaggaactttttcacatagacatcatgttcttcatcatcaaactgtagataaagctacttatagaccgttatgttatctttatccagatcaagctccatacactgtgtgcaatagttctttatcagagtttggtgttcttggatttgaattaggttattctatgacaaatcctaacgcattagtatgctgggaagcgcaatttggtgatttcaataatacagcacaatgcattatcgatcaatttattagcagtggtcaagctaaatgggtacgtcaatctggtcttgttatgctgcaacctcatggtctcgaaggaatgggacctgagcattccagtgctcgtttggaacgttttttacaaatgtcggctgatgatccagattattttcctcctgaaaatgaagaatttgctgtacgccaattgcatgatatcaactggattgtagctaattgcagtacaccagcaaattattttcatattttaagaagacaaattgcattgccatttagaaaacctttgattttaatgacaccaaaatcattacttcgtcatccagaagcgaaatctaatttcgatttaatgctagaaaatacagagtttcttagagtaataccagaagaaggtgtagcttctcagaatcctaataatgttaaaagagtgcttttttgttctggtaagatttactatgatctaaaaaaagcacgcgcagagaaaaatttggatgataaagttgctattataagaattgaacagatttcacctttcccatatgatttagttaaaaaagaagctgttaaatattccaatgcagatttagtatgggctcaagaagaacataaaaatcaaggtgcatggacatatattcagcctagattccatacagctcttaatggaactcgttctgtatccagcggaaatacatcatacgacagtaaggatagcagagggtggtttagtggttggttttcaactaaaccaacaattgtgtccgagccactgtcaaaagaatctaataaatccaaacagagaacattaagatatgttggtcgaccaacgggagcttcacccgcaacaggaagtaaaatgcagcatctcaaagaattgaaacaattacttgatgactccttcaatctttaa

SEQ ID NO: 6146 - protein, 1066 aa, Apis mellifera
MYKARTVFNTLTPLAPRMCKPERFASWLVRSHPLTRTTQVMVAKSARKYSNRVATEPFLNGSSSSYVEEMYNAWLQDPHSVHVSWDSFFRSSTAGAAPGLAYQAPPSLAPSHNQVPLGALLPLGGSTQLSQIPITEKVIDDHLAVQAIIRSYQIRGHHIAKLDPLGINSADLDDRHPQELLYNHYSFEESDMDRIFKLPSTTFIGGKEKSLPLREILKRLEAAYCGHIGVEFMFINSLEQCNWIRQKMETPGIMEMTNDERRLILARLTRATGFEAFLARKWSSEKRFGLEGCEILIPAMKQVIDKSTELGVESIVMGMPHRGRLNVLANVCRKPLSQIFTQFAALEAADDGSGDVKYHLGTYIERLNRVTNKNIRLAVVANPSHLEAVDPVVQGKTRAEQFYRGDGEGKKVMSILLHGDAAFCGQGIVFETMHLSDLPDYTTHGTIHIVVNNQIGFTTDPRHSRSSPYCTDVARVVNAPIFHVNSDDPEAVMHVCKVAAEWRATFHKDVVIDIVSYRRNGHNEIDEPMFTQPLMYRKIKNTPPVLDKYAKTLTDDGVVTSEEVKDVKDKYEKICEEAYVNAKQETHIKYKDWLDSPWSGFFEGKDPLKVSPTGIKEDTLIHIGKKFSSPPPNAAEFVVHKGIERILKSRMEMIEARTVDWALGEAMAFGSLLKEGIHVRLSGQDVERGTFSHRHHVLHHQTVDKATYRPLCYLYPDQAPYTVCNSSLSEFGVLGFELGYSMTNPNALVCWEAQFGDFNNTAQCIIDQFISSGQAKWVRQSGLVMLQPHGLEGMGPEHSSARLERFLQMSADDPDYFPPENEEFAVRQLHDINWIVANCSTPANYFHILRRQIALPFRKPLILMTPKSLLRHPEAKSNFDLMLENTEFLRVIPEEGVASQNPNNVKRVLFCSGKIYYDLKKARAEKNLDDKVAIIRIEQISPFPYDLVKKEAVKYSNADLVWAQEEHKNQGAWTYIQPRFHTALNGTRSVSSGNTSYDSKDSRGWFSGWFSTKPTIVSEPLSKESNKSKQRTLRYVGRPTGASPATGSKMQHLKELKQLLDDSFNL

SEQ ID NO: 6147 - DNA, 3147 bp, Aspergillus nidulans FGSC A4
  CDS (1)..(3147)
atgtttcgttctaccgccatgaaggcgaccgtgcgcggtgctgcctgctcttcatgtagacggtcaatgtctctcgcttctaccgtcagacgtgccgactcgagctcaaaatttggcctagctacccgacgacctctcgcccttgttggcaagagattctatgcctcgtctgccgaggattctggcgtggccgccagcgactcctttctctcaggaaacaccgccaactatattgatgagatgtacgtcgcatggaggaaagacccttcaagcgtccacatctcgtggcagacgtatttccgtaacatggaggagggcaaaatgccaatctcccaggccttccagccccctcctaccctcgttccgacgcccactgggggcgtccaccaggagatgcccggtgctggtctcggtctttcccaaggcactgatgtcacaaagcacctgaaggtccaactacttgttcgcgcataccaggctcgcggtcaccacaaggctaagatcgatcccctgggtatccgtggcgaagctgaagcctttggttacagcaagcccaaggagctcgagctggaccattacggcttcaccgagcgcgatctagatgaggagtttgaccttggtccaggtattcttccccgcttcgctactgagggccgtaagaagatgtctctccgtgagatcattgctgcttgcgaaaagatctactgtggctcgtacggcgtggagtatattcacatccccgaccgtaagccttgcgattggattcgtgatcgtttcgaggtcccggagccctacaagtactccgtcgatgacaagcgccgcattctcgaccgtctcatctggagttctagctttgaggctttcctggctaccaagttccctaacgataaacgtttcggtctggagggttgcgaaacccttgtgcctggtatgaaggctttgatcgaccgcagtgtcgattatggtatcaaggacatcgtcatcggtatgccccaccgtggtcgtctcaacgtcctgtccaatgtcgttcgaaagcccaatgaatccatcttcagtgagttcgccggttctgccgagccttccgatgagggctctggtgatgtcaagtaccaccttggcatgaacttcgaacgccccaccccctctggtaagcgtgtgcagctctctcttgttgcaaacccgtcccatctcgaagccgaggaccccgtcgtcttgggtaagacccgcgctatccagcactacaacaatgatgagaagaacttcgatagcgccatgggtgttttgctgcacggtgatgctgcgtttgctgctcagggtattgtctatgagaccatgggcttccactccttgcccgcctactccactggaggaactatccacatcgtcgtgaacaaccagattggtttcaccaccgatcctcgctttgctcgctctacaccttactgctcagacatcgccaagtcgattgatgcgcctgtcttccacgtcaacgctgatgacgttgaggctgttaactacgtctgccaggtcgctgctgactggcgcgccgagttcaagcgtgacgttgtcattgatattgtctgctaccgtaagcagggtcacaacgagactgaccagccctctttcacccagcctctaatgtacaagcgcgttgctgagaaaaagcttcagctcgacatgtacgttgagaagctcatttccgagggcaccttcaccaaggaggacattgacgagcacaagaagtgggtctggggcatgctcaatgacagctttgaccgaagcaaggactaccagcccaccggtaaggagtggctgacctccgcctggaacggtttcaagactcccaaggagcttgccactgaggtgctgccgcatcttcccaccgctgtcgagcctcctattctgaaaaatgtcgccgacaagatcagtggtgctcctgaaggcttcactcttcaccgcaacctcaagcgtattctgggcaaccgcaagaagaccgttgaggagggtaaaaatattgattgggctactgccgaggctcttgccttcggttccctcgtcagcgagggttaccacgtccgtgtgtccggtcaggatgttgagcgtggtactttctctcagcgtcatgctgttctccacgaccaggagactgaggcgacttacacccctcttcagcacatcagcaaggaccagggtagctttgttatttctaactcgtctctgagtgaattcggagcccttggcttcgagtatggttactctttgacctctcctaacgcccttgttatgtgggaggctcagttcggtgactttgccaacaacgctcagtgtatcatcgaccaattcattgcctctggagaatccaagtggctgcagcgctccggtttggtcctgtctcttcctcatggttacgacggtcagggccctgagcactcttccggtcgtatggagcgttacctccagctctgtaatgaggagccccgtgtcttcccctcccaggacaagctcgaccgccagcaccaggactgcaacatgcaggttgcttacatgaccagccctgcgaacctgttccacttgctgcgtcgccagatccaccgtcaattccgcaagccccttgtgatcttcttctctaagtctctccttcgtcacccacttgctcgctcctctattgaggagttcactggcgactctcacttccaatggatcattcccgaccctgctcatggaaccgccatcgatgagcctgagaagattgagcgtgtcattctctgctctggccaggtgtacgctgccctcaccaagcaccgcgaagccaacaacatccgcaacactgccatcacccgtgttgagcagctgcatcccttcccttgggctcagttgaaggagaaccttgacagctaccccaacgctcgcaacattgtgtgggctcaggaagagcccctgaatgccggttcatggagctacgtccagcctcgcattgagactctgcttaacgagaccgagcatcacaaccgccgccacgtcatgtatgctggtcgcccgccaagtgcttccgtagccaccggcttgaaatccgttcacgtgaaggaagagcaggaaatgctcgaggaggctttctccgtccaccaggagcgtttgaagggcgagtag

SEQ ID NO: 6148 - protein, 1048 aa, Aspergillus nidulans FGSC A4
MFRSTAMKATVRGAACSSCRRSMSLASTVRRADSSSKFGLATRRPLALVGKRFYASSAEDSGVAASDSFLSGNTANYIDEMYVAWRKDPSSVHISWQTYFRNMEEGKMPISQAFQPPPTLVPTPTGGVHQEMPGAGLGLSQGTDVTKHLKVQLLVRAYQARGHHKAKIDPLGIRGEAEAFGYSKPKELELDHYGFTERDLDEEFDLGPGILPRFATEGRKKMSLREIIAACEKIYCGSYGVEYIHIPDRKPCDWIRDRFEVPEPYKYSVDDKRRILDRLIWSSSFEAFLATKFPNDKRFGLEGCETLVPGMKALIDRSVDYGIKDIVIGMPHRGRLNVLSNVVRKPNESIFSEFAGSAEPSDEGSGDVKYHLGMNFERPTPSGKRVQLSLVANPSHLEAEDPVVLGKTRAIQHYNNDEKNFDSAMGVLLHGDAAFAAQGIVYETMGFHSLPAYSTGGTIHIVVNNQIGFTTDPRFARSTPYCSDIAKSIDAPVFHVNADDVEAVNYVCQVAADWRAEFKRDVVIDIVCYRKQGHNETDQPSFTQPLMYKRVAEKKLQLDMYVEKLISEGTFTKEDIDEHKKWVWGMLNDSFDRSKDYQPTGKEWLTSAWNGFKTPKELATEVLPHLPTAVEPPILKNVADKISGAPEGFTLHRNLKRILGNRKKTVEEGKNIDWATAEALAFGSLVSEGYHVRVSGQDVERGTFSQRHAVLHDQETEATYTPLQHISKDQGSFVISNSSLSEFGALGFEYGYSLTSPNALVMWEAQFGDFANNAQCIIDQFIASGESKWLQRSGLVLSLPHGYDGQGPEHSSGRMERYLQLCNEEPRVFPSQDKLDRQHQDCNMQVAYMTSPANLFHLLRRQIHRQFRKPLVIFFSKSLLRHPLARSSIEEFTGDSHFQWIIPDPAHGTAIDEPEKIERVILCSGQVYAALTKHREANNIRNTAITRVEQLHPFPWAQLKENLDSYPNARNIVWAQEEPLNAGSWSYVQPRIETLLNETEHHNRRHVMYAGRPPSASVATGLKSVHVKEEQEMLEEAFSVHQERLKGE

SEQ ID NO: 6149 - DNA, 2991 bp, Candida albicans SC5314
  CDS (1)..(2991): transl_table=12
atgcttagagcttttagaagtgctgtacctcgtacacagcttttaaaatcacgcttaactattccaaaaacttctgttattggcagacgttatcttgctaccgattcatttttgcaaggatccaattccaactatgtcgatgaaatgtacgaagcttggagacaagatccttcaagtgtccacgcttcatggaatgcctacttcaagaacattgaaaatgataacatcccaccatccaaggctttccaagccccaccaactattgtcccaactgtttcaggaggtgctgctggattttatccgggtcaaagcccaatctccgaagacgttgttacccatttgaaggtgcaattgttggttcgtgcttaccaagttagaggtcaccagaaagctaaaattgatccattgggaatctcttttggtgacaacactactgttccaaaagaattgactttagactactatggtttcactgaacaagatttggctaaagaaatcactttgggtcctggtattttgccaagattcgctcaaggtggtaagaagagtatgactttgaaagaaatcatcaacttttgtgaaaaaacttactgctcctcctatggtgttgagtacgtacacattccatcaaaggaacaatgtgactggttaagagacagaattgaagttcctcaaccatttaaatattctccagatcaaaaaagacaaattttggatcgtttgatttgggccacctcttttgaatccttcttgtcaagtaagttcccaaatgacaagagatttggtttggaaggtgcagaagccgttgtcccaggtatgaaagctttaattgatacctctgttgaatacggtgttgaagacgttgttatcggtatgccacatagaggtagattgaatatgttgtctaatgttgttcgtaaaccaaacgaatctatcttttccgaattcactggttctaaagaatttgatgaaggttctggtgatgtgaagtaccatttgggtatgaattatgctagaccaacaacttctggtaaacacgtcaacttatctattgttgctaatccatcccatttggaagccgaagatggtgttgttttgggtaaaactcgtgcaattcaacaatacaaacaagacattggttctttcaaaaaagcaatggctgtccttttacatggtgatgctgcatttgccggacaaggggttgtttatgaaactatgggttttgctaacttgccagcctattctactggtggtactattcatgtcattgtgaataatcaaattggtttcaccactgatccaagatttgctagatcaaccttgtatccatctgacattgccaaagccattgatgctccaattttccatgttaatgctgacgatgtggaagcttgtacttttgttttcaacttggctgctgaatggagagccacttaccacactgactgtatcattgatgtcgttggttacagaaagcacggtcataatgaaactgatcaaccatctttcactcaaccactcatgtaccaagaaattgctaaaaagaactctgtcattgacatttacgaaaaacaattaattgacgaaggtacttttactgctgaagatatcaaagaacacaagcaatgggtttggaatattttagaagacaacttcaagaaagccaaggaatataaacctacctctagagaatggttgaccactccttgggaagatttcaagtcaccaaaagaattggctactgaagtcttaccacacttaccaactgctgttgacgaagctactttgaaaaagattggtaatgccatttccgaaactccagaaggatttgaagttcacagaaacttgaaacgtattttgaatgctagaaagaagagtgttgaaaccggtgaaggtattgattatgctactggtgaagctcttgcttatggttctttggctctcgaaggataccatgttagagtgtcgggtcaagatgtcgaaagaggtaccttctctcaaagacatgctgttttgcacgatcaaaacagtgaatctgtgtggacaccattatccaacttgagtgaagatcaaggtgctttcaatatttccaactcttccttgtcagaatacggtgttttagggtttgaatatggttactccttgacctccccagatgctttggttgaatgggaagctcaatttggtgatttcgccaacactgcccaagttgtcattgatcaattcgtcgctggtgctgaatcgaaatggaaacaaagatctggtgttgttttgtcattgccacatggttacgatggtcaaggtccagaacattcctcatccagactcgaaagatacttacaattatgtaatgaagatcaacgtttcttcccatcaccagaaaaattagaacgtcaacatcaagactgtaacatgcaagttgcctacccaaccaccccagccaacgttttccatcttttacgtcgtcaaatgcatagacaatttagaaaaccattgattttggtcttctccaaatcgttattacgtcatccattggcaagatctaacttgtcggaattcaccggtgactcacacttccaatggatcattgaagatgttttgggtgacaaatcggaagtgaagagagttgttttattgactggtcaagtttatgctgctttgcacaaaaagagagcttccttggatgacaaatcaactgctttcattaagattgaacagttgcatccattcccatacgctcaattacgtgatgccttgaatgaatatccaaaccttgaagacttggtgtggactcaagaagaaccattgaacatgggtgcttacaactttgctgccccaagagtggaagctgttttgggtgaaactcaaaaatacaaggacttgaaattgagatatgctggtagagatccaagtgcttctgttgctgctggttctaaggccatgcatgttgctgaagaagaagaattcttagaagaaacctttcgtcaataa

SEQ ID NO: 6150 - protein, 996 aa, Candida albicans SC5314
MLRAFRSAVPRTQLLKSRLTIPKTSVIGRRYLATDSFLQGSNSNYVDEMYEAWRQDPSSVHASWNAYFKNIENDNIPPSKAFQAPPTIVPTVSGGAAGFYPGQSPISEDVVTHLKVQLLVRAYQVRGHQKAKIDPLGISFGDNTTVPKELTLDYYGFTEQDLAKEITLGPGILPRFAQGGKKSMTLKEIINFCEKTYCSSYGVEYVHIPSKEQCDWLRDRIEVPQPFKYSPDQKRQILDRLIWATSFESFLSSKFPNDKRFGLEGAEAVVPGMKALIDTSVEYGVEDVVIGMPHRGRLNMLSNVVRKPNESIFSEFTGSKEFDEGSGDVKYHLGMNYARPTTSGKHVNLSIVANPSHLEAEDGVVLGKTRAIQQYKQDIGSFKKAMAVLLHGDAAFAGQGVVYETMGFANLPAYSTGGTIHVIVNNQIGFTTDPRFARSTLYPSDIAKAIDAPIFHVNADDVEACTFVFNLAAEWRATYHTDCIIDVVGYRKHGHNETDQPSFTQPLMYQEIAKKNSVIDIYEKQLIDEGTFTAEDIKEHKQWVWNILEDNFKKAKEYKPTSREWLTTPWEDFKSPKELATEVLPHLPTAVDEATLKKIGNAISETPEGFEVHRNLKRILNARKKSVETGEGIDYATGEALAYGSLALEGYHVRVSGQDVERGTFSQRHAVLHDQNSESVWTPLSNLSEDQGAFNISNSSLSEYGVLGFEYGYSLTSPDALVEWEAQFGDFANTAQVVIDQFVAGAESKWKQRSGVVLSLPHGYDGQGPEHSSSRLERYLQLCNEDQRFFPSPEKLERQHQDCNMQVAYPTTPANVFHLLRRQMHRQFRKPLILVFSKSLLRHPLARSNLSEFTGDSHFQWIIEDVLGDKSEVKRVVLLTGQVYAALHKKRASLDDKSTAFIKIEQLHPFPYAQLRDALNEYPNLEDLVWTQEEPLNMGAYNFAAPRVEAVLGETQKYKDLKLRYAGRDPSASVAAGSKAMHVAEEEEFLEETFRQ

SEQ ID NO: 6151 - DNA, 3666 bp, Ustilago maydis 521
  CDS (1)..(3666)
atgcctacgtgttacgacgtggtcgaatcgccgcaaacatccgagacggaagccagttggagggcagagcagcagcagcagcagcagcagcagcagcacaactatcggccagaacggacaaggatgaacgacatactcaccttgctgcccaacattcgcacaccgcggactgccatcgagctggacaggaacatgaattggaccgagtggcgcactctgtcacttacgccgccggtcaattcaagattcgtgatcaacttgggctcaacgtgctctgcctgctttgctcgtcttcgcttctttccgctctctcctgtctcttttgttctcaaatcaaagaatcgtgcttgtcgattcgcgattcatcaaatattcgtgattatactccacaactcgcgtcctgtttcgctctttgctcgctctttgctctcctccttggttcctcatccgccaccatcttcaacgagtgaatcgagacccctggtctggtttcaatcgtcaacactcgaccctctcagccacaactccaaacggaacaaagcaaaaatgctgcgaagcatctcttcgcgcaccatcccccgtgccgcttggagcgcctccactctcgcctcggtctcggcgcgtcttccaaatcgatgcactttgaacgcttcgctcagatcctaccagtcttcgtcccagtctcaacaggctagtcctgctcctgccaaacccaatgctccctccggttccgacacctttatcaacaccaccaacgcctactatgccgaagagatgcacaagctctggaaacaagaccccaaatccgtccacgcctcttgggacgtctacttttccggtctcgcaaagggccttgccagtgagcacgcttttcgcgctcctcccactctcatgcctcttcccatggaggcgccccccgtcgacgtctcgggtttcagcggctccaccgatgccgtcgatgatcacctaaagcttcagctcctcgtccgagcttaccaggtgcgtggtcaccgcatcgcccgtctcgatcctctcggcatcctcgaccccgatctcgaccccaacgtccccgaggagctcaagattgagcactacggctggtcccaggctgacctggatcgcaagatgcgtctcggccccggtctgcttcccaactttgtcgactcgggcatccacgagctcaccattcgcgagatcatcgacgcctgcaagcgcatgtactgcggctccatcggcgtacagtacgtccacattcccgatcgcgaaaagtgcgactggctccgaaagcgtatcgagactcccgaacccttcaagtactcggtcgaggagaagcgcaccatcctcgaccgtctcatctggtccgactcgtttgagcgctttatcgcctccaagtatcccaacgagaagcgcttcggtctcgagggtggcgaatcgctcatccccggtctcaagacgctcatcgaccgttccgtcgagcacggcgtcgacagcgtcaccatcggcatgcctcaccgtggccgtctcaacgttctcgccaacgtgattcgcaggcccatcgagggtattctccaccagtttgccgccaaggaggacgacggcgaaggcggaggcgacgtaaagtaccatctcggcgccaactacgtccgtcccaccccttccggtaaaaaagttgcgctctcgctcgtcgccaacccctcgcatctcgaggccgaggaccccgtcgtgctcggtaagacgcgcgccctccaggactttgccaaggacaaggagcacgccacctcgatggcactcctcatgcacggtgacgccgcctttgccggtcagggcgtcgtctacgagaccatgggaatgtacaacctccccaactacgccaccggcggtaccgttcacattgtcgtcaacaaccagatcggcttcaccaccgatcctcgctttgcccgttccacgccgtacccctcggacattgccaagtccatcgacgcgcccatcttccacgtcaacggcgacgacgtcgaggcggttacctttgtctcgcagctcgctgccgactggcgtgccacctttaaaaaggacgttgtcatcgatctcgtctgctatcgacgtcacggtcacaacgagaccgaccagccctcgttcacccagccacgcatgtacgccgccattgccaagcaggaccccacgctctccaagtacgccgcccgcctcgtcgacgaaggcagcttcacaaagtctgacatcgaggagcaccaaaagtgggtatggggcatgctcgaggaggcctttgacaagagcaaaaactatcgacccgaggagcgcgaatggctctcgagtgcctgggagggcttcccctcacccaagcaactcgccgagcagatcctcgaccacaaagacactggtgtcaaggagcaaacgctcaagcacattggcaaaaccgtttccacctacccggacgactttactgtccaccgcaacctcggtcgcatcctcaagacgcgcctcaaaacggtcgaagagggcaaaaacattgacatgagcaccggcgaggcgctcgcctttggctcgctcgcgctcgagggcaactacgtgcgtctgtcgggtcaggatgtcgagcgtggtaccttttcgcagcgtcactcggtactgcacgatcaggagaacgagggcacctacacgccgctccagcacgtcggcgaaggccaggctccgtttgtggtctgcaactcgtcgctgtccgagttcggatgtatgggtttcgagctaggattctcgctcgtctcaccgcagaacctgaccatctgggaggcgcagtttggtgactttgccaacaacgcacagtgcatcatcgaccagttcattgcctcgggcgagcgcaagtggctgcagcgcaccggcctcgtgctcaacctgccgcacggctatgacggtcagggtcccgagcactcgtcggcgcgcatcgagcgtttcctgcagctctgcgatgaccacccgttcaagttccccacacctgaaaagagcaaccgtcagcatcaggattccaacatggccgtcgtctactgcaccacgcctgccaactacttccacgtgcttcgtcgccaggtgcaccgtgacttccgcaagccgctggtcaactttttctccaagtcgctgctccgtcaccccgaggcgcgatccaacctgcaagactttttgcccggcactggcttccagcgcttcatccccgaacctcacgcctcggagggcaaggacgagctggtagcgcccgatcagatcaagcgtcacattctcacgtttggtcagacctactttgagcttctcaagcacaggagggagaacaacatcaaggatgtcgccatctcgcgcatcgagcagctctcgcctctgcactacgaggcagtggtgcaggctctggacaagtacccgaacgccgatctggtcttctgccaggaggagcctttgaacaatggtgcatggtcgtatctgcagcctaggttgaggaccgcctgcaggcacacacagcatcataagaacgacattgtcatcttggcttccaggccgcctagcagttcggtggctaccggttccaaggtcgcccacaaggccgaagtcgaggcgtatctcaaggacgcctttgacttggacaggaaggcttctgatgagcttctgtag

SEQ ID NO: 6152 - protein, 1221 aa, Ustilago maydis 521
MPTCYDVVESPQTSETEASWRAEQQQQQQQQQHNYRPERTRMNDILTLLPNIRTPRTAIELDRNMNWTEWRTLSLTPPVNSRFVINLGSTCSACFARLRFFPLSPVSFVLKSKNRACRFAIHQIFVIILHNSRPVSLFARSLLSSLVPHPPPSSTSESRPLVWFQSSTLDPLSHNSKRNKAKMLRSISSRTIPRAAWSASTLASVSARLPNRCTLNASLRSYQSSSQSQQASPAPAKPNAPSGSDTFINTTNAYYAEEMHKLWKQDPKSVHASWDVYFSGLAKGLASEHAFRAPPTLMPLPMEAPPVDVSGFSGSTDAVDDHLKLQLLVRAYQVRGHRIARLDPLGILDPDLDPNVPEELKIEHYGWSQADLDRKMRLGPGLLPNFVDSGIHELTIREIIDACKRMYCGSIGVQYVHIPDREKCDWLRKRIETPEPFKYSVEEKRTILDRLIWSDSFERFIASKYPNEKRFGLEGGESLIPGLKTLIDRSVEHGVDSVTIGMPHRGRLNVLANVIRRPIEGILHQFAAKEDDGEGGGDVKYHLGANYVRPTPSGKKVALSLVANPSHLEAEDPVVLGKTRALQDFAKDKEHATSMALLMHGDAAFAGQGVVYETMGMYNLPNYATGGTVHIVVNNQIGFTTDPRFARSTPYPSDIAKSIDAPIFHVNGDDVEAVTFVSQLAADWRATFKKDVVIDLVCYRRHGHNETDQPSFTQPRMYAAIAKQDPTLSKYAARLVDEGSFTKSDIEEHQKWVWGMLEEAFDKSKNYRPEEREWLSSAWEGFPSPKQLAEQILDHKDTGVKEQTLKHIGKTVSTYPDDFTVHRNLGRILKTRLKTVEEGKNIDMSTGEALAFGSLALEGNYVRLSGQDVERGTFSQRHSVLHDQENEGTYTPLQHVGEGQAPFVVCNSSLSEFGCMGFELGFSLVSPQNLTIWEAQFGDFANNAQCIIDQFIASGERKWLQRTGLVLNLPHGYDGQGPEHSSARIERFLQLCDDHPFKFPTPEKSNRQHQDSNMAVVYCTTPANYFHVLRRQVHRDFRKPLVNFFSKSLLRHPEARSNLQDFLPGTGFQRFIPEPHASEGKDELVAPDQIKRHILTFGQTYFELLKHRRENNIKDVAISRIEQLSPLHYEAVVQALDKYPNADLVFCQEEPLNNGAWSYLQPRLRTACRHTQHHKNDIVILASRPPSSSVATGSKVAHKAEVEAYLKDAFDLDRKASDELL

SEQ ID NO: 6153 - DNA, 3168 bp, Cryptococcus neoformans var. neoformans B-3501A
  CDS (1)..(3168)
atgtttcgtgggcgtggattgaatgacatcctacttattggacagtttttaaaacatcctctctcttctgcgtttattcctttccccacacaacttcctgccgccatgctcaggtcaattccaaaacatatccgtataccgtctcgatcaacggctcagcccgctagggccatactctccctctctgctgtccagcgacatactcaaaaacgaagctatgctgcagaggccgtcgctcccagtaagaatgatgccttcgccaacggcggaaatgcgtactacactgaggagatgtaccgcctctggaaacaagaccccaagtctgtccatgtatcctggcaaacttacttctctggcctcgacaagggtcttccttctgctcacgctttcactcctccccccggtgttctctctggtgccgttcctacccctgccggcggaagccccaaactttctgttgagggcagtggtgatgtcactgattatcttaaagttcaacttttgatccgtgcctaccaagttcgaggtcatcacattgccaacctcgatcctcttcgcatttctggtgccgatctcgacggtcgtgtccctcctgagcttaaactcgactactatggttggactgaagccgacatgacgaaggaattcaggcttggcgacggcattctcccccgattcatgggtcaggtcaaggacgacacgatgactctgggtcagatcattgatgagctcaagcagatgtactgtacccacgttggctgccagtacgttcacatccccgaccggggacaatgcgactggatccgggagcgcgtcgaaattcctacccaatggaactactccaccgaggaaaagaggatgattcttgaccgactcatgtggtctgagctttttgaaaagttcattgcctccaaataccccaacgagaagcgtttcggtcttgagggttgcgagtctttgatccctggtatgaaggcgctcattgatcgttccgtggatgctggtgtcaaatctatcgttcttggtatgccccaccgtggtcgtcttaacgtccttggtaacgtcatccgaaaacctattgaggccatcttaaacgagttcaagggtaacgaggatgccgacgatactggcggtggtgatgtcaaataccacctcggtgccaactacatccgtcctactcccagcggcaagaaggtttccttgtcccttgttgccaacccttcgcacttggaggctgaagacccagttgtcctcggtaagaccagggctatccagcactttgaaggtgacgagggagacggatcctctgccatgggcgttttgctccacggtgacgctgcctttgctggtcaaggtgttgtttacgagaccatgggtatgcaaaaccttcccaactacggcactggtggtaccgtccacttgattgtcaacaaccaaattggtttcaccaccgacccccgatttgcccgttctaccccttacccctctgatattgccaagtctatcgacgcccccatcttccacgtaaacagtgacgatgtcgaggccgtcaactacgtctgtaccctcgctgctgactggcgagctaccttcaagaaggatgtagttatcgatattgtctgttaccgacgatacggtcacaacgagactgaccaacccagcttcactcagccaaagatgtacaaggctattcaaaagcaacctaccgtcttgtctatctacaccgacaagttgatcaaggaaggtacttttactgaaaaggagattgacgagcacaggcaatgggtttggggcatgcttgagaaggcttacgacggatccagggactacaagccttctccccgagaatggctttcctcctcttgggaaggtttcccttctcccaaggagcttgccgaagaggttctccctcagcaccataccggtgccagcgaggacgccctcaagcgtgttggtcagatcatctctagtttccccgaaggtttccacccccacaagaaccttgcgcgaattattggcaaccgaggcaagactgtagccgaaggcaagaacattgactggtctactgctgaagctcttgctttcggtactttgtgccttgagggtactcacgttcgaatctccggtcaggatgttgagcgtggtactttttctcagcgacacgctgtcgtccacgaccaaaagactgaacagactcacatcgctctcaagcacctggatgctgaccagggctctttcactgtcaccaactctcacttgtcagagtttggtactctcggtttcgagctcggttactctcttgtctcccccaacagtttgactatctgggaggctcagttcggtgactttgccaacaatgcccaatgtatcattgaccaattcattgctgcgggtgagcgaaaatggctccagcgaactggtctggttctctccttgcctcacggttacgacggtcaaggtcccgagcactcttctggtcgtatcgagcgattcctccagctctgtgacgatgagccccgagtgtacccctcgcctgaaaagttggagaggcagcaccaggactgcaacatgcaggtcgtctacccgactactcctgccaactatttccacgttctcaggcgacaaaacaagcgtgacttccgaaagcccttgattgtcttcttctccaaatcccttctccgacatcctcttgcccgatcttctctcgaggagatgtctggtgactccaagttccagcgatatattcccgaaccccatcctgaatcccttgtcgagcctgagaagatccgacgacacattttatgtactggccaggtctacttccagctcctcaaggagcgtgaagagcgaggtatcaacgacgttgccatttccaggattgagcaattgtctcccttgccttatgaccgtttgactcctcatcttgacaagtaccccaacgctgatcttgtctgggcccaggaggagcctctcaacaatggtgcctggacctacgttcagcctcgactcatcaccgccctccaggagactgagcatcacaagtccaagatcccattctacgctggtaggaaacctagcagttccgttgctaccggttccaagtatgcgcacaagaaggagattgagatgatcaacgagatggcttttgctccttccgaaggacagtag

SEQ ID NO: 6154 - protein, 1055 aa, Cryptococcus neoformans var. neoformans B-3501A
MFRGRGLNDILLIGQFLKHPLSSAFIPFPTQLPAAMLRSIPKHIRIPSRSTAQPARAILSLSAVQRHTQKRSYAAEAVAPSKNDAFANGGNAYYTEEMYRLWKQDPKSVHVSWQTYFSGLDKGLPSAHAFTPPPGVLSGAVPTPAGGSPKLSVEGSGDVTDYLKVQLLIRAYQVRGHHIANLDPLRISGADLDGRVPPELKLDYYGWTEADMTKEFRLGDGILPRFMGQVKDDTMTLGQIIDELKQMYCTHVGCQYVHIPDRGQCDWIRERVEIPTQWNYSTEEKRMILDRLMWSELFEKFIASKYPNEKRFGLEGCESLIPGMKALIDRSVDAGVKSIVLGMPHRGRLNVLGNVIRKPIEAILNEFKGNEDADDTGGGDVKYHLGANYIRPTPSGKKVSLSLVANPSHLEAEDPVVLGKTRAIQHFEGDEGDGSSAMGVLLHGDAAFAGQGVVYETMGMQNLPNYGTGGTVHLIVNNQIGFTTDPRFARSTPYPSDIAKSIDAPIFHVNSDDVEAVNYVCTLAADWRATFKKDVVIDIVCYRRYGHNETDQPSFTQPKMYKAIQKQPTVLSIYTDKLIKEGTFTEKEIDEHRQWVWGMLEKAYDGSRDYKPSPREWLSSSWEGFPSPKELAEEVLPQHHTGASEDALKRVGQIISSFPEGFHPHKNLARIIGNRGKTVAEGKNIDWSTAEALAFGTLCLEGTHVRISGQDVERGTFSQRHAVVHDQKTEQTHIALKHLDADQGSFTVTNSHLSEFGTLGFELGYSLVSPNSLTIWEAQFGDFANNAQCIIDQFIAAGERKWLQRTGLVLSLPHGYDGQGPEHSSGRIERFLQLCDDEPRVYPSPEKLERQHQDCNMQVVYPTTPANYFHVLRRQNKRDFRKPLIVFFSKSLLRHPLARSSLEEMSGDSKFQRYIPEPHPESLVEPEKIRRHILCTGQVYFQLLKEREERGINDVAISRIEQLSPLPYDRLTPHLDKYPNADLVWAQEEPLNNGAWTYVQPRLITALQETEHHKSKIPFYAGRKPSSSVATGSKYAHKKEIEMINEMAFAPSEGQ

SEQ ID NO: 6155 - DNA, 2706 bp, Tribolium castaneum
  CDS (1)..(2706)
atgccaaagcggttggagtgtctactgatcccaagtgccggggtttattggcatgacatttacaaatcacccgactcacccgaacaagtattaaaagcccaatgcgaccaaagcaacttcttccgtctcgtcagcgctttccgacaaaatgcccacaaaaccgccgacgtaaatccggtcgctctcacccgcgaagtaacaattttcccggattttgacccgaaacgctactgcctcgaccccgacaccaaaatcaaattcaccggaattttaaacacgacgcagtccgaaggcacagttgccgaagccgtggacttcctccgacatgtctacgggaagaatatcgccgccgaattcacccatttagagaacccggaagagatcgactggttttgtaaccggctcgaacaactcgtcccggaagaaatcgacacggagacaaaactccggctagcgacagagttgctccggtcgcagaacttcgacaattttctcgctaataaattcactggtgttaagcgatacgggggcgaaggcgccgaaagcatgatggcgttttttagcgagttttttcgccttgcggcaggagatagcgtcgaacagttggtggttgcaatgccgcataggggacgcttgaatcttctcaccggaatgctcaattttcctccggtgaagatgtttgccaagctgaaggggaagagcaacttttcggacaagtatcgtgtgacgggggatgttttaagtcattttgtgtcttcaactgatttgaaatttggagataaaaatcttcacgtaactctgttgtacaatccttcgcatttggaagctgttaatcccgtctcaatggggaagactagagccaaacaattggaaagtcgcgatggggactatggggatgggagatggggtgataaaattattaatttacaagtgcatggagacgctgcgattactggacaaggagttaatcaggaatgtttagctttaagtggaactccacattttgaaattggtggctctatccacttagttgttaataatcagttaggttttactacaccagcagatcggggaagatcatcaaggtattgcaccgacttagctaaaatgatttcagcaccggttattcacgtcaatggagacttccccgagatggttctaaaagctacaaaattagcatttgaatatcaacgtaaattccgaaaagaagtttttatcgatatgaattgctacagacaatggggacacaacgaattagacgatccgacttttactaatccttcactttacggaattatcagatctagaggtacagtccctgaccaatatacgaaaaaactaatcgacgaagggattttaaacgaggaagaaaaaaataccatcatcaaagaacatacgaaatggcttaatgagcacttgaaagctgtagattcttacaaacctgacgacgtttatttcaaaaaacaatgggaggggttttcgcaagctgacgaagccataacgacttgggacaccggaattcatctagatcttctcacatacatcggaagcaaatcggtccaatttccggaacatttcaatgtccatccgactctcctcaaaacccacgtaaaaaatcgcctggctcgagtggccgaaggcgtaaatatcgactggtcaacggctgaaactctcgcttttggttcattattatacgaggggtataatatacgcattagcggccaggatgtgggaaggggcactttttcgcaccgccacgtaatgctagtcgatcaacaaacaaaccatatttatattcccttgaacaacttgcacgaaaaccaaggcggtttcctcgaaattgctaatagtattttatcagaagaggcggttctagggtacgagtacggcatgagcatcgaaagtccgaaaaatctaattatttgggaagcccagtttggggattttttcaacggcgcccaaattatcttcgacacgtttgtatcaaacggagaagtgaagtggttatggagtagcggtttagttgtgcttctaccacatgggtacgatggagccggtcctgaacacagctcagccagaatcgaaaggtttctacaaatgaccgattccaaagaagataaagtcgacggtgataatgttaatatgcaagtttgtcatccgagcaccccagcacaatatttccatttactacgaagacagatgttgcgcaattttagaaaacctttaattgtaataggcccgaaaacacttttaagactgccggaagctacctcaaatttcgccgacatgggtcctcaaacaacatttcaacccgtcataaccgataatactcacgacccgaaacaaatccaagtcgttctgttaacctcaggaaaacacttttacaatcttgcttcaaaaagggaatcactaggtgccaaaaatgtggcaattgttcgattagaatcgtattgcccgtttccgactctagaattacaacaggaagttgcgaaatttcccaatgcaaaaatttttatgtggtgtcaagaagagccacaaaacatgggcgcttggagttttgtgaaacctcgatttgagaatttagttggcagaaaaattcagttttgtggtcgaccaactcaagctgctccagcggttggaattggcgaattgcacgaccagcaagtgtcggaaatcctgagcaaaccgttttcgtttgaaatttaa

SEQ ID NO: 6156 - protein, 901 aa, Tribolium castaneum
MPKRLECLLIPSAGVYWHDIYKSPDSPEQVLKAQCDQSNFFRLVSAFRQNAHKTADVNPVALTREVTIFPDFDPKRYCLDPDTKIKFTGILNTTQSEGTVAEAVDFLRHVYGKNIAAEFTHLENPEEIDWFCNRLEQLVPEEIDTETKLRLATELLRSQNFDNFLANKFTGVKRYGGEGAESMMAFFSEFFRLAAGDSVEQLVVAMPHRGRLNLLTGMLNFPPVKMFAKLKGKSNFSDKYRVTGDVLSHFVSSTDLKFGDKNLHVTLLYNPSHLEAVNPVSMGKTRAKQLESRDGDYGDGRWGDKIINLQVHGDAAITGQGVNQECLALSGTPHFEIGGSIHLVVNNQLGFTTPADRGRSSRYCTDLAKMISAPVIHVNGDFPEMVLKATKLAFEYQRKFRKEVFIDMNCYRQWGHNELDDPTFTNPSLYGIIRSRGTVPDQYTKKLIDEGILNEEEKNTIIKEHTKWLNEHLKAVDSYKPDDVYFKKQWEGFSQADEAITTWDTGIHLDLLTYIGSKSVQFPEHFNVHPTLLKTHVKNRLARVAEGVNIDWSTAETLAFGSLLYEGYNIRISGQDVGRGTFSHRHVMLVDQQTNHIYIPLNNLHENQGGFLEIANSILSEEAVLGYEYGMSIESPKNLIIWEAQFGDFFNGAQIIFDTFVSNGEVKWLWSSGLVVLLPHGYDGAGPEHSSARIERFLQMTDSKEDKVDGDNVNMQVCHPSTPAQYFHLLRRQMLRNFRKPLIVIGPKTLLRLPEATSNFADMGPQTTFQPVITDNTHDPKQIQVVLLTSGKHFYNLASKRESLGAKNVAIVRLESYCPFPTLELQQEVAKFPNAKIFMWCQEEPQNMGAWSFVKPRFENLVGRKIQFCGRPTQAAPAVGIGELHDQQVSEILSKPFSFEI

SEQ ID NO: 6157 - DNA, 3051 bp, Tribolium castaneum
  CDS (1)..(3051)
atgtatagggccagagcgatcgtaaacagcctcactggggtccagggacacttcgctggatggctccttgtcaaaaacacagcaccgggggctagttgcgcggctgttaggagctacaatgtacctgctgcttctgaaccttttctgaacggaagctccagccaatatgttgaggacatgtacaatgcctggctggcggacccctcgagtgtccacgcatcatgggattccttcttccggaattcggcttccggtggggccgggtaccagtcgcccccatccttggccccccttggccgaaacgaagttcctgcaacttcctttttgccagctttggccggtgttggcggaaccggagccgttagcgagaaagtaatcgacgatcacttggctgttcaggcaattatccggagttatcaggcacgtggtcatctagtagctcaactggatccattgggtatcatgtatggtgatcgtacaacgacaattagcgatagaaagggctccccacctgatgaaataacgcgtcagcataaactagaggatgacgacatggatcgagttttcaaattaccatcgacgactttcatcggcggcaaagaaaaacaattacctttgcgcgaaattcttcgtcgtttagaactgacttattgtcgccatatcggcgttgagtttatgttcatcaacagcttggagcaatgcaattggatccgacaaagattggaaactcccggcgctatggagattagcgccgacgagaaacggttaattttggctcgtttgacccgcgcaaccggatttgaatcattcttagcgcgtaaatggtcatcagagaaacgcttcggtttggaaggttgcgagattctaatcccggccatgaagcaagtcattgacaaatcgaccgagttcggcgtggagagcatcgtcatgggcatgccgcatcgtgggcgcctcaacgtcctcgccaacgtctgtcgcaagcctttgcaccagctcttcacccagttcgccggcttggaggccgctgacgacggctccggcgacgttaaataccacctggggacctacatcgagcggttgaaccgcgtcacgaacaaaaacattcgcttggcggtcgttgcgaacccgtcgcacttggaggccgtcgatccggtcgtccagggaaaaacgcgcgccgagcagttctaccgaggcgatggcgagggcaagaaggttatgtcgattttgctgcatggagacgctgccttctgtgggcaaggcatagttttcgaaacgatgcatttgtccgatttgcccgactataccacgcacgggacggttcacattgttgttaataaccagatcggttttacgacggatccgcgacactcgcgttcgtcggcctattgcacggacgtggcacgtgtggtcaacgcgccgattttccacgtgaactccgacgatccggagagcgtgatgcacgtgtgtaacatggcggcggaatggcgggccacgttccacaaagacgtggttattgacattgtctgctaccgccggaacggtcacaacgaaatcgacgaaccgatgttcacgcaacctctcatgtaccgaaaaattaagaatacgaagtcggttttggagaagtattccgaacagttggtcaaggagaacgtcgtgacgaccgaagaagttaaagatgtgaaggccaagtacgagaagatttgcgaagatgcgcttgagagtgcgcgcaaggaaacacatatcaagtacaaggattggttggatagtccctggtcgggcttcttcgaggggaaggatcccttgaaggcgagtccgacgggagttaaggaagacacgttggtgcatattgggaagaggttttcgtcgccgccgccaaatgccgccgagtttgttatccataagggtattgagaggattttgaaggcgaggatggagatggttgaggcgaggaccattgattgggcgttgggtgaagctatggcttttggctccttgctgaaggaggggattcatgtgaggttgtcgggacaggatgtcgaacgtggtactttctcacataggcatcatgttttgcatcaccagactgtggataaggctacctacagacctttgtgcaatttgtaccccgaccaggccccctacacagtctgcaacagttccctgtctgaattcggtgtcctcggcttcgagctgggctactccatgaccaaccccaacgccctcgtcatctgggaggcccaattcggcgacttcaacaacaccgctcaatgcataatcgaccaattcatctcatcgggtcaagccaaatgggtgcgtcaaagcggtctcgttatgcttctcccccatggtcttgaaggcatgggtccggagcactccagcgcccgtcttgagcgtttccttcaaatgtcctcagacgatcccgattatttcccacctgaaagcgacgaattcgccgttagacagctgcatgatatcaattggattgtcgcaaattgcaccacaccggcgaatcttttccatatcttgcggcgacagattgctttgcctttccgcaaaccgctgattttgatgacaccgaagagtttgttgcgtcatcctgaagccaggagtagttttgatgagatgttggagaatacggagttcatgaggattattccggataaaggcgctgccagtcagaatccgcaaaatgtgaagaaggtgctgttctgtagcgggaaggtttactatgatttgagaaaagcccgcgaagagaggaagttggataatgatattgttatcacccgtgtagaacaaatctcgccgttcccttacgacttgattaagaacgagtgtgccaaataccccaacgctcaattgtgctgggcccaagaggagcacaagaatcaaggttcctggagttacgtgcagccccggttcgagacagctttgaccggttcacgagatgttatttatgttggaagacctaccgctgctagccctgccactggaagcaaagcccaacatttgaaggagctggcgaaccttttggacgacgcgatggcattgtag

SEQ ID NO: 6158 - protein, 1016 aa, Tribolium castaneum
MYRARAIVNSLTGVQGHFAGWLLVKNTAPGASCAAVRSYNVPAASEPFLNGSSSQYVEDMYNAWLADPSSVHASWDSFFRNSASGGAGYQSPPSLAPLGRNEVPATSFLPALAGVGGTGAVSEKVIDDHLAVQAIIRSYQARGHLVAQLDPLGIMYGDRTTTISDRKGSPPDEITRQHKLEDDDMDRVFKLPSTTFIGGKEKQLPLREILRRLELTYCRHIGVEFMFINSLEQCNWIRQRLETPGAMEISADEKRLILARLTRATGFESFLARKWSSEKRFGLEGCEILIPAMKQVIDKSTEFGVESIVMGMPHRGRLNVLANVCRKPLHQLFTQFAGLEAADDGSGDVKYHLGTYIERLNRVTNKNIRLAVVANPSHLEAVDPVVQGKTRAEQFYRGDGEGKKVMSILLHGDAAFCGQGIVFETMHLSDLPDYTTHGTVHIVVNNQIGFTTDPRHSRSSAYCTDVARVVNAPIFHVNSDDPESVMHVCNMAAEWRATFHKDVVIDIVCYRRNGHNEIDEPMFTQPLMYRKIKNTKSVLEKYSEQLVKENVVTTEEVKDVKAKYEKICEDALESARKETHIKYKDWLDSPWSGFFEGKDPLKASPTGVKEDTLVHIGKRFSSPPPNAAEFVIHKGIERILKARMEMVEARTIDWALGEAMAFGSLLKEGIHVRLSGQDVERGTFSHRHHVLHHQTVDKATYRPLCNLYPDQAPYTVCNSSLSEFGVLGFELGYSMTNPNALVIWEAQFGDFNNTAQCIIDQFISSGQAKWVRQSGLVMLLPHGLEGMGPEHSSARLERFLQMSSDDPDYFPPESDEFAVRQLHDINWIVANCTTPANLFHILRRQIALPFRKPLILMTPKSLLRHPEARSSFDEMLENTEFMRIIPDKGAASQNPQNVKKVLFCSGKVYYDLRKAREERKLDNDIVITRVEQISPFPYDLIKNECAKYPNAQLCWAQEEHKNQGSWSYVQPRFETALTGSRDVIYVGRPTAASPATGSKAQHLKELANLLDDAMAL

SEQ ID NO: 6159 - DNA, 2973 bp, Tribolium castaneum
  CDS (1)..(2973)
atgtcaagtttaaaactcctctccttcttaaaattagccccacaatgcctccgccactactcggaaacctccttcctcactggaacctcatctcaatacatcgaagacatgtacaatgcttggctcaaagacccatccagcgtccacgtctcctgggactccttcttccgcaacaccagccaaggcctcccccaaccctaccacgcccctccgaacctggcgccctccaaaggcgccctagtctcccaaatcgcggccgtcgcaacccccccacaaaccgcccccctcgacgaaagaacaatcgaggaccatttagccgtccaggccgtcattcgcagctaccaagcccgcggccatctagtcgccaaactagaccctttggaaatcatgttcaatgataaaaccacgaccacggtgtcgcaaaccgggtcaccaccggaggaaatcctccgaacattccgcctggaaaacctggacaaagtctacaaactgccgtcgagcacgtacatcggcgccgagggcgaaaagaaactccctctccgtgagattttgcaccggctggagttggcttactgccgccacatcggggtggagtacatgtacatcgatgatttggaacagagggattttatccggcgccggatggaagccccaggtgtgcttaaccagagcacggtccagaaaaaactcaccttgactaggcttattagaacggtcgagtttgagaatttcttggccaagaaatgggcctccgagaagcggttcgggatcgaaggctgcgacatgttcattcctggacttgaacaaatcatcgacaagtcgacggaacacggcgtcgagcattttttcctcgggttgagtcacaggggccgtttgaacaccctggctaatattcttcggaagccgctctaccagattttcaaccaatttgtgccgctggagcccgcggatttggggtccggcgacgtgaagtaccaccacgggagtcacacccagcgcaccaaccagctcacccagaagcactacaaagtcacgctgctggcgaacccatcgcacttggagagcgtcaactcggtggtgcttgggcgcacccgcgccgagcagttctacaaaggcgacgatgagggcaagaagagtttggcgattttgatccacggagacgccgctttttctggccaaggggtcaactacgagagctacggtctgtcctacttgccccactacaccacacacggggctatctgtttcattataaacaaccaggtggggttcaccaccgatcctcggttttcccggtcgtcgcgctactgctccgacttgggcaaagtcgtgaacgcgcccattttccacgtgaacgccgacgaccccgagagcgttatccacgtgtgcaacatcgcggcggagtggagggccaagttccacaaagacatcatcatcgacttggtcgggtaccgccgccacggccacaacgaagccgacgagcccatgttcacccagcccctgatgtacaccaagatcaagagcatggcctccatcggggacaagtactccagcgagttgctgaaggagaaagtggtgacgaaggacgagatcaagcacgtgaaggacgattacaacaaactgtgcgaagacgagtacgtgaaggcgtccaaacaaacacaaatcttcatcagagattggttggactcgccttggtcgggcttcttcgaggggaaagacccgctcaaggtgacccccaccggggtgccggaagccaccctcgcgcacatcggggccaaagtctcctcgccgccgcccccaaacctcgacttcgtgctccacaagggcataactcgcattctgaaccaacgcgaagcgatggtcaagaaccggcaaatcgactgggctttgggggaggcgatggccatcgggtccctcgtcaaggagggcgtccacgtgcgcctctccggcgaggacgtcgagcgcgggacgttctcgcaccgccaccacgtctaccaccaccagaccgtggacaaaatgacctaccagcccctcggtgacgtcttcgacgcccaagcgccctacgtggtgtgcaacagctcgctgtccgagtacggcgtcctgggcttcgaggtgggctatgccctggccaaccccaactccctgatcctgtgggaagcccagttcggagatttctacaacacggcgcagtgcataatggaccagtttctgtgctgtggccaggccaagtggatgcggcagatcggcctcgttgtgctcctgccgcatgggttcgacggcatgggcccggagcactccagcggccggcctgagcgcttcctgcagaactgtgacgacgaccccgacgtggtcccgcccccaggacccgactttgctattaaacaactccacgattgcaactggatcgtggccaattgttccacacccgccaacctcttccacatctggcggcgccaagtcgctctaccattccgcaaacccttgatcctgttcagtcccaaaaacctgctaaggcaccccgagtgcaaaagctccttcgacgaaatgctcgaagggacggaattcaaacgagttatccccgacagtgggccagcgagtcaggacccgcaaaacgtcaagaaactcatcctttgcaccgggaaggtgtattacgatattatggacgctttcaaaaagaaaaaagtcgggaaggagatcgccgttacgagagtcgagcaattgtcgccgtttccgtacgatttgcttaaaaccgaattcgagaagtatccaaacgcgaaaatttgctgggctcaagaagagcacaagaacggggggccgtatttgtacgttttggcgcggttgaacacacttttgaataggtcacgcgaaattcattatattgggagggcggtgtccgcagccccggccacgggaaccaaagcagtgcatctaaaggaagtcgaaatgttggcgaacgaatttgtggcgctttag

SEQ ID NO: 6160 - protein, 990 aa, Tribolium castaneum
MSSLKLLSFLKLAPQCLRHYSETSFLTGTSSQYIEDMYNAWLKDPSSVHVSWDSFFRNTSQGLPQPYHAPPNLAPSKGALVSQIAAVATPPQTAPLDERTIEDHLAVQAVIRSYQARGHLVAKLDPLEIMFNDKTTTTVSQTGSPPEEILRTFRLENLDKVYKLPSSTYIGAEGEKKLPLREILHRLELAYCRHIGVEYMYIDDLEQRDFIRRRMEAPGVLNQSTVQKKLTLTRLIRTVEFENFLAKKWASEKRFGIEGCDMFIPGLEQIIDKSTEHGVEHFFLGLSHRGRLNTLANILRKPLYQIFNQFVPLEPADLGSGDVKYHHGSHTQRTNQLTQKHYKVTLLANPSHLESVNSVVLGRTRAEQFYKGDDEGKKSLAILIHGDAAFSGQGVNYESYGLSYLPHYTTHGAICFIINNQVGFTTDPRFSRSSRYCSDLGKVVNAPIFHVNADDPESVIHVCNIAAEWRAKFHKDIIIDLVGYRRHGHNEADEPMFTQPLMYTKIKSMASIGDKYSSELLKEKVVTKDEIKHVKDDYNKLCEDEYVKASKQTQIFIRDWLDSPWSGFFEGKDPLKVTPTGVPEATLAHIGAKVSSPPPPNLDFVLHKGITRILNQREAMVKNRQIDWALGEAMAIGSLVKEGVHVRLSGEDVERGTFSHRHHVYHHQTVDKMTYQPLGDVFDAQAPYVVCNSSLSEYGVLGFEVGYALANPNSLILWEAQFGDFYNTAQCIMDQFLCCGQAKWMRQIGLVVLLPHGFDGMGPEHSSGRPERFLQNCDDDPDVVPPPGPDFAIKQLHDCNWIVANCSTPANLFHIWRRQVALPFRKPLILFSPKNLLRHPECKSSFDEMLEGTEFKRVIPDSGPASQDPQNVKKLILCTGKVYYDIMDAFKKKKVGKEIAVTRVEQLSPFPYDLLKTEFEKYPNAKICWAQEEHKNGGPYLYVLARLNTLLNRSREIHYIGRAVSAAPATGTKAVHLKEVEMLANEFVAL

SEQ ID NO: 6161 - DNA, 2841 bp, Acinetobacter sp. ADP1
  CDS (1)..(2841): transl_table=11
atgcaagatgttgctgacgctttgcgtcttgacactgaactttccgctgatagcgcagcgtatattgaagagctttacgagcaatacctgacctccccaacctctgtgacagaggactggcgccaatatttcgataaattccctaaaggtgatcaaccgcacagcagtgtgcgtgagcagttcttattacttgggcgtaattcgaatcgtgttcaggcagtagtacagagttcagtaagcagcgatcatgagcgtcgccagattggtgtcttacaacttatcgcagcataccgtaaccgtggtcatcaaaaagcaaaattagatccgttaggtttggcaaagcgtgaagacgttccagatctagatttatctgcacacggtttaaccaaatctgatcttgatactgtatttaataccagtaatcttgctattggtaaagctgaagccactttaggcgaaatggttgaaaccatggagtctatttactgtggttctattggtgcagaatatatgcacattgtagataccaaagaaaaacgttggattcaacagcgcttagagggtgctcgcggtcagttcaattttaccaatgaccagaaaaaagcattgttagagcgtcttaccgctgctgaaggtctagaaaaattcttaggtaataaatatgtcggcgccaagcgttttggtgttgaaggtggtgagtcattcattccaatgatgaatgaaatcatccagcgtgctggttcggttggctgtaaagaagttgtgattgggatgccacaccgtggtcgtctaaatctacttgtaaacatcatgggtaaaaaccctgctgatctttttggtgagttcgaaggtaaatcaattcacaaaaaaggttcgggtgatgtgaaatatcaccaaggtttctcgtcaaacgtaatgacacctggtggcgaagtccatttggctttggcatttaacccatcgcatttggaaattgttggacctgtagttgaaggttcggtacgcgcacgtcaggttcgtcgtaaagacattggtggtgatgacgtactacctgtgatcgtacatggtgatgctgcatttgcaggccaaggtgttaatcaagaaaccttccaaatgtcacaaacccgcggttacaccgttggtggtacagtgcatatcgtgattaataaccaagtcggctttacgacttctgatccacgtgatgcgcgttctacagaatactgtactgatgtggcgaaaatggtgcagtctccaattttccatgtcaatggggatgaccctgaagcggttgcatttattgcacaactggcacatgatttccgtcatacattccgtaaagatgttgtcattgacttgttctgttaccgtcgtcgtggtcataatgaagcagatgaaccatctgcgactcagccattgatgtatcaggtgatcaataaaaagccaacaacgcgtacattgtatgcagatcagttggttcagcaaaaagtacttgatcgtgctgaagcagacaagttaatcgaagattatcgttcagatcttgaagcaggtaaccatgttgctaatgcactggtacttgaaccaaacaccaagatgtttgtggattggaaaccttatttaggtcacgattatacagatgtatgggacaccacgattgatatcaatcgcttgaaagaacttggcgaaggtatgcgcaaattgccagaaggctttgtcatgcaacgtcaagtttctaaagtcattgatgatcgtctgaaaatgcagactggtgaaatgccactgaactggggtgctgctgagacgctggcctacgcgacacttattgatgaaggttatttggttcgtattacgggtgaagatgtaggtcgtggtacgttctcacatcgtcatgccaagttacacaatcaagtagatggttcgacctatattccactgtgtcatgtgaaggaaaaccagccacgttttgctttatatgattcattattatcggaagaagcggtacttgcatttgaatatggttatgcaaccacgattccaaatagcttaattatttgggaagcgcagtttggtgactttgctaactgtgcgcaagttgtgattgaccaatttattgcgtctggtgaaaccaagtgggagcgtgtatgtggtttgaccatgttgttaccacatggctttgaaggtcaaggccctgagcattcatctgctcgtcttgaacgtttcttacagctatgtgcagaagacaatatgcaggtcattacgccaacgacacctgcacaaattttccatgcattgcgtcgtcaggcagttcgtccaattcgtaaaccaatgattgtgatgtcgcctaagtcgttactacgtcataagcttgcgacttcgacactggaagagctagcaacaggcacattccagactgtaatcgatgaagtcgatcaaatcactaaatcagatgttacacgtctcgtgttgtgtggcggtaaagtttattacgatctcattgaaaagcgtcgtgagcttgagctgaacaacattgcagtagtacgtatcgaacagttgtatccgtatccagaacaacgtcttgccgaagttctagctgcttatccaaacgttaaagatgtggtttggtgtcaagaagagccgaagaaccaaggcgcatggttgtttatcgcaccacgtttgtacgatgacatcttgaagtctggaaaacaaatccgtatcagctacgcaggccgtgaagcatcggctgcaccagcgtgtggctcaccatatttgcatgcaaaacaacaagctcagctcattcatgatgcattagcaatcgaagctgaacaatcaggagagacaaaataa

SEQ ID NO: 6162 - protein, 946 aa, Acinetobacter sp. ADP1
MQDVADALRLDTELSADSAAYIEELYEQYLTSPTSVTEDWRQYFDKFPKGDQPHSSVREQFLLLGRNSNRVQAVVQSSVSSDHERRQIGVLQLIAAYRNRGHQKAKLDPLGLAKREDVPDLDLSAHGLTKSDLDTVFNTSNLAIGKAEATLGEMVETMESIYCGSIGAEYMHIVDTKEKRWIQQRLEGARGQFNFTNDQKKALLERLTAAEGLEKFLGNKYVGAKRFGVEGGESFIPMMNEIIQRAGSVGCKEVVIGMPHRGRLNLLVNIMGKNPADLFGEFEGKSIHKKGSGDVKYHQGFSSNVMTPGGEVHLALAFNPSHLEIVGPVVEGSVRARQVRRKDIGGDDVLPVIVHGDAAFAGQGVNQETFQMSQTRGYTVGGTVHIVINNQVGFTTSDPRDARSTEYCTDVAKMVQSPIFHVNGDDPEAVAFIAQLAHDFRHTFRKDVVIDLFCYRRRGHNEADEPSATQPLMYQVINKKPTTRTLYADQLVQQKVLDRAEADKLIEDYRSDLEAGNHVANALVLEPNTKMFVDWKPYLGHDYTDVWDTTIDINRLKELGEGMRKLPEGFVMQRQVSKVIDDRLKMQTGEMPLNWGAAETLAYATLIDEGYLVRITGEDVGRGTFSHRHAKLHNQVDGSTYIPLCHVKENQPRFALYDSLLSEEAVLAFEYGYATTIPNSLIIWEAQFGDFANCAQVVIDQFIASGETKWERVCGLTMLLPHGFEGQGPEHSSARLERFLQLCAEDNMQVITPTTPAQIFHALRRQAVRPIRKPMIVMSPKSLLRHKLATSTLEELATGTFQTVIDEVDQITKSDVTRLVLCGGKVYYDLIEKRRELELNNIAVVRIEQLYPYPEQRLAEVLAAYPNVKDVVWCQEEPKNQGAWLFIAPRLYDDILKSGKQIRISYAGREASAAPACGSPYLHAKQQAQLIHDALAIEAEQSGETK

SEQ ID NO: 6163 - DNA, 2808 bp, Erwinia carotovora subsp. atroseptica SCRI1043
  CDS (1)..(2808): transl_table=11
atgcagaacggcgcgatgaaggcctggctggattcctcctatttggcgggtgcgaatcagtcctacatagagcaactctatgaagattttttaaccgatcctgactcgatcgaacatagctggcgctcgatcttccagcaattgcctacgagcggggtcaaaccggatcaactccattccaaaacgcgcgactatttccgccgtctggcgaaagactcttcgcgctttacctcatcagtcaccgatcccgatattgatgtcaagcaggtcaaggtattgcagctgatcaatgcgttccgcttccgtgggcatcagcaggccaatctggacccgattttcctgcgtcctcaggagcctgttgcagaactggatctggattatcataacctgactcaggatgacctacaggaatccttcaatgtggggtcttttgccatcggcaaagacaccatgaagctggaagatctgtatgacgcgctgaaacgcacctactgcggttctatcggtgctgaatatatgcatatgaccagcacggaagagaaacgttggatccagcaacgtattgaatcagtaaccggtcaaccgtcgtttacggtagaagagaagcgccgtttcctgaaagagctaaccgcagccgaagggcttgagcggtatctgggtgccaagtatccaggcgctaagcgtttctcgctggaaggcgctgacgcactggttcctatgctgaaagaattgattcgccatgcgggtgcaaacgatactcgcgaagtcgtattggggatggcgcaccgtggtcgcctcaacgtgctaatcaacgtattgggcaaaaaatctcaggatctgtttgacgagttcgccggtaagcataaagaacacttgggtaccggtgacgtgaaatatcaccaaggcttctcttctgaatttgatactgctggcggtctggtgcatttggcgttggcgttcaacccctcgcatctggagatcgtcagcccagtagtgacgggatcggtacgtgcgcgtctcgatcgcctgaatagccaaagtggcccgcgtgttttacctatcaccattcacggcgacgcggcaattagcggccagggcgtggtgcaggaactgttgaatatgtcgacggtgcgtggctacgaagtcggtggcacgctgcgtattgtgatcaacaaccgtatcggcttcaccacctccaacccgctggatattcgctcaacagaatactgtacggatgtgggtaaaatggtgcaggcacctattttccacgttaacgcagacgatccggaagcggtggcgtttgttacacgtttggcgctggatttccgcaacgccttcaaacgcgatgtgttcatcgatctgatttgttaccgccgtcacggccataacgaagccgacgagccaagtgcaacgcagccaatgatgtatcagaagatcaaaaagcatccgacaccacgtaaggtgtatgccgatcgtctggaacaggaaaaaacgatcacacaggaagatgccaccgaaatggtcaatctgttccgtgacgcgttggatgccggtgagtgcgtagtcgatgaatggcgtgagatggatatgcagtcctttacctggacgccgtatctcaatcatgaatgggatgagccttatccgcacagtacggaaatgaaacgtttacaagagcttgcaaaacgtatcagcgaagtaccggaaggcattgagatccatcctcgtgttgccaaagtttattccgaccgtgccgaaatggccgctggcaataaaccgttcgactggggtggcgcggaaacgctggcctacgccacgttggttgatgaagggattccgattcgcctgtctggtgaggacagcggtcgcggtacgttcttccatcgccatgctgtcgtacataaccagaaaaatggttccagctacacgccgttgaaccatgtacataacgggcagggcgagttcaatgtttgggactccgtactatccgaagaagcgatcctcgcgtttgaatacggctatgcgaccgcagaaccgcgcacgctgactatctgggaagcgcagtttggtgactttgccaacggtgcgcaggtggtgatcgatcagttcatcagctccggtgagcagaagtggggccggatgtgtggtctggtcatgctgttgccacatggttatgaagggcagggcccagagcactcgtctgccagactggagcgttatctgcaactgtgcgctgagcaaaatatgcaggtctgtattccatcaacaccggcacaggtttatcacatgcttcgccgtcaggccctgcgtggtatgcgccgtccgctggtggtcatgtcgccgaaatccctgctgcgccatccgttggcgatctcttcactggacgaactggcgaatggttccttccaaccagcgattggtgaagtagaagaattagatccggcagccgtgaagcgtgtcgtgctttgttccggtaaggtctactatgatttgctggaacagcgccgcaagaacgagcaaaaagatgtcgctatcgtccgtatcgaacagctttatccgttcccgcatcaagctgttcaagcggcactggaacctttttcccaagttcatgatttcgtatggtgtcaggaagaaccgctgaatcagggagcctggtattgcagtcagcaccatctccgtgaagtgattccgtttggatcttctttacgttacgcaggacgcccggcgtctgcatcacccgccgttggctatatgtccgtacaccagaaacaacagaaagatctggtcgatgacgcgctgaacgttgattaa

SEQ ID NO: 6164 - protein, 935 aa, Erwinia carotovora subsp. atroseptica SCRI1043
MQNGAMKAWLDSSYLAGANQSYIEQLYEDFLTDPDSIEHSWRSIFQQLPTSGVKPDQLHSKTRDYFRRLAKDSSRFTSSVTDPDIDVKQVKVLQLINAFRFRGHQQANLDPIFLRPQEPVAELDLDYHNLTQDDLQESFNVGSFAIGKDTMKLEDLYDALKRTYCGSIGAEYMHMTSTEEKRWIQQRIESVTGQPSFTVEEKRRFLKELTAAEGLERYLGAKYPGAKRFSLEGADALVPMLKELIRHAGANDTREVVLGMAHRGRLNVLINVLGKKSQDLFDEFAGKHKEHLGTGDVKYHQGFSSEFDTAGGLVHLALAFNPSHLEIVSPVVTGSVRARLDRLNSQSGPRVLPITIHGDAAISGQGVVQELLNMSTVRGYEVGGTLRIVINNRIGFTTSNPLDIRSTEYCTDVGKMVQAPIFHVNADDPEAVAFVTRLALDFRNAFKRDVFIDLICYRRHGHNEADEPSATQPMMYQKIKKHPTPRKVYADRLEQEKTITQEDATEMVNLFRDALDAGECVVDEWREMDMQSFTWTPYLNHEWDEPYPHSTEMKRLQELAKRISEVPEGIEIHPRVAKVYSDRAEMAAGNKPFDWGGAETLAYATLVDEGIPIRLSGEDSGRGTFFHRHAVVHNQKNGSSYTPLNHVHNGQGEFNVWDSVLSEEAILAFEYGYATAEPRTLTIWEAQFGDFANGAQVVIDQFISSGEQKWGRMCGLVMLLPHGYEGQGPEHSSARLERYLQLCAEQNMQVCIPSTPAQVYHMLRRQALRGMRRPLVVMSPKSLLRHPLAISSLDELANGSFQPAIGEVEELDPAAVKRVVLCSGKVYYDLLEQRRKNEQKDVAIVRIEQLYPFPHQAVQAALEPFSQVHDFVWCQEEPLNQGAWYCSQHHLREVIPFGSSLRYAGRPASASPAVGYMSVHQKQQKDLVDDALNVD

SEQ ID NO: 6165 - DNA, 2832 bp, Pseudomonas syringae pv. syringae B728a
  CDS (1)..(2832): transl_table=11
atgcaagaaagcgtgatgcagcgcatgtggaacagtgcccacctatccggtggtaacgctgcctatgtggaagagctctatgagctttacctgcacgaccctaacgctgtgccagaagaatggcgcacctactttcagaagttgccagctgatggcagctctgccactgatgtatcgcactcgaccattcgcgatcatttcgtgttgctggccaaaaaccagcgccgcgctcaaccggtatccgccggcagtgtgagcagcgaacacgagaagaagcaggttgaagtgctgcgactgatccaggcatatcggatgcgtggccaccaggctgcccaactcgatccgctgggcctgtggcagcgccctgcgcctgcggatctgtcgatcaatcattacggcttgaccaatgccgatcttgatacgaccttccgtgccggcgacctgttcatcggcaaagaggaagcgagcctacgcgaaattcatgaagcgttgcagcagacatattgtcgcaccattggctccgagttcactcacatcgtggattccgagcagcgcaactggttcatgcagcgtctcgagagtgttcgtggccgtccggtgttctcggctgacattcagagccacctgctcgagcgtgttaccgcagccgaaggcctcgaaaaatacctgggcaccaaatacccgggcaccaagcgtttcggtctggaaggcggcgaaagcctgattccgatgctcgacgagctgattcagcgttccgggtcctatggcaccaaggaagtcgtgatcggcatggcccaccgtggccgcctcaacgtactggtgaacaccttcggcaagaatcctcgcgacctgttcgacgagttcgaaggcaagaagaaagtggagctgggttccggtgacgtcaaataccaccagggcttctcttccaacgtcatgaccgcaggcggtgaggttcacctcgccatggccttcaacccgtctcacctggagatcgtgtctccggtggtcgaagggtcggtgcgtgcacgtcaggatcgtcgcaacgatccgaacggtgacaaggttctgccgatttccctccacggcgacgcggcctttgccggccagggcgtggtcatggaaaccttccagatgtcgcagactcgcggcttcaagacgggcggcacgatccacatcgtcatcaacaaccaggtgggcttcaccatcagcaacccgctggactcgcgttccaccgagtacgccaccgacgttgccaagatgatccaggcgccgatcctccacgtgaatggggatgatccggaagccgtgatgttcgtgacccagctggccatcgattaccgcatgcagttcaagcgcgacatcgtgatcgatctggtctgctaccgtcgccgtggtcacaacgaagctgacgagccgagcggtacccagcctctgatgtaccagcagatcaccaagcagcgcaccacgcgcgagttgtatgccgagcatctgatcaagaccggcgttcttgacgatgcccgcgttcaggccaaggtcgacgactaccgcagcgcgctggacaacggtctgcacgtggtgaaaagcctggtcaaggagccgaacaaggaattgttcgtcgactggcgtccatacctgggccatgcctggactgcgcgtcacgacacccgcttcgatctcaagaccctgcaggaactgtccgccaagctcatggagctgccggaaggcttcgtcgtgcagcgtcaggttcagaagatctatgaagaccgccagaagatgcaggccggtggcttgccgatcaactggggctacgccgaaaccatggcgtacgccacactggccttcgaaggtcatccgatccgcatgacggggcaggacatcggtcgcggtacgttctcgcaccgtcacgccgtgctgcacaaccagaaagacgccgggacctatatcccgctgcagaatctgtactccggtcagccacgtttcgacctgtacgactcgttcctttcggaagaggccgtactggcattcgaatacggttattcgaccacccagcctgatgcactggttatctgggaagcccagttcggcgacttcgccaacggtgcccaggtggttgtcgaccagttcatcaccagcggcgagcacaagtggggccgtctgtgcggtctgaccatgctgttgcctcatggctatgaagggcaggggccagagcactcgtcggcccgtctcgagcgttacctgcaattgtgcgccgagcacaacattcaggtgtgcgtaccgacgactccggcgcagatctatcacttgttgcgtcgtcaggtcatccgtccgctgcgcaagccgctgatcgtgctgacaccgaagtcgctgctgcgtcacaagctggctgtttcgaccctggaagatctggccgaaggctcgttccagaccgtcattccggaaatcgataccctcgatccggccaaggtcacgcgtctggtgctgtgcagcggcaaggtttactacgacctgctggaaaaacgccgtgccgaagggcgtgaagacatcgccatcgttcgcctcgagcagctgtatccgttccctgaagatgatttgatggaaaccatcgcgccttacaccaacctgcagcatgtggtctggtgtcaggaagaaccgatgaaccagggtgcctggtacagcagtcaacaccacctgcgtcgcagcatgggcaaccacaaacgtgaactcgttctcgagtacgccggtcgtgatgcttctgccgctccggcgtgtggttacgcttcgatgcacgccgagcagcaggaaaaactgctgcaagatgccttcactgtttaa

SEQ ID NO: 6166 - protein, 943 aa, Pseudomonas syringae pv. syringae B728a
MQESVMQRMWNSAHLSGGNAAYVEELYELYLHDPNAVPEEWRTYFQKLPADGSSATDVSHSTIRDHFVLLAKNQRRAQPVSAGSVSSEHEKKQVEVLRLIQAYRMRGHQAAQLDPLGLWQRPAPADLSINHYGLTNADLDTTFRAGDLFIGKEEASLREIHEALQQTYCRTIGSEFTHIVDSEQRNWFMQRLESVRGRPVFSADIQSHLLERVTAAEGLEKYLGTKYPGTKRFGLEGGESLIPMLDELIQRSGSYGTKEVVIGMAHRGRLNVLVNTFGKNPRDLFDEFEGKKKVELGSGDVKYHQGFSSNVMTAGGEVHLAMAFNPSHLEIVSPVVEGSVRARQDRRNDPNGDKVLPISLHGDAAFAGQGVVMETFQMSQTRGFKTGGTIHIVINNQVGFTISNPLDSRSTEYATDVAKMIQAPILHVNGDDPEAVMFVTQLAIDYRMQFKRDIVIDLVCYRRRGHNEADEPSGTQPLMYQQITKQRTTRELYAEHLIKTGVLDDARVQAKVDDYRSALDNGLHVVKSLVKEPNKELFVDWRPYLGHAWTARHDTRFDLKTLQELSAKLMELPEGFVVQRQVQKIYEDRQKMQAGGLPINWGYAETMAYATLAFEGHPIRMTGQDIGRGTFSHRHAVLHNQKDAGTYIPLQNLYSGQPRFDLYDSFLSEEAVLAFEYGYSTTQPDALVIWEAQFGDFANGAQVVVDQFITSGEHKWGRLCGLTMLLPHGYEGQGPEHSSARLERYLQLCAEHNIQVCVPTTPAQIYHLLRRQVIRPLRKPLIVLTPKSLLRHKLAVSTLEDLAEGSFQTVIPEIDTLDPAKVTRLVLCSGKVYYDLLEKRRAEGREDIAIVRLEQLYPFPEDDLMETIAPYTNLQHVVWCQEEPMNQGAWYSSQHHLRRSMGNHKRELVLEYAGRDASAAPACGYASMHAEQQEKLLQDAFTV

SEQ ID NO: 6167 - DNA, 2832 bp, Pseudomonas fluorescens Pf-5
  CDS (1)..(2832): transl_table=11
atgcaagaaagcgtgatgcagcgcatgtggaacagcgcctacctatccggtagtaacgctgcctatgtggaagagctctacgagctctacctgcacgaccctaacgctgtgccagaagagtggcgcacttactttcagaagttgcctaccgacggcagcactgccatcgatgtttcgcactcgacaatccgcgatcatttcgtcttgctggcaaagaaccagcgccgcgcccaaccggtatccgccggtagcgtgagcagtgagcacgagaagaagcaagttgaagtgctgcgattgatccaggcctatcggatgcgtggccaccaggcagcccagctggacccgctggggctgtggcagcgtcctgcacctgcagacctgtcgatcaatcattacggcttgaccaatgccgatcttgatacgaccttccgtgccggcgacctgttcatcggcaaagaggaagcgagcctacgcgaaattcacgaagcgttgcagcagacatattgccgcaccattggcgctgaattcacgcacatcaccgattccgagcagcgtcagtggttccagcagcgtctggaaagcgtacgcggccgtccgacctattccgccgacatcaagagccacctgctcgagcgcgtcactgcggctgaaggcctggaaaaatacctgggtaccaaatacccgggcaccaagcgtttcggtctggaaggcggcgagagcctgattccgatgctcgacgagctgatccagcgttccggttcctacggcaccaaggaagtggttatcggcatggcccaccgtggccgtctgaacgtgctggtcaacaccttcggcaagaacccgcgcgagctgttcgacgagttcgaaggcaagaagaaggtcgagctgggttccggtgacgttaaataccaccagggcttctcgtccaacgtcatgaccaccggtggcgaagttcacctggcgatggcgttcaacccgtcccacctggaaatcgtttctccagtggtcgaaggttcggtgcgcgctcgtcaggaccgtcgcaacgaccagactggcgacaaggttctgccgatctcgatccacggtgacgcggcgttcgccggccagggcgtggtgatggaaaccttccagatgtcccagacccgcggtttccgtaccggcggcactgtgcacatcgtgatcaacaaccaggtcggtttcaccatcagcaacccgctggactcgcgctccaccgagtacgccaccgacgttgcgaagatgatccaggcaccgatcctccatgtgaatggtgatgatccggaagccgtgttgttcgtgacccagctggccatcgactaccgcatgcagtacaagcgcgacgtggtgatcgacctggtctgctaccgtcgtcgcggccacaacgaggccgacgagccaagcggcacccagccactgatgtatcagcagatcgccaagcagcgcaccacccgtgaactgtatgccgatcgcctgacccagggcggtgtgctcgacgcagagcgtgttcaggcgaaagtcgacgaatatcgcaatgcgctggacaacggtctgcacgtggtcaagagcctggtcaaggagccgaacaaagagctgttcgtggactggcgtccgtacctgggccatacctggaccgcgcgtcacgacaccaccttcgacctcaagactcttcaggaactgtccgccaagctgctggagctgccggaaggcttcgtggttcagcgtcaggtcgcgaagatctacgaagaccgtcagaagatgcaagccggcggcctgccgatcaactggggttacgctgaaaccatggcgtacgcgaccctggcgttcgaaggtcacccgattcgcatgaccggccaggacatcggccgcggcaccttctcgcaccgccatgcggtgttgcacaaccagaaggacgccggcacctacatcccgttgcagcacctgtacgaaggccagccacgtttcgacctgtacgattcgttcctgtccgaagaagccgtactggcgttcgaatacggctactccaccaccacgcctaacgcgctggtgatctgggaagcccagttcggcgacttcgccaacggtgcacaagtagtgatcgaccagttcatcaccagcggcgagcacaagtggggccgtctctgcggtctgaccatgctgctgccacacggttatgaaggtcagggtcccgagcactcctcggctcgtctggagcgttacctgcagctgtgcgccgagcacaacatccaggtatgcgtaccgaccacgccggctcagatctaccacttgctgcgtcgccaggtgattcgtccgctgcgcaagccgctggtcgtgctgacaccgaaatccctgctgcgtcataaactggccatctcgaccctggaagatctggcggaaggttcgttccagaccgttatcccggaaatcgatgcccaggatccaaaagacgtgggtcgcatcattctgtgtagcggcaaggtctactacgacctgttggaaaaacgccgtgccgaaggtcgtgacgacatcgccatcgtgcgtatcgagcagctgtacccattccctgaggacgacctgatcgaagtcctggctccgtacaaaaacgtcaaacacatcgtttggtgtcaggaagagccgatgaaccagggtgcctggtactgcagccagcatcacatgcgtcgcatcatcagcggtcacaacaagtcgctcgtactcgagtacgcgggccgtgacgcttctgctgctccagcttgtggttatgcatcgatgcacgctgagcagcaggaaaaactgctgcaagatgcctttactgtttaa

SEQ ID NO: 6168 - protein, 943 aa, Pseudomonas fluorescens Pf-5
MQESVMQRMWNSAYLSGSNAAYVEELYELYLHDPNAVPEEWRTYFQKLPTDGSTAIDVSHSTIRDHFVLLAKNQRRAQPVSAGSVSSEHEKKQVEVLRLIQAYRMRGHQAAQLDPLGLWQRPAPADLSINHYGLTNADLDTTFRAGDLFIGKEEASLREIHEALQQTYCRTIGAEFTHITDSEQRQWFQQRLESVRGRPTYSADIKSHLLERVTAAEGLEKYLGTKYPGTKRFGLEGGESLIPMLDELIQRSGSYGTKEVVIGMAHRGRLNVLVNTFGKNPRELFDEFEGKKKVELGSGDVKYHQGFSSNVMTTGGEVHLAMAFNPSHLEIVSPVVEGSVRARQDRRNDQTGDKVLPISIHGDAAFAGQGVVMETFQMSQTRGFRTGGTVHIVINNQVGFTISNPLDSRSTEYATDVAKMIQAPILHVNGDDPEAVLFVTQLAIDYRMQYKRDVVIDLVCYRRRGHNEADEPSGTQPLMYQQIAKQRTTRELYADRLTQGGVLDAERVQAKVDEYRNALDNGLHVVKSLVKEPNKELFVDWRPYLGHTWTARHDTTFDLKTLQELSAKLLELPEGFVVQRQVAKIYEDRQKMQAGGLPINWGYAETMAYATLAFEGHPIRMTGQDIGRGTFSHRHAVLHNQKDAGTYIPLQHLYEGQPRFDLYDSFLSEEAVLAFEYGYSTTTPNALVIWEAQFGDFANGAQVVIDQFITSGEHKWGRLCGLTMLLPHGYEGQGPEHSSARLERYLQLCAEHNIQVCVPTTPAQIYHLLRRQVIRPLRKPLVVLTPKSLLRHKLAISTLEDLAEGSFQTVIPEIDAQDPKDVGRIILCSGKVYYDLLEKRRAEGRDDIAIVRIEQLYPFPEDDLIEVLAPYKNVKHIVWCQEEPMNQGAWYCSQHHMRRIISGHNKSLVLEYAGRDASAAPACGYASMHAEQQEKLLQDAFTV

SEQ ID NO: 6169 - DNA, 2886 bp, Psychrobacter arcticus 273-4
  CDS (1)..(2886): transl_table=11
atgaatagtataactaaagaagcagcgagcgtagataacacagaattggccgctgataacgccaattatattgatatcctctacgagcagtatttagaagatcctaatagtgttggcactgattggcaaacgtattttgaacaatacaaatcgccaaatgatgagccacacaatgccattaaagaccagtttttgttattagcccgtaatcagacggctaataaggtcagtactgacaccaatagctcagctagaggtcatcgcaacaatgttggtgataataagcaaatgggcgtacagcagctcatctcagcttaccgtcgtcgcggtcatcgccgtgcacagttagatccattaagtttatacccacgtgcggaagtagaggatttaacccttgcctatcacaatctttctgaagcggatcttgatacggtattccctactaatgatctaaatattggtaaaaatgaagcatcgttacgtgaaatcattgagatcatggagcgcgtctattgccgttatatcggcgtagagtatatgcacgtgaccactagcacagaaaagcgctggatggaaaaatacttagaaaccaatctaggtcacatctcttttgatacagaaaaacgcttgtctattcttgagcgtttgaccgcagcggaaggtttagagaagtaccttgcgcgtaaatataccggcgttaagcgttttggtttggaaggtggcgagagctttattccagctatcaatgaaatcatccaacgtgctggcggttatggcaccaaagagatggttattggtatggcgcaccgtgggcgtctaaacttattggttaatatcttgggtaaaaaccctgccgatttgtttgatgagtttgatggcaaagtacagccagaaaaaggctcaggcgacgttaaatatcacaatggtttttcatcgaacgtgatgacgccaggtggcgaggcgcatttagcgttagcgtttaacccatcacatcttgaaatcgttgctcctgtattgcaaggctcagtacgtgcgcgtcaagtacgtcgcaatgatcagtcacttcatgaaaacaaggcgggcaattcagtattgccaatcgttgttcatggtgatgccgcattcgcaggtcagggcgtagtgcaagagactttccagatgtcacaaacccgtgcttataccacgggtggcacactacatattgttatcaataaccaagttggttttaccaccagtcgccaagaagacttgcgctcgacagaatactgtactgatgtggcaaaaatggttcatgcgccaattttacacgtcaacggtgacgatcctgagtctgtggtatttgccgcgcaattggcattagattatcgttatgagtttgataaagacatcatcatagatctcttctgctatcgccgtaacggtcacaatgaggccgatgaaccttcagctacccagccattaatgtatgcagtgatcaaaaaactaccaacgactcgtactatttacgcgcaaaatctgatcgcagaaggtttgctgagtaaagaagatgaaacgcgtttagaagatgaataccgtgaatcgttagaccgcggtgaatacgttgccaactcactggtaaacgagcctaatgagcagctatttgtcgattggaaaccttatttgggtcatgatttggtcgatgattgggataccagtgtcgatatcgaagtattaaaaggttatggtcgtcgcatggcgcaaatgcctgaaggctataagctacagcgtcaagtacaaaaagttgttgagcagcgcttggccatgcaaaccggtgaagagcctttgaactggggtgcggctgagacattggcatacgcgtcactggtcaataatgataaagtgctggtacgtattactggcgaagatgtaggccgtggtacgttctcacatcgtcatagcgagctatacaatattgaagatggcagcatgtatgtgccacttgctcacatgagtgaagaccaagcacgcttttcgacttataactctttattatcagaagaagcggtactggcttttgaatacggttacgcgacgacagtaccaaatgcattggttgtttgggaagcgcagttcggtgattttgtcaacggcgcgcaagtggtgatcgaccaatttatcgctagtggcgagaccaaatggcagcgtgtttgtggtttgaccatgctattgcctcacggctttgaaggtcaaggtcctgagcattcatcagcccgtcttgaacgcttcttgcagttatgtgccgaagataatatgcaagtcatcacaccaacgactcctgcacagatttatcacgcgctacgtcgtcaggcggttcgcccaattcgtaaaccactaattgttatgtcgccaaagagtttgctacgtcataagcttgcgacttctcaattagaagaattggcaaatggtaagtttgaaaccgtgttgccagagatggatcagcaaaatccggacaatgtgactcgtatggtgctatgtggcggcaaggtttattatgaattactagaacagcgccgtgcgctaggtttagaccatgtggcaatcgttcgtatcgagcagctctatcctttaccagaaaaacgcttaattgctgaaatcgaaaaatacagcaacttaaaagaaatcgtttggacgcaagaagagccattgaatcaaggggcttggtattacttagcaccacatatgttccgcattgtcgtaccgcatccaaccagagcaaaagttatggagccggtggcacgtcctgccagtgcagcacctgcgacagggtcagcaaaattacacgttaagcaacaacaagatttaatcgctggtggtcttggtatcagtgtagatgagctgtctatttaa

SEQ ID NO: 6170 - protein, 961 aa, Psychrobacter arcticus 273-4
MNSITKEAASVDNTELAADNANYIDILYEQYLEDPNSVGTDWQTYFEQYKSPNDEPHNAIKDQFLLLARNQTANKVSTDTNSSARGHRNNVGDNKQMGVQQLISAYRRRGHRRAQLDPLSLYPRAEVEDLTLAYHNLSEADLDTVFPTNDLNIGKNEASLREIIEIMERVYCRYIGVEYMHVTTSTEKRWMEKYLETNLGHISFDTEKRLSILERLTAAEGLEKYLARKYTGVKRFGLEGGESFIPAINEIIQRAGGYGTKEMVIGMAHRGRLNLLVNILGKNPADLFDEFDGKVQPEKGSGDVKYHNGFSSNVMTPGGEAHLALAFNPSHLEIVAPVLQGSVRARQVRRNDQSLHENKAGNSVLPIVVHGDAAFAGQGVVQETFQMSQTRAYTTGGTLHIVINNQVGFTTSRQEDLRSTEYCTDVAKMVHAPILHVNGDDPESVVFAAQLALDYRYEFDKDIIIDLFCYRRNGHNEADEPSATQPLMYAVIKKLPTTRTIYAQNLIAEGLLSKEDETRLEDEYRESLDRGEYVANSLVNEPNEQLFVDWKPYLGHDLVDDWDTSVDIEVLKGYGRRMAQMPEGYKLQRQVQKVVEQRLAMQTGEEPLNWGAAETLAYASLVNNDKVLVRITGEDVGRGTFSHRHSELYNIEDGSMYVPLAHMSEDQARFSTYNSLLSEEAVLAFEYGYATTVPNALVVWEAQFGDFVNGAQVVIDQFIASGETKWQRVCGLTMLLPHGFEGQGPEHSSARLERFLQLCAEDNMQVITPTTPAQIYHALRRQAVRPIRKPLIVMSPKSLLRHKLATSQLEELANGKFETVLPEMDQQNPDNVTRMVLCGGKVYYELLEQRRALGLDHVAIVRIEQLYPLPEKRLIAEIEKYSNLKEIVWTQEEPLNQGAWYYLAPHMFRIVVPHPTRAKVMEPVARPASAAPATGSAKLHVKQQQDLIAGGLGISVDELSI

SEQ ID NO: 6171 - DNA, 2805 bp, Colwellia psychrerythraea 34H
  CDS (1)..(2805): transl_table=11
atgccagaaggtgtaatgaaggcttggctagagtcttcccacttaaacggtggcaacatcgtttatattgaagaattgtacgaatcatacttagataactccgcctctgtatctgcagaatggcaaggtatctttagtcaactcccgaaagtcgaaggtagtgaggttgaataccgccactctgccatccgtgacgaatttagagccctagcaaaacaagccaataaacaagtagttgtttctagtggcaatgatgctaaacaagtcaaagttttacagcttatcaacgcgtttcgattccgcggtcatcagaatgctaatttagatcctttgggtttatggcaacgtgacaaagtacgtgacttgcagctttcacatcacgatttatctgaaaacgacttcgataaagaatataacgttggctcttttgccatcggccaagacaccatgaagttaggtgacttatataaagcattaagaaacacttattgtggttctattggtgctgaatatatgcacatgacggctaccgacgaaaaacgttggttacaacaacgtcttgagtctgttcagtctaaagcggcactttctgttgatgaaaaaactaaacttcttcagggcttaatcgctgctgacggcttagagaaataccttggagctaagttcccaggtgcaaaacgtttctctctggaaggtggtgattcacttgtcccaatgcttaaagaattaatcactcgtgctggcgctgccggtactaaagaagtggttatgggcatggctcatcgtggacgtctaaacgtacttgttaatgtcatgggtaaaaacccgtcaaaattatttgatgagttcgccggtaagcatgatgaaatacttagctcaggtgatgttaaatatcatcaaggttattcttcagatttcgttaccccgggtggtaccgttcatttagcgctggcatttaacccatcacatctagaaatcgttaacccagttgttattggttcagttcgcgctcgtctagatagacgtgactgtgatcaaggtgatttagtactacctattaccattcatggtgattctgcgattgcaggtcaaggtgttgtacaagaaaccttcaatatgtcacaagcgcgcgcctttaaagtaggcggcacggtacgtattgtagtcaacaaccaagtaggttttaccacctcagttgctgaagatactcgctctggtgagtactgtactgaaattgctaaaatggttcaggcgccaattatccatgtaaatggtgatgatcctgaagcagttatcttagcaacgcaaattgcacttgattaccgtaatgaatttaaacgtgatgttgttatcgatttagtttgttaccgacgtcatggacataacgaagctgatgagccaagtgctacgcagccacttatgtacaaaattgttaaaaaacatcctacaccacgtcaattatacgcagataaattatcagcggaaggtagtttaactactgccaaaattgatgaattaacagcctactaccgtaagttacttgatgaaggtcaatgtacggttgatcaatggcgcccaatgactgagcattcagttgattggactccatacttaggccatgagtgggatgatgactacgacaaagaaatatcgcttgagaaattaaaagaactagcggttaaattgtcaagttacccagaaagtcatccagtgcattcgcgtgttaaaaagatttacgatgatcgcatgaaaatggcaacaggtgagaaattacttgattggggtatggctgaaaacttagcttatgcatccattgttgatcgtggtgatcgtgtacgtatcacaggtcaagattctggtcgtggtactttcttccatcgccatgctgtattgcataatcaagaagacggtagtacctatttaccactgcaaaatatcagagaaggccaaggcccatttgatgtacatgattcagtgttatctgaagtctcagtattagcctttgaatatggctataccactgctgagcctgcaggtttaaccatttgggaagcacaatttggtgatttcgctaactgtgcgcaagtggtatttgatcaattcattagttcaggtgagcaaaagtggggccgtttatgtggcttaactatgttgttaccacatggctatgaaggtcaagggcctgagcattcatcagctcgtttagagcgcttcttacaactttgtgctgatcacaatatgcaagtatgtgtgccatcaacacctgcgcaagtatttaatatgctgcgtcgtcaagtggttcgtcctatgcgtcgtcctcttgtggttatgtcacctaaatcattgttacgccatccattagcggtttcttcattagaagaaatgtcgacgggtgtattccacaatgttattggtgaaattgatgagcttgatgcaaaagcggttgagcgtgttgttttctgtagtggtaaggtttattacgaactacttgatcaacgtcgtaaaaatgagctaaataatattgctattgttcgtattgagcaactttatccgttccctgaacaagagctacaagctgtattgaaagaataccagcatgtgaagcaatttgtttggtgtcaggaagagccgcaaaaccaaggtgcttggtattgttcgcagcataactttagagcagctatccctgaaggtactacgttgacttatgctgggcgtaaggcttctgcagctccagctgtcggctatatgtcacttcatgttaaagaacagcaagcgcttgttactcaagcattaacaatagattaa

SEQ ID NO: 6172 - protein, 934 aa, Colwellia psychrerythraea 34H
MPEGVMKAWLESSHLNGGNIVYIEELYESYLDNSASVSAEWQGIFSQLPKVEGSEVEYRHSAIRDEFRALAKQANKQVVVSSGNDAKQVKVLQLINAFRFRGHQNANLDPLGLWQRDKVRDLQLSHHDLSENDFDKEYNVGSFAIGQDTMKLGDLYKALRNTYCGSIGAEYMHMTATDEKRWLQQRLESVQSKAALSVDEKTKLLQGLIAADGLEKYLGAKFPGAKRFSLEGGDSLVPMLKELITRAGAAGTKEVVMGMAHRGRLNVLVNVMGKNPSKLFDEFAGKHDEILSSGDVKYHQGYSSDFVTPGGTVHLALAFNPSHLEIVNPVVIGSVRARLDRRDCDQGDLVLPITIHGDSAIAGQGVVQETFNMSQARAFKVGGTVRIVVNNQVGFTTSVAEDTRSGEYCTEIAKMVQAPIIHVNGDDPEAVILATQIALDYRNEFKRDVVIDLVCYRRHGHNEADEPSATQPLMYKIVKKHPTPRQLYADKLSAEGSLTTAKIDELTAYYRKLLDEGQCTVDQWRPMTEHSVDWTPYLGHEWDDDYDKEISLEKLKELAVKLSSYPESHPVHSRVKKIYDDRMKMATGEKLLDWGMAENLAYASIVDRGDRVRITGQDSGRGTFFHRHAVLHNQEDGSTYLPLQNIREGQGPFDVHDSVLSEVSVLAFEYGYTTAEPAGLTIWEAQFGDFANCAQVVFDQFISSGEQKWGRLCGLTMLLPHGYEGQGPEHSSARLERFLQLCADHNMQVCVPSTPAQVFNMLRRQVVRPMRRPLVVMSPKSLLRHPLAVSSLEEMSTGVFHNVIGEIDELDAKAVERVVFCSGKVYYELLDQRRKNELNNIAIVRIEQLYPFPEQELQAVLKEYQHVKQFVWCQEEPQNQGAWYCSQHNFRAAIPEGTTLTYAGRKASAAPAVGYMSLHVKEQQALVTQALTID

SEQ ID NO: 6173 - DNA, 2832 bp, Pseudomonas fluorescens PfO-1
  CDS (1)..(2832): transl_table=11
atgcaagaaagcgtgatgcagcgcatgtggaacagcgcctacctttcaggtggaaacgctgcctatgtggaagagctctacgagctctacctgcacgaccctaacgctgtgccagaagagtggcgcacctactttcagaagctgcctgccgacggcagctctgccaccgatgtttcgcactccacaattcgcgatcatttcgtgctgctggcaaagaaccagcgccgcgcccaaccggtttccgccggcagcgtgagcagtgagcacgagaagaagcaagttgaagtgctgcgattgatccaggcctaccgtatgcgtggccaccaggcagcccagcttgacccgctggggctgtggcagcgtcctgcacctgcagacctgtcgatcaatcactacggcttgaccaatgccgatcttgatacgaccttccgtgccggcgacctgttcatcggcaaagaggaagcgagcctacgcgaaattcacgaagcgttgcagcagacatattgccgcaccatcggcgctgaatttacgcacatcaccgattccgagcagcgccagtggttccagcagcgtctggaaagcgtgcgtggccgtccggaatattccgcggacatcaagagccacctgctcgagcgcgtgacggccggtgaaggcctggaaaaatacctgggcaccaaatacccgggcaccaaacgtttcggtctggaaggcggcgaaagcctgattccgatgctcgacgaactgatccagcgttccggttcctacggcaccaaggaagtcgtcattggcatggcccaccgtggccgtctgaacgtactggtcaacaccttcggcaagaacccgcgcgagctgttcgacgagttcgaaggcaagaagaaggtcgagctgggttccggtgacgttaaataccaccagggcttctcgtccaacgtaatgaccaccggcggtgaagttcacctggccatggcgttcaacccgtcccacctggaaatcgtttccccggtggtcgagggttcggttcgcgcccgtcaggatcgtcgcaacgaccctaccggtgagaaggttctgccgatctccatccacggtgatgctgcattcgccggtcaaggcgtggtcatggaaaccttccagatgtcgcagacccgcggtttcaagaccggcggtaccgtgcacatcgtgatcaacaaccaggtcggtttcaccatcagcaacccgctggactcgcgctccaccgagtacgcgaccgacgttgcgaaaatgatccaggcgccgatcctccatgtgaatggtgatgatccggaagccgtgttgttcgtgacccagctggccatcgactaccgcatgcagttcaagcgtgacgtggtgatcgacctggtctgctaccgtcgtcgcggccacaacgaggccgacgagccaagcggcacccagcctctgatgtatcagcagatcaccaagcagcgcaccacccgtgagctgtacgctgatcgtctgacccaggccggtgtactggacgcagagcgtgttcaggcgaaagtcgacgaataccgcaacgcgctggacaacggtctgcacgtcgtgaaatcgctggtcaaagagccgaacaaagagctgttcgtggactggcgtccgtatctgggccacgcctggactgcgcgtcacgacactcgcttcgacctcaagaccctgcaggaactgtccgccaagctgctggaaattccggaaggcttcgtggttcagcgtcaggtcgcgaagatctacgaagaccgtcagaagatgcaagccggcggcctgccgatcaactggggttacgccgaaaccatggcgtacgcgaccctggcgttcgaaggtcacccgatccgcatgaccggtcaggacattggccgcggcacgttctcgcaccgtcacgctgtgctgcacaaccagaaagatgccggtacctacattccgctcaagcatctgtatgaaggtcagccacgcttcgacctgtacgactcgttcctgtcggaagaagccgtactggcgttcgaatacggctactcgaccaccacgccaaacgcgctggtgatctgggaagcccagttcggcgacttcgccaacggtgcacaggtcgttatcgaccagttcatcaccagcggcgagcacaagtggggccgtctctgcggtctgaccatgctgctgccacacggttacgaaggtcagggccctgagcacagctcggcacgtcttgagcgttacctgcagctgtgcgccgagcacaacattcaggtgtgcatgccgaccaccccggcccagatctaccacttgctgcgccgtcaggtgattcgcccgctgcgcaagccattggtcgttctgactccaaagtcgctgctgcgccacaagctggccatctcgactctggaagatctggccgaaggttcgttccagaccgttatcccggaaatcgatgcactggacccgaaaaaggtcgagcgcgttgttctgtgcagcggcaaggtctactacgacctgctggaaaaacgtcgtgccgaaggccgcgaagatatcgccatcgtgcgtatcgagcagctgtacccgttccctgaggacgacttgaaagaagtcctggctccttacaccaatgccaaagcggccgtgtggtgtcaggaagagccgatgaaccagggcgcctggtactgcagccagcaccacctgcgtcgcagcatcagcaacctcaacaaatctctcgtactcgagtacgcgggccgtgaggcttctgctgccccagcatgtggttacgcatcgatgcacgccgagcagcaggaacaactgctgcaagacgcgtttaccgtttaa

SEQ ID NO: 6174 - protein, 943 aa, Pseudomonas fluorescens PfO-1
MQESVMQRMWNSAYLSGGNAAYVEELYELYLHDPNAVPEEWRTYFQKLPADGSSATDVSHSTIRDHFVLLAKNQRRAQPVSAGSVSSEHEKKQVEVLRLIQAYRMRGHQAAQLDPLGLWQRPAPADLSINHYGLTNADLDTTFRAGDLFIGKEEASLREIHEALQQTYCRTIGAEFTHITDSEQRQWFQQRLESVRGRPEYSADIKSHLLERVTAGEGLEKYLGTKYPGTKRFGLEGGESLIPMLDELIQRSGSYGTKEVVIGMAHRGRLNVLVNTFGKNPRELFDEFEGKKKVELGSGDVKYHQGFSSNVMTTGGEVHLAMAFNPSHLEIVSPVVEGSVRARQDRRNDPTGEKVLPISIHGDAAFAGQGVVMETFQMSQTRGFKTGGTVHIVINNQVGFTISNPLDSRSTEYATDVAKMIQAPILHVNGDDPEAVLFVTQLAIDYRMQFKRDVVIDLVCYRRRGHNEADEPSGTQPLMYQQITKQRTTRELYADRLTQAGVLDAERVQAKVDEYRNALDNGLHVVKSLVKEPNKELFVDWRPYLGHAWTARHDTRFDLKTLQELSAKLLEIPEGFVVQRQVAKIYEDRQKMQAGGLPINWGYAETMAYATLAFEGHPIRMTGQDIGRGTFSHRHAVLHNQKDAGTYIPLKHLYEGQPRFDLYDSFLSEEAVLAFEYGYSTTTPNALVIWEAQFGDFANGAQVVIDQFITSGEHKWGRLCGLTMLLPHGYEGQGPEHSSARLERYLQLCAEHNIQVCMPTTPAQIYHLLRRQVIRPLRKPLVVLTPKSLLRHKLAISTLEDLAEGSFQTVIPEIDALDPKKVERVVLCSGKVYYDLLEKRRAEGREDIAIVRIEQLYPFPEDDLKEVLAPYTNAKAAVWCQEEPMNQGAWYCSQHHLRRSISNLNKSLVLEYAGREASAAPACGYASMHAEQQEQLLQDAFTV

SEQ ID NO: 6175 - DNA, 2862 bp, Saccharophagus degradans 2-40
  CDS (1)..(2862): transl_table=11
atgccctgtcatacggtgggcgaaatgcaagaaagtatcatggagttattgtggaaaacctcgcatctatctggaggtaacgccgcatatgtagaagatcagtacgaatcctatctgtcagaccctcattccgtttcggaagagtggcgcgactacttcgataagttaccccgtgttaacggcagcgctagcgaagatgtaaaccattccgaaatcattaagtatttcgagctgctcggtaaaaaccgcgcgcgtccaataattgtgcccggtgctggtagtggcgatattgcccacgagcgcaagcaggtagaagttgttcagttggtaaatgcctaccgcttaagcggtcatcaaaaagccaatatcgatccgctaaatctacgcgcagttaaaaaccctgttgatttagacttgggctttcaccgcttgaatacagccgatttagattctgtattccaaaccggtgacctcgcatttggctacaaagaagccaagctgaaagacatcattgcagacctagaaaaaacttactgcggcaacattggcgcagaagttatgcacattactaactacgaagagcgtcgctggttgttaaaccgcttagagcgttcgcgttctcagccagatttcggccctaaagctaagcgcaatatcttgcgtcgtttgactgcagccgaaggcttagagcgtcatttagatagcaaatacccaggtacaaagcgctttggtttggaagggggcgaaagcttcattccattgcttgatgcgttaattcgtcgtgttggcgaatacggtgccaaagaaatggtattgggtatggctcaccgtggccgcttaaatgcgctggtgaacattcttggtaaaaacccatctgatttgtttgatgagtttgaaggtaagaagctagtagatacctctggtgacgttaagtatcaccaaggtttctcgtcaaacgtaatgactcctggtggcgaaatgcaccttgcgttggcgtttaacccatctcacttggaaattgtatctccagtggttgaggggtctgtacgtgcacgtcaagatcgccgcggcgacaaagacggccacaccgtagtgcctgttgtagtacatggtgatgctgcgtttgctggtcagggcgttgtgatggaaacattccaaatgtcacaaacccgcgcatacaaaactggcggtactgtgcacttggtaattaacaaccaagtaggtttcactactagccgtgcagacgacgcacgctctacagcttactgtaccgacgtggcaaaaatgatcgaaacaccgatcttccacgttaacggtgacgacccagaagcggttgtttacgttactcaattggcagcagattaccgcaacgaatttaagaaagatgtggttattgatttggtttgttatcgccgtcgtggccacaacgaaaccgatgagccttcatctactcagccgttaatgtacaaggctattcgttcgcacaaaactactcgcactgtgtatgcagagcagcttgttaacgctggtgtggttactcaagacgaagcggaccagatgactaacgattatcgtgctgctttggatagaggcgagcacgtagcgcgtggtttggtaagcgagccggattcttcgctgtttgtaaactggtcgccttatattggtcacgactggaatacacctgcagatactacgtatccaatcaaagaattgcagtcgttggcagagcaaactagccatgtgccagatggtgttcaggtacagcgtcaggtagcgaaaatctacgacgaccgtcgcaaaatggcgggcggtgccttgccaattaactggggcatggccgaaactctggcttacgctaccttgttgaaagaaggccataaaattcgtttaacggggcaagatgttggtcgtggtactttctcgcatcgccatgctgttgtgcataaccaaaaaactggtgaagcttacattccgttagcgaatatttcagaagatcaagcgccgttagatatttacgattcgttattatctgaagaagcggtgctggcgttcgaatacggttacgcgactacttcgccaaaaggtttggttatttgggaggctcagttcggtgatttcgccaacggcgctcaagttgttattgaccaatttattacaagtggcgagcacaagtggcagcgtttgtgtggcttaactatgctattgccacatggttacgaagggcaggggccagagcactcttcagcacgtttagagcgctttatgcaattgtgtgcagagcacaacattcaagtgtgtatccctaccacgcctgcgcaggtttatcacatgatccgccgtcaggctattcgcccaatgcgcagaccacttgttgtgatgagcccgaaatggattcttcgtcacaagttggcaacgtctacgttagaagagctagctgaaggtagctttaaaacagtaattggcgatgacgttgttaagccagaagaagccaaacgtgtaattttgtgtagcggtaaggtttattaccatcttttcgaggctcgcgaagagcgtgaagagaaagacgttgcattaattcgcattgagcaactttacccattccccgaagaggcgctgcgcgttgagctagcaaaataccctggtttggtggatgtagtgtggtgtcaggaagagccgcaaaaccaaggcgcttggtactctagccagcaccgcatgcgcagagttgtagaacgagttaacgaagacgcagagttgcgttacgttggtcgggcatcttcttctgcacctgcagcgggttacatgagcacccacttggaagaacagaataagttcatcaacgcggcattggacacttccgtttaa

SEQ ID NO: 6176 - protein, 953 aa, Saccharophagus degradans 2-40
MPCHTVGEMQESIMELLWKTSHLSGGNAAYVEDQYESYLSDPHSVSEEWRDYFDKLPRVNGSASEDVNHSEIIKYFELLGKNRARPIIVPGAGSGDIAHERKQVEVVQLVNAYRLSGHQKANIDPLNLRAVKNPVDLDLGFHRLNTADLDSVFQTGDLAFGYKEAKLKDIIADLEKTYCGNIGAEVMHITNYEERRWLLNRLERSRSQPDFGPKAKRNILRRLTAAEGLERHLDSKYPGTKRFGLEGGESFIPLLDALIRRVGEYGAKEMVLGMAHRGRLNALVNILGKNPSDLFDEFEGKKLVDTSGDVKYHQGFSSNVMTPGGEMHLALAFNPSHLEIVSPVVEGSVRARQDRRGDKDGHTVVPVVVHGDAAFAGQGVVMETFQMSQTRAYKTGGTVHLVINNQVGFTTSRADDARSTAYCTDVAKMIETPIFHVNGDDPEAVVYVTQLAADYRNEFKKDVVIDLVCYRRRGHNETDEPSSTQPLMYKAIRSHKTTRTVYAEQLVNAGVVTQDEADQMTNDYRAALDRGEHVARGLVSEPDSSLFVNWSPYIGHDWNTPADTTYPIKELQSLAEQTSHVPDGVQVQRQVAKIYDDRRKMAGGALPINWGMAETLAYATLLKEGHKIRLTGQDVGRGTFSHRHAVVHNQKTGEAYIPLANISEDQAPLDIYDSLLSEEAVLAFEYGYATTSPKGLVIWEAQFGDFANGAQVVIDQFITSGEHKWQRLCGLTMLLPHGYEGQGPEHSSARLERFMQLCAEHNIQVCIPTTPAQVYHMIRRQAIRPMRRPLVVMSPKWILRHKLATSTLEELAEGSFKTVIGDDVVKPEEAKRVILCSGKVYYHLFEAREEREEKDVALIRIEQLYPFPEEALRVELAKYPGLVDVVWCQEEPQNQGAWYSSQHRMRRVVERVNEDAELRYVGRASSSAPAAGYMSTHLEEQNKFINAALDTSV

SEQ ID NO: 6177 - DNA, 2820 bp, Shewanella sp. MR-4
  CDS (1)..(2820): transl_table=11
atgcaccaaggcatcatgaaagcctggctcgaatcatctcacttaagtggtgcaaattcgacctacgtagaagagatgtatgaagcctatcaagaagacccacagtcagtctctgacgattggcgtgcggtatttgataatctccctccggtgaacggtgcttctaaagacgcgcctgaagcggctcactccaaagtacgtgattattttcgcagtttagcgatggacggacgtcataagagcgcagctcgtgtgaccgatcctgagttggatgctaagcaagttaaagtgctacagctgatcaacgcccaccgtttccgtggtcaccaaggggctaacctcgacccgttagaattgtggaaacgtgaacctgttgccgatttagatcccgcattccacggtctgaccaaagaagacatggaacgtgagttcaacactggctcgttcgcccacggcggcgaaaccatgaagctggctgacttagtcaaagcgctaaaagccacttactgtggttcgattggcgccgaatacatgcacattaccgataccgatgagaagcgttggatccaacaacgtctcgaaccatccttaggtaaagccaactacgataaaagcgttaagacccgcattctcgaaggcctaaatgctgctgaaggcattgaaaaatatttaggcgctaaattcccaggtgcaaaacgcttctcgttagaaggcggcgatgcgttagtccctatgatgcgcgaaatcatttatcgcgcaggcgaagcgggcactaaagaaatcgtagtcggtatggctcaccgtggtcgtttaaacgtactggttaacgtgttaggtaagcgtccagcagaactgtttgacgagttcgccggtaagcacgccgatacccacggttcaggcgacgtaaaataccaccaaggtttctcttcagatttcgaaacgccgggcggcaacgtgcacttagcactggcctttaacccatcacaccttgaaatcgttaaccctgtggttatgggctctgtccgtgctcgtcaagaccgccgtggttgtaaagacggtttacaggtgatgccaattacgattcacggtgactctgcaattgctggtcaaggtatcgtgcaagagacattcaacatgtctcaaacccgtggctttaaagtgggcggcagcatccgtattgttgtgaacaaccaagttggttttacaacgtcaaaccactttgatgtgcgttcaactgaatactgtactgacatcgctaagatggttcaggcaccgattttccacgtgaactctgacgatccagaagccgttgcctttgttgctcagcttgctgttgattatcgtaacgagtttaaacgtgacgtggtgattgatttagtgtgttaccgccgtcatggccacaacgaagctgatgagccaagtgcaactcagccactgatgtatgccaagatcaagaaacaccctacgccacgtaagatctatgctgacaaactgatcgccgaaaacgctatcggcgctgatgaagtgaccagcatgatcaacacttaccgcgacgccttagatcaaggcgactgcgtagtgaaagaatggcgcccaatgacactgcacacagtggattggagtccgtatattggccgtgagtgggacgaagcgtatcaagcctctatgccactggcgcgcttacagaatctagctgacaaactgagctacgtaccagagagccacccgctgcattcacgcgttgctaaaatttatggcgatcgcgttgccatggcaaagggcgagaagctactcgactggggctttgctgaaactttagcttacgccacgattcttgaagataagcaacgtgttcgcattacaggtcaagactctggccgtggtactttcttccaccgtcacgcggttctgcacaaccaaaacgatgcgacaacatacttaccactgcgtaacttgtctgaagaccaaggtccaatcgacattactgactcagtattgtctgaagcatcagtactcgccttcgaatacggttatgcgacggcggaacctggtggtctggcgatttgggaagcccaattcggtgactttgctaactgtgcgcaagtggttatcgaccagttcttgtcttctggtgagcaaaagtggggccgtctgtgcggtctgactatgctgttaccacacggttacgaaggtcaaggtccagaacactcaagcgcccgtttagagcgtttcttgcagatgtgtgctaaccacaacatgcaagtttgtgtgccatcaacgccagcacaggtttaccatatgctgcgtcgccaagtggttcgcccaatgcgtcgtccactggtagtgatgtcacctaaatcattgctacgtcacccgctagcggtttctagcatggaagaattggctaatggcaccttccaaaacgtgattggtgaaatcgatacgttagaagcgagcaaggtcgatcgcgtcgtgttctgtagcggtaaggtatacttcgagctgctggaaaaacgccgtaaagaaaacatcaataacatcgcaataatccgtgtcgaacagttatatccgttcccacatgaagaaatggtagcagccttagctgactatcaacatgtgaaggattttgtatggtgtcaggaagagccgcaaaaccagggtgcttggtactctagccaacatcacttctgggcagctatccctgcgggagcaaaactgacctacgctggtcgtgaagcatctgctgcaccagcctgtggttacccagagctgcatgctcaccaacaagaatctttagtgaacagtgccctaaagctgtaa

SEQ ID NO: 6178 - protein, 939 aa, Shewanella sp. MR-4
MHQGIMKAWLESSHLSGANSTYVEEMYEAYQEDPQSVSDDWRAVFDNLPPVNGASKDAPEAAHSKVRDYFRSLAMDGRHKSAARVTDPELDAKQVKVLQLINAHRFRGHQGANLDPLELWKREPVADLDPAFHGLTKEDMEREFNTGSFAHGGETMKLADLVKALKATYCGSIGAEYMHITDTDEKRWIQQRLEPSLGKANYDKSVKTRILEGLNAAEGIEKYLGAKFPGAKRFSLEGGDALVPMMREIIYRAGEAGTKEIVVGMAHRGRLNVLVNVLGKRPAELFDEFAGKHADTHGSGDVKYHQGFSSDFETPGGNVHLALAFNPSHLEIVNPVVMGSVRARQDRRGCKDGLQVMPITIHGDSAIAGQGIVQETFNMSQTRGFKVGGSIRIVVNNQVGFTTSNHFDVRSTEYCTDIAKMVQAPIFHVNSDDPEAVAFVAQLAVDYRNEFKRDVVIDLVCYRRHGHNEADEPSATQPLMYAKIKKHPTPRKIYADKLIAENAIGADEVTSMINTYRDALDQGDCVVKEWRPMTLHTVDWSPYIGREWDEAYQASMPLARLQNLADKLSYVPESHPLHSRVAKIYGDRVAMAKGEKLLDWGFAETLAYATILEDKQRVRITGQDSGRGTFFHRHAVLHNQNDATTYLPLRNLSEDQGPIDITDSVLSEASVLAFEYGYATAEPGGLAIWEAQFGDFANCAQVVIDQFLSSGEQKWGRLCGLTMLLPHGYEGQGPEHSSARLERFLQMCANHNMQVCVPSTPAQVYHMLRRQVVRPMRRPLVVMSPKSLLRHPLAVSSMEELANGTFQNVIGEIDTLEASKVDRVVFCSGKVYFELLEKRRKENINNIAIIRVEQLYPFPHEEMVAALADYQHVKDFVWCQEEPQNQGAWYSSQHHFWAAIPAGAKLTYAGREASAAPACGYPELHAHQQESLVNSALKL

SEQ ID NO: 6179 - DNA, 2820 bp, Shewanella sp. MR-7
  CDS (1)..(2820): transl_table=11
atgcaccaaggcatcatgaaagcctggctcgaatcatctcacttaagtggtgcaaattcgacctacgtagaagagatgtatgaagcctatcaagaagacccacagtcagtctctgacgattggcgtgcggtatttgataatctccctccggtgaacggtgcctctaaagacgcgcctgaagcggctcactccaaagtacgtgattattttcgcagtttagcgatggaagggcgtcataagagcacagctcgtgtgaccgatcctgagttggatgctaagcaagttaaagtgctacagctgatcaacgcccaccgtttccgtggtcaccaaggggctaacctcgacccgttagaattgtggaaacgtgaacctgttgccgatttagatcccgcattccacggtctgaccaaagaagacatggaacgtgagttcaacactggctcgttcgcccacggcggcgaaaccatgaagctggctgacttagtcaaagcgctaaaagccacttactgtggttcgattggcgccgaatacatgcacattaccgataccgatgagaagcgttggatccaacaacgtcttgaaccatctttaggtaaagccaactacgataaaagcgttaagacccgcattctcgaaggcctaaatgccgctgaaggcattgaaaaatatttaggcgctaaattcccaggtgcaaaacgcttctcgttagaaggcggcgatgcgttagtccctatgatgcgcgaaatcatttaccgcgcaggtgaagcgggcacaaaagaaatcgtagtcggtatggctcaccgtggtcgtttaaacgtactggtgaacgtgttaggtaagcgtccagctgaactgtttgacgagttcgccggtaagcacgccgatacccacggttcaggcgacgtaaaatatcaccaaggtttctcttctgatttcgaaacgccgggcggcaacgtgcacttagcactggcctttaacccatcacacctcgaaatcgttaaccctgtggttatgggctctgtacgtgctcgtcaagaccgccgtggttgtaaagacggtttacaggtgatgccaatcacgattcacggtgactctgcaattgctggtcaaggtatcgtgcaagagacattcaacatgtctcaaacccgtggctttaaagtgggcggcagcatccgtatcgttgtgaacaaccaagttggttttacaacgtcaaaccactttgatgtgcgttcaactgaatactgtactgacatcgctaagatggttcaggcaccgattttccacgtgaactctgacgatccagaagccgttgcctttgttgctcagcttgctgttgattatcgtaacgagtttaaacgtgacgtggtgattgatttagtgtgttaccgccgtcatggccacaacgaagctgatgagccaagtgcaactcagccactgatgtatgccaagatcaagaaacaccctacgccacgtaagatctatgctgacaaactgatcgccgaaaacgctatcggcgctgatgaagtgaccagcatgatcaacacctaccgcgacgccttagatcaaggcgactgcgtagtgaaagaatggcgcccaatgacactgcacacagtggattggagtccgtatattggacgtgagtgggacgaagcgtatcaagcctctatgccactggcgcgcttacagaatctagctgacaaactgagctacgtaccagagagtcacccgctgcattcacgcgttgctaaaatttatggcgatcgcgttgccatggcaaagggcgagaagctactcgactggggctttgctgaaactttagcttacgccacgattcttgaagataagcaacgtgttcgcattacaggtcaagactctggccgtggtactttcttccaccgtcacgcggttctgcacaaccaaaacgatgcgacaacatacttaccactgcgtaacttgtctgaagaccaaggtccaatcgacattactgactcagtattgtctgaagcatcagtactcgccttcgaatacggttatgcgacggcggaacctggtggtctggcgatttgggaagcccaattcggtgactttgctaactgtgcgcaagtggttatcgaccagttcttgtcttctggtgagcaaaagtggggccgtctgtgcggtctgactatgctgttaccacacggttacgaaggtcaaggtccagaacactcaagcgcccgtttagagcgtttcttgcagatgtgtgctaaccacaacatgcaagtttgtgtgccatcaacgccagcacaggtttaccatatgctgcgtcgccaagtggttcgcccaatgcgtcgtccactggtagtgatgtcacctaaatcattgctacgtcacccgctagcggtttctagcatggaagaattggctaatggcaccttccaaaacgtgattggtgaaatcgatacgttagaagcgagcaaggtcgatcgcgtcgtgttctgtagcggtaaggtatacttcgagctgctggaaaaacgccgtaaagaaaacatcaataacatcgcaataatccgtgtcgaacagttatatccgttcccacatgaagaaatggtagcagccttagctgactatcaacatgtgaaggattttgtatggtgtcaggaagagccgcaaaaccagggtgcttggtactctagccaacatcatttctgggcagctatccctgcgggagcaaaactgacctacgctggccgtgaagcttctgctgcaccagcctgtggttacccagagctgcatgctcaccaacaagaatctttagtgaacagtgccctaaagctgtaa

SEQ ID NO: 6180 - protein, 939 aa, Shewanella sp. MR-7
MHQGIMKAWLESSHLSGANSTYVEEMYEAYQEDPQSVSDDWRAVFDNLPPVNGASKDAPEAAHSKVRDYFRSLAMEGRHKSTARVTDPELDAKQVKVLQLINAHRFRGHQGANLDPLELWKREPVADLDPAFHGLTKEDMEREFNTGSFAHGGETMKLADLVKALKATYCGSIGAEYMHITDTDEKRWIQQRLEPSLGKANYDKSVKTRILEGLNAAEGIEKYLGAKFPGAKRFSLEGGDALVPMMREIIYRAGEAGTKEIVVGMAHRGRLNVLVNVLGKRPAELFDEFAGKHADTHGSGDVKYHQGFSSDFETPGGNVHLALAFNPSHLEIVNPVVMGSVRARQDRRGCKDGLQVMPITIHGDSAIAGQGIVQETFNMSQTRGFKVGGSIRIVVNNQVGFTTSNHFDVRSTEYCTDIAKMVQAPIFHVNSDDPEAVAFVAQLAVDYRNEFKRDVVIDLVCYRRHGHNEADEPSATQPLMYAKIKKHPTPRKIYADKLIAENAIGADEVTSMINTYRDALDQGDCVVKEWRPMTLHTVDWSPYIGREWDEAYQASMPLARLQNLADKLSYVPESHPLHSRVAKIYGDRVAMAKGEKLLDWGFAETLAYATILEDKQRVRITGQDSGRGTFFHRHAVLHNQNDATTYLPLRNLSEDQGPIDITDSVLSEASVLAFEYGYATAEPGGLAIWEAQFGDFANCAQVVIDQFLSSGEQKWGRLCGLTMLLPHGYEGQGPEHSSARLERFLQMCANHNMQVCVPSTPAQVYHMLRRQVVRPMRRPLVVMSPKSLLRHPLAVSSMEELANGTFQNVIGEIDTLEASKVDRVVFCSGKVYFELLEKRRKENINNIAIIRVEQLYPFPHEEMVAALADYQHVKDFVWCQEEPQNQGAWYSSQHHFWAAIPAGAKLTYAGREASAAPACGYPELHAHQQESLVNSALKL

SEQ ID NO: 6181 - DNA, 2826 bp, Alkalilimnicola ehrlichei MLHE-1
  CDS (1)..(2826): transl_table=11
atgaacggtcttttccagaggctacagcagacgtcctatctcaatggggtcaacagcaccttcattgaggacatgtacgaggagtacctgcgcgatcccaacggcatcgatcccgagtggcgcggttattttcgcgcgctggccgatggtggcgcccaggatgtcccccacagtccgatccgcgaggagttcgcgcgcctggcgcgcacacccggcaccacccgggtggcgaccccggcgctcacgccggatgccgccgagaagcagggggccgtgctgcggctgatcaatgcctatcgtttccgcggtcaccagctcgccgacgtggacccgctcaacctgcgcccgaaacccgacgtccccgatctggatccggcccaccatgggctgaccgaggcggacatggacgaggagttcaacaccggctccctgttcgcccaggatcgcatgccgctgcgccggatcatcgaactgctgcagcaggtgtacgccggccccatcggctcggagtacatgcacatcaccgataccgatcagaagcgctggatccaggagcggttggaggccaatcgggcgcaggccgacctgccggccgagcgccgcaagggcatcctggaacggcttaccgctgcggaggggatcgagaaatacctccactccaagtatgtgggccagaagcgcttctcgctggagggcggtgagtcgctcatcccgatgctggacgacctgatccaggacgccggcaggcagggggttcgcgaggtggttctgggcatggcccaccgcggccgcctgaacgtgctgatcaatatcatgggcaaatcgcccaaggacctgttcgccgagttcgaaggcaagaagccgtcggagatcaatggctccggcgatgtgaaataccacatgggcttttccagcgacatccagaccccgggcggggcactgcatgtggccatggccttcaacccctctcacctggagatcgtcaaccccgtggtggagggctcggcccgggcgcggatgcatcgccgtcgcgatcacgtgggggccgaagtcctgccggtgctgatccacggcgatgccgccttcgccgggcagggtgtggtcatggagaccttccagctctcccaggcgcgcggtttctacaccggcggcaccgtgcacattgtcatcaacaaccagatcggcttcaccacctccaacccgctggacacccgctccacggtctactgcaccgaggtggcgaagatgatccaggcgccgatcttccatgtgaacggcgacgacccggacgcggtggccttcgtcacccagctggccctggactaccgccaagccttcaatcgcgacgtggtcatcgacatggtctgtttccggcggcacggccacaatgaggcggatgagccctcagccacccagccggtgatgtaccagaagatcaagcagcacccgaccacccggcagctctatgccgagcgcctggagggcgagggggtgctttccgccgatgaggccaaggactacacccaggcctaccgcgacaagctggacgccggagaggtggtggcgcgcggccttctcagcggggtgcgcaacgactatgccgtggactggagcccctacatcggcacccagtggcacgaggcggtggacacctcgctaccgctggacgacttgcgggagcttcaggggctgctggagaagctccccgagggcttccagctcaacaaccgtgtcggcgccatcatggagaatcggcgcaagatggctgccggggcgctgcccctggactggggctttgcggagaccatggcctatgccagcctgctgcgtgacggccacaaggtccggctggtggggcaggactccggtcgggggaccttcttccaccgtcacgccgtgttgcacaacgccaaggatgggtccagcttcatcccgctgaaggacgtgaccaccgacccgaacgattttgtggtcatcgactcgctgctctccgaagaggcggtgatgggcttcgagtacggctacgccaccgccgatcccaacaccatggtgatctgggaggggcagtttggtgacttcgccaacggtgcacaggtggtgatcgaccagttcatcagctccggtgagtccaagtgggggcgcctgtgcgggctcaccctctacctgccgcacggctacgagggccaggggcccgagcactcctcggcgcgcctggagcgttacctgcagctgtgtgccgagcacaacatgcaggtggtggtgccctctaccccggcgcagttcttccacatgatccggcgccagatgatacgcccctaccgcaagccgctggtggtcatgacgccgaagagtctgctgcgccacaagctctccacctcctcgctggaggacctctccgaggggcaattccagccggtgatcgatgatccggacggcgtcacggccagcaaggtaaaacgggtcgtcctctgtagcgggaaggtcttctatgacctgctggacgcccgccgcaaggccgagcgcgacgatgtcgccatcgtgcgcgtggagcagctctaccccttcccggaggatgccctggccggcctgctgcgtgaccgctacggcaaggccaaggaggtggtctggtgtcaggaggagcccaagaaccagggtgcgtggtattccagcaaccaccacttccgcgcctgcatgaagggcacccagtccctgggctacgcgggccgcacggcctccgcctcgccggcggtgggttcggcgaaggtccaccacgagcagcagcgcgggctcgtggatcaggcgctcaaccagcccctgagtccgtaa

SEQ ID NO: 6182 - protein, 941 aa, Alkalilimnicola ehrlichei MLHE-1
MNGLFQRLQQTSYLNGVNSTFIEDMYEEYLRDPNGIDPEWRGYFRALADGGAQDVPHSPIREEFARLARTPGTTRVATPALTPDAAEKQGAVLRLINAYRFRGHQLADVDPLNLRPKPDVPDLDPAHHGLTEADMDEEFNTGSLFAQDRMPLRRIIELLQQVYAGPIGSEYMHITDTDQKRWIQERLEANRAQADLPAERRKGILERLTAAEGIEKYLHSKYVGQKRFSLEGGESLIPMLDDLIQDAGRQGVREVVLGMAHRGRLNVLINIMGKSPKDLFAEFEGKKPSEINGSGDVKYHMGFSSDIQTPGGALHVAMAFNPSHLEIVNPVVEGSARARMHRRRDHVGAEVLPVLIHGDAAFAGQGVVMETFQLSQARGFYTGGTVHIVINNQIGFTTSNPLDTRSTVYCTEVAKMIQAPIFHVNGDDPDAVAFVTQLALDYRQAFNRDVVIDMVCFRRHGHNEADEPSATQPVMYQKIKQHPTTRQLYAERLEGEGVLSADEAKDYTQAYRDKLDAGEVVARGLLSGVRNDYAVDWSPYIGTQWHEAVDTSLPLDDLRELQGLLEKLPEGFQLNNRVGAIMENRRKMAAGALPLDWGFAETMAYASLLRDGHKVRLVGQDSGRGTFFHRHAVLHNAKDGSSFIPLKDVTTDPNDFVVIDSLLSEEAVMGFEYGYATADPNTMVIWEGQFGDFANGAQVVIDQFISSGESKWGRLCGLTLYLPHGYEGQGPEHSSARLERYLQLCAEHNMQVVVPSTPAQFFHMIRRQMIRPYRKPLVVMTPKSLLRHKLSTSSLEDLSEGQFQPVIDDPDGVTASKVKRVVLCSGKVFYDLLDARRKAERDDVAIVRVEQLYPFPEDALAGLLRDRYGKAKEVVWCQEEPKNQGAWYSSNHHFRACMKGTQSLGYAGRTASASPAVGSAKVHHEQQRGLVDQALNQPLSP

SEQ ID NO: 6183 - DNA, 2832 bp, Pseudomonas aeruginosa UCBPP-PA14
  CDS (1)..(2832): transl_table=11
atgcacgaaagcgtaatgcagcggatgtggaacagtgcccatctatccggtggtaacgctgcctacgtcgaagagctctacgagctctacctgcacgaccctaacgctgtgccagaagagtggcgcacgtatttccagaagcttcccgccgatggcaatcccgcccccgacgtctcgcactccacagtgcgcgatcatttcgtcttgctggccaagaaccagcgccgtgcccagccggtttccgccggtagcgtgagcagcgagcacgagaagaaacaggtcgaagtccttcgtctcattcacgcttaccgtctccgcggccaccaggcttccaccctcgacccgctcggcctgtggcagcgtcccgcgcctgccgacctgtcgatcgaccactacggtctgacgggtgccgatctggataccactttccgcaccggtgagctttacatcggcaaggaagaggcgaccctgcgtgaaatcgtcgacagcctgaagagcacctattgcggtaccttcggcgccgagttcatgcacatcgtcgattccgagcagcgcaagtggttcctccagcgcctggaaagcgtgcgtggccgtcccggcttctccgccgaggcgcgtgcgcacctgctcgagcgcctgaccgcggccgaaggcctggagaagtacctgggcaccaagtacccgggcaccaagcgtttcggcctggaaggcggcgaaagcctgatcccgatggtcgacgagatcatccagcgctgcggttcctacggcgccaaggaaatcgtaatcggcatggcccaccgcggtcgcctgaacgtcctggtcaacaccctgggcaagaacccgcgcgacctgttcgacgagttcgaaggcaagaagatcgtcgagctgggctccggtgacgtgaagtaccaccagggcttctcctcgaacgtgatgaccagcggcggcgaagtccacctggcgctggcgttcaacccgtcccacctggagatcgtttccccggtggtcgagggttccgttcgtgcccgccaggaccgccgcaaggacagctccggcgacaaggtggtaccgatttccatccacggcgatgccgccttcgcggggcagggcgtggtcatggaaaccttccagatgtcgcagacccgcgcctacaagaccggtggcaccatccacctggtgatcaacaaccaggtcggcttcaccaccagccgccaggacgatgcgcgttccaccgagtacgccaccgacgtggcgaagatgattcaggcgccgatcttccacgtcaacggcgacgatcccgaagccgtgctgttcgtcacccagctggccgtcgactatcgcatgcagttcaagcgtgacgtggtcatcgacctggtctgctaccgtcgccgcggccacaacgaggcggacgagccgagcggcacccagccgctgatgtaccagcagatcgccaagcagcgtactacccgcgagctgtacgccgacgcgctggtgaacgccggcgtgctcagcgccgagcaggttcagtcgaagatcgacgactaccgcgatgccctggacaacggcctgcacgtggtgaagagcctggtcaaggagcccaacaaggaactgttcgtcgactggcgtccgtacctgggccatgcctggaccgcgcgtcacgacacccgcttcgacctgaagaccctgcaggaactgtccagcaagatgctggaagtgccggaaggcttcgtggttcagcgccaggtttcgaagatctacgaagatcgccagaagatggcggccggtggcctgccgatcaactggggcttcgccgagaccctggcctacgcgaccctgctgttcgaaggccatccggtacggatgaccggccaggacgtcggccgtggcaccttctcgcaccgtcacgcggtgctgcacaaccagaaggatgactcggtctacgtaccgctggccaatctgttcgacggccagccgcgcctggatatctacgattcgttcctttcggaagaggccgtgctggcgttcgaatacggtttcgccaccaccacgccgaattcgctggtgatctgggaagcccagttcggcgacttcgccaacggcgcccaggtggtcatcgaccagttcatcaccagtggcgaaagcaaatggggccgactctgcggcctgaccatgctgctgccgcacggctatgaggggcagggtccggagcactcctccgcgcgcctggagcgctacctgcagctctgcgccgagcagaacatccaggtctgcgtgccgaccaccccggctcaggtctaccacatgctccgccgtcaggtgatccgcccgctgcgcaagccgctggtggtgatgacgccgaagtccctgctgcgtcacaagctcgccatctcgaccctggaagatctggccaacggttccttccagaccgtgatcccggaaatcgacagcctggatccgaagaaggtcgaccgcgtcgtgctgtgcagcggcaaggtgtactacgacctgctggagaagcgtcgcgcggaaggccgcgaagataccgcgatcgtccgtatcgagcagctgtatccgttcccggaagacgacctggcggaagttctggctccctacaagaacctcaagcacatcgtctggtgccaggaagagccgatgaaccagggcgcctggttctgcagccagcatcacatgcgtcgtgtcatcgccgcgcacaagaagggcctcaatctcgagtacgccggccgcgaaggctccgctgctccggcttgcggctacgcctcgatgcacgccgagcagcaggaaaaactgctgcaagacgcctttactgtttaa

SEQ ID NO: 6184 - protein, 943 aa, Pseudomonas aeruginosa UCBPP-PA14
MHESVMQRMWNSAHLSGGNAAYVEELYELYLHDPNAVPEEWRTYFQKLPADGNPAPDVSHSTVRDHFVLLAKNQRRAQPVSAGSVSSEHEKKQVEVLRLIHAYRLRGHQASTLDPLGLWQRPAPADLSIDHYGLTGADLDTTFRTGELYIGKEEATLREIVDSLKSTYCGTFGAEFMHIVDSEQRKWFLQRLESVRGRPGFSAEARAHLLERLTAAEGLEKYLGTKYPGTKRFGLEGGESLIPMVDEIIQRCGSYGAKEIVIGMAHRGRLNVLVNTLGKNPRDLFDEFEGKKIVELGSGDVKYHQGFSSNVMTSGGEVHLALAFNPSHLEIVSPVVEGSVRARQDRRKDSSGDKVVPISIHGDAAFAGQGVVMETFQMSQTRAYKTGGTIHLVINNQVGFTTSRQDDARSTEYATDVAKMIQAPIFHVNGDDPEAVLFVTQLAVDYRMQFKRDVVIDLVCYRRRGHNEADEPSGTQPLMYQQIAKQRTTRELYADALVNAGVLSAEQVQSKIDDYRDALDNGLHVVKSLVKEPNKELFVDWRPYLGHAWTARHDTRFDLKTLQELSSKMLEVPEGFVVQRQVSKIYEDRQKMAAGGLPINWGFAETLAYATLLFEGHPVRMTGQDVGRGTFSHRHAVLHNQKDDSVYVPLANLFDGQPRLDIYDSFLSEEAVLAFEYGFATTTPNSLVIWEAQFGDFANGAQVVIDQFITSGESKWGRLCGLTMLLPHGYEGQGPEHSSARLERYLQLCAEQNIQVCVPTTPAQVYHMLRRQVIRPLRKPLVVMTPKSLLRHKLAISTLEDLANGSFQTVIPEIDSLDPKKVDRVVLCSGKVYYDLLEKRRAEGREDTAIVRIEQLYPFPEDDLAEVLAPYKNLKHIVWCQEEPMNQGAWFCSQHHMRRVIAAHKKGLNLEYAGREGSAAPACGYASMHAEQQEKLLQDAFTV

SEQ ID NO: 6185 - DNA, 2817 bp, Pseudoalteromonas tunicata D2
  CDS (1)..(2817): transl_table=11
atgcacgaaggtgtaatgaaggcatggctagagtcttctcacttaaacggcggtaacgttgcttatgtagaagatctgtacgaatcgtacttagacgatgccacttctgtatcagaagaatggcgtcaaatgttcgaccaattaccaaaggtagatggggtcgatgtcgaaagtaaacattctgaaatccgagcacaatttgttcagcttgcaaaaaacaagcacagagaagtggcggtagttggtggaaatgccgatgatgcaaaacaagttaaggtattgcaacttatcaatgcatttaggtttcgcggtcatcaaaacgctaacttagatccacttaatttatggaaaagagaacgagtccgcgacttagaactttcttaccatgacctttctgaatcagattttgaccgtgaatttaatgtcggttcattcgcatctgccacagatactatgcctttgggtgaactttacagcgcgttgcaaaaaacttactgtggttcgattggtgcagaatatatgcacattacgtcgacagaagaaaaacgttggttacaacagcgcttagaatcagttcattctaaacctcgatttgataatgaaaccaaattacgtattcttcatggtttaacagccgcagacggtcttgaaaaataccttggtgctaaatttccaggtgctaaacgcttctctttggaaggtggtgattctcttgttccaatgcttaaggaactgatccatcgtgcaggtgaaagcggccaagaagaagttgtaattggtatggcccaccgaggtcgtttaaatgttttaattaacgtcatgggtaaaaacccatctgagttgtttgatgagttcgcgggtaaaatcaaatcaagcagttctggtgatgttaagtaccatatgggttattcatctgactttactaccaaaggtggtaatgtgcatatggtgctttcgtttaacccatcacacttagaaattgttaacccagttgttatgggctcagtacgtgctcgtttagaccgtttaggtcgcaatactggttcaaaagcgttgcctatcactattcacggtgactcagccattgcgggtcaaggtgttgtgcaagaaacattcaatttatctcaaactcgtgcgtttagtgtcggtggcacagttcgaatagttgtgaataatcaagttggttttacaacgtctaaaaaagaagatgtgcgttctacagagtactgtacagatattgctaaaatggtacaggcgccaatcttccatgttaacgcggatgatccagaagctgttgcattagtaacacatatcgcgcttgattttagaaatcaatttaagcgtgatgtggtaattgatttagtatgttaccgtcgccacggccataacgaagctgatgagccaagtgcaactcagccattgatgtatcaaaaaattaaaaagcatccagttcctcgtgaactatatgcaaaacagcttgctgccgaaggtgttatacctctagaggaaagctcgcacttagctgatacttatcgcaatagtttagatggcggcacctgcgttgtttctgagatagcgccagaaactaagcattcttctgattgggctaagtttgttggtcacgattgggacacaccttacgacgctaaagtaaacatcgataaactcaaagagcttgctgttaaaatcgcaactattccagaaggtcataaagcacaatctcgagtccaaaaaatttacgatgaccgtaaattgatggctgtaggggaaaaaccgcttgattggggtatggctgaaacactagcatatgcaactttggttgacactggtacagaaatccgtatgacaggtcaagattcaggtcgtggtactttcttccatcgtcatgctgttgttcataatcagaaagatgctacaacttacctgccactgcaaaatatcagtgaaaaccaaggtatgtttgaagtatacgactctgtgttgtctgaagaagcggtgcttgcgtttgaatatggttatgctacggcagagccaactacgttagttctttgggaagcccaatttggtgacttcgcaaatggtgcacaagtagtatttgaccaattcttaagttctggtgagcaaaagtggggtcgtttatgtggcttaactgtcatgttaccgcatggctacgaaggtcaaggccctgagcatagttcagcgcgtcttgagcgtttcttacaactttgtgctgatcacaatatgcaagtatgtgttccttcgacacccgcacaagtgtatgcaatgctgcgtcgtcagcaggtacgtccactacgccgtccattaatcgtaatgacaccaaaatcattattacgtcatccacttgctgtgtcttctttagaagagttagctgatggtacattccaaaatatcatcggtgaaattgatgatattaaagctgagaatgtcgatcgtgtggttttctgtagtggtaaagtgtactacgaattattacaagaacgccgtgctaaagaattaaacaatgttgcaatcgtacgtgttgagcagctttatccgttccctcacaaagaaatgacggatttaatggcaaattaccaacatgtaaaagagtttgtttggtgtcaagaagagccacaaaatcaaggtgcttggtattgttctcaacatcattttgttgatgcaattccagcaggcgcaaaactatcatacgcaggtcgtaaagcatccgcttcaccagcatgtggttatatgtctgttcataccgcagagcaaaatgcactcatcgctgcggcgctcaatatcgacacaaagggataa

SEQ ID NO: 6186 - protein, 938 aa, Pseudoalteromonas tunicata D2
MHEGVMKAWLESSHLNGGNVAYVEDLYESYLDDATSVSEEWRQMFDQLPKVDGVDVESKHSEIRAQFVQLAKNKHREVAVVGGNADDAKQVKVLQLINAFRFRGHQNANLDPLNLWKRERVRDLELSYHDLSESDFDREFNVGSFASATDTMPLGELYSALQKTYCGSIGAEYMHITSTEEKRWLQQRLESVHSKPRFDNETKLRILHGLTAADGLEKYLGAKFPGAKRFSLEGGDSLVPMLKELIHRAGESGQEEVVIGMAHRGRLNVLINVMGKNPSELFDEFAGKIKSSSSGDVKYHMGYSSDFTTKGGNVHMVLSFNPSHLEIVNPVVMGSVRARLDRLGRNTGSKALPITIHGDSAIAGQGVVQETFNLSQTRAFSVGGTVRIVVNNQVGFTTSKKEDVRSTEYCTDIAKMVQAPIFHVNADDPEAVALVTHIALDFRNQFKRDVVIDLVCYRRHGHNEADEPSATQPLMYQKIKKHPVPRELYAKQLAAEGVIPLEESSHLADTYRNSLDGGTCVVSEIAPETKHSSDWAKFVGHDWDTPYDAKVNIDKLKELAVKIATIPEGHKAQSRVQKIYDDRKLMAVGEKPLDWGMAETLAYATLVDTGTEIRMTGQDSGRGTFFHRHAVVHNQKDATTYLPLQNISENQGMFEVYDSVLSEEAVLAFEYGYATAEPTTLVLWEAQFGDFANGAQVVFDQFLSSGEQKWGRLCGLTVMLPHGYEGQGPEHSSARLERFLQLCADHNMQVCVPSTPAQVYAMLRRQQVRPLRRPLIVMTPKSLLRHPLAVSSLEELADGTFQNIIGEIDDIKAENVDRVVFCSGKVYYELLQERRAKELNNVAIVRVEQLYPFPHKEMTDLMANYQHVKEFVWCQEEPQNQGAWYCSQHHFVDAIPAGAKLSYAGRKASASPACGYMSVHTAEQNALIAAALNIDTKG

SEQ ID NO: 6187 - DNA, 2832 bp, Photobacterium sp. SKA34
  CDS (1)..(2832): transl_table=11
atgcagaacggcgttatgaaggcatggcttgagtcttcacatttagctggcgccaatgcgacttacgtagaagatctctacgagttgtatcttagcgacccagaattagttgacgagcaatggcgtgatattttcgttgaattaccggtagtcaatgagactgctgtagaacaacctcattcacgcgttcgtgattatttccgacgtttagcgaaagaaaccaactttttaagtgctaccgtcagcgatccagatgttgatgcgaaacaagtaaaggtattgcagcttattaatgcatatcgcttccgtgggcatcaaaatgcaaaacttgatccattaggattatggcagcgtgatttagttccagatcttgatccagcattccataatcttactgatgaagattttaatgaaacatttaacgtaggctcgtttgcggttggtcaagagaccatgaagctttctgaaatttatgctgcgttaaagaaaacatactgtggctctattggtgcagaatacatgcacattacggatactgaggaaaagcgttggatccaacaacgtcttgaatctgtaatggggcatggttccttctcgcaagaagagcaactttcatttcttgatgagttgaccgcagctgaaggtcttgagcgttatttaggcgctaaattccctggcgctaagcgattctcattagaaggtggtgatgcgcttattccaatgatgaaagagctgatccgtcacgctggttctcaaggtgtacgcgaagttgttataggtatggcccaccgtggtcgcctaaacatgttggttaatgtactaggtaaaaaaccacaagacttatttgatgagtttgcaggtaagcacggcgaaagctggggtacgggtgatgttaaatatcaccaaggcttttctgcagattttgcaacacctggtggcgatgttcaccttgctcttgcctttaacccatctcaccttgaaattgtaaacccagttgttgtgggttctgtacgcgctcgtcaagatcgcttaggtgatgatacgggttctaaagtattacctattacacttcatggtgattcagcgattgctggacagggtgttgttgcagagacgttcaatatgtctcaagcgcgtggttatggtgtaggcggtactattcgtatagtcgtcaataaccaagttggttttacgacctctaatccaagcgatacacgttcaacagaatactgtactgatatcgctaagatggtgcagtcacctattttccacgttaatgctgatgatcctgaagctgttgcttttgtaacaagacttgcatttgattttcgtaatgaatttaagcgtgatgttgttattgatttggtttgttaccgtcgccatggtcacaatgaagctgatgaaccgaatgcaactcagcctcttatgtatcagaagatcaaaaagcatcctacgccacgtaagatttatgcagattatctaaccgatactggcgtatttggtttagatacggcaacaagcttagtcaatgaatatcgtgatgcgttagatcgtggcgagtgtgtggtaaaagaatggcgtccaatgcatcttcatacggttgattggtcaccatacttaggccatgactggactgttgattggaataacaaagtgcctgttgagcgtttaaaagacttaggtgctcgtctttgccaatatccagatagccatgttttacagagccgtgttcaaaagctatataacgatcgcgtagctatgattgcgggtgaaaaagcgtttgattggggtatggctgaaacattggcttatgccacattagttgacgaaggtaatcgcattcgtattacaggccaagattcaggtcgtggtacattcttccatcgtcatgctgtactgcataatcaagaagatgcaagtacttacgtaccgttagctaatcttcacaatggacaaggtccatttgaagtgatcgattcagtgttatctgaagaagcggtgttagcctttgaatacggctatgcaactgcagaacctagtggtttgacggtatgggaagcgcaattcggtgactttgccaatggtgctcaagttgtgattgaccaattcatcagttctggtgagcaaaaatgggggcgtatgtgtggtttaaccatgctgctaccacatggttatgagggccaaggtccagagcactcatcggcacgtttagagcgttacttacaattgtgtgcagagcaaaatatgcaagtcgttgttccatcaacacctgcacaggtttaccacatgatccgtcgtcaagtggttcgtccaatgcgtcgaccattaattgtaatgtcgccaaaatcattgctgcgtcatccgctatgtacgtctacgttagatgatttagctaacggtactttcttacctgcgattgctgaagttgatgatttagcaccaaataaagtgaaacgtgtggttttctgttcgggtaaagtttattacgatttactggagcaacgccgcaagaatgaacaagaggatgtggcgattgttcgtatcgagcaactatacccattcccgaaagaagacgttgaagctgcaattgctgaatatgagcacgtaactgattttgtttggtgtcaagaagagccgcaaaaccaaggcgcgtggtattcaagtcaacataacttctactctgcgttaccagtcggtgcgcgtttaagttatgccggacgtccagcatcagcctcaccggcggtaggttacatgtcggtgcatttgaaacaacaaaaagcacttgtagaagacgctttaacaattgctcctcaagagcaaaataataattag

SEQ ID NO: 6188 - protein, 943 aa, Photobacterium sp. SKA34
MQNGVMKAWLESSHLAGANATYVEDLYELYLSDPELVDEQWRDIFVELPVVNETAVEQPHSRVRDYFRRLAKETNFLSATVSDPDVDAKQVKVLQLINAYRFRGHQNAKLDPLGLWQRDLVPDLDPAFHNLTDEDFNETFNVGSFAVGQETMKLSEIYAALKKTYCGSIGAEYMHITDTEEKRWIQQRLESVMGHGSFSQEEQLSFLDELTAAEGLERYLGAKFPGAKRFSLEGGDALIPMMKELIRHAGSQGVREVVIGMAHRGRLNMLVNVLGKKPQDLFDEFAGKHGESWGTGDVKYHQGFSADFATPGGDVHLALAFNPSHLEIVNPVVVGSVRARQDRLGDDTGSKVLPITLHGDSAIAGQGVVAETFNMSQARGYGVGGTIRIVVNNQVGFTTSNPSDTRSTEYCTDIAKMVQSPIFHVNADDPEAVAFVTRLAFDFRNEFKRDVVIDLVCYRRHGHNEADEPNATQPLMYQKIKKHPTPRKIYADYLTDTGVFGLDTATSLVNEYRDALDRGECVVKEWRPMHLHTVDWSPYLGHDWTVDWNNKVPVERLKDLGARLCQYPDSHVLQSRVQKLYNDRVAMIAGEKAFDWGMAETLAYATLVDEGNRIRITGQDSGRGTFFHRHAVLHNQEDASTYVPLANLHNGQGPFEVIDSVLSEEAVLAFEYGYATAEPSGLTVWEAQFGDFANGAQVVIDQFISSGEQKWGRMCGLTMLLPHGYEGQGPEHSSARLERYLQLCAEQNMQVVVPSTPAQVYHMIRRQVVRPMRRPLIVMSPKSLLRHPLCTSTLDDLANGTFLPAIAEVDDLAPNKVKRVVFCSGKVYYDLLEQRRKNEQEDVAIVRIEQLYPFPKEDVEAAIAEYEHVTDFVWCQEEPQNQGAWYSSQHNFYSALPVGARLSYAGRPASASPAVGYMSVHLKQQKALVEDALTIAPQEQNNN

SEQ ID NO: 6189 - DNA, 2835 bp, Oceanospirillum sp. MED92
  CDS (1)..(2835): transl_table=11
atgcaagaaggcatcatggatctcatgtggaagaatgctcacctttatggtggcaacctttcatacgttgaagaactgtacgaaacatacctgatggatccaaatgcgattcctcaggagtggcgagaagaatttgaccgcctgccaaaggttggtgaaagcctgtcacaggacgtgccacattccgctatcagagaacattttctctacctttccaaaaatcagaaacgcgctgcccctgcggctgtaagctcagttagttccgagcacgaaaaaaagcaggtgcgagtattgcgtatgatcaacgcatatcgcgtacgtggtcatcaggctgcaaacatcgatccactcggtttgatgcagcgtgaacctgtacctgatcttgatctgcgttttcatgagctttctgaagcagattatgacacggtattccaattgggctctctgttcttcggaccagaagaggcaccactaagggatatcgttgcagaccttaagaaaacttactgttctacagtaggtgctgagtatatgcatattgtagatactcaggagaaacgttggattcagtcccgtcttgaacctgttcgttcccatccggaagcaccggttgagaaaaagaaaatggttcttgaacgcctgactgcagcggaaggtctggaaaaatacctgggttcccgttatgccggtgcgaaacgcttcggtctagagggcggtgaatccatgattgtatcgctgaatacgttgattcagcgtgcaggcaagcagggtgctaaagaagtagtaatcggcatggctcaccgtggtcgtctgaatacactggttaatatctttggtaaaaaccctgcggatctttttgacgaatttgaaggtaagaagctggtcgatacgtcaggtgacgttaagtaccaccagggtttctcttcaaacgttgaaacctctggtggtgaagttcatattgcgatggcgttcaacccatctcaccttgaaatcgctgcacctgtagttgagggttctgtacgtgcacgtcaggatcgtcgcgaagatgctgcaggtgattcagtagtaccggtaaatattcacggtgaccaggcattttgtggtcagggtgtggtaatggagacattccagatgtctcagacccgtgcttacaaaaccggcggtaccattcacctggtaattaacaaccaggttggttttaccacatcgaaacaggaagactctcgttctaccgagtattccactgatgtggctaaaatgattcaggcaccgatcttccatgtaaatggagatgatccagaagcggtacgtttcgtaacgcagctggctgttgattaccgtaacgaatttaagaaagacgttgtaatcgatctgttctgttaccgtcgtcgtggtcataacgaggcggatgaaccgtctggtacgcagccactgatgtacgcacagatcaagaagcagaaaacgacccgtgatctttacgcgcagcaactgattgccgaaggtgtaattactgctgaagaaagtaaagagatggagaaagagtaccgcaagctgctggaaaacggcgagcatgtggttaagtctctggttcacgagccaaacgctgaactatttgttgactggaaaccttatcttggtcacgaatggtctttcgattgccctgaaactaaggttgatctgaagttacttcaggagctgggcgataagatctgtaatgtacctgaaggtttcgctgtacagcgtcaggtgcaaaaaattattgatgaccgtaagcgtatgtcgcacggtgctatggaactgaactggggtatggcagagtctttggcttacgcttctatcctggcagaagggcatcctgtacgtattacgggtcaggatgttggtcgaggtacgttctcacaccgtcacgcggttcttcatgatcagaagactgcagagacttacctgccgcttgataatttgtctgaagagcagccacgcttaaccctgcatgactctttcctatccgaggaagcggtacttgcttttgaatatggttatgcgactacgatgccaaatgcactggttatctgggaagcacaatttggtgacttcgctaacggtgctcaggttgtaatcgatcagttcattacatcgggtgagcataaatggcagcgtctgtgtggcttgaccatgctgttgccgcacggctttgaaggtcaggggcctgagcattcatctgctcgcctggaacgttacctgcagctgtgtgctgagcataatatccaggtgtgtacaccaacgactccagctcagattttccatctgttgcgtcgtcaggttgtgcgtccactgcgtaagccacttgtggttatgtctcctaagagcttgctgcgtcacaaacaggcaacttctacacttgaagacctggctgaaggttctttccagccagttatcggtgaagttgatcagttggagcctaagaaggttaagcgactggttctgtgtggtggcaaggtttactacgacctgtataaccgtcgtgctgaacttgagaaggaagatgtggcgattgttcgtattgaacagctctacccattccctgaagtacagctggctgaagcgatctctgaatataccaacctggaatctgtggtttggtgtcaggaagagcctctgaaccagggtgcgtggtattcaatgcagcatcacatgcgccatgttatgcagaaacatgacagcaaacttcatctggaaggcgttgcccgtccagcgtctgcagctcctgcggtaggttatatctccgtacacgcagagcagcaggaaaaacttgttaacgaagcaatcaacggttga

SEQ ID NO: 6190 - protein, 944 aa, Oceanospirillum sp. MED92
MQEGIMDLMWKNAHLYGGNLSYVEELYETYLMDPNAIPQEWREEFDRLPKVGESLSQDVPHSAIREHFLYLSKNQKRAAPAAVSSVSSEHEKKQVRVLRMINAYRVRGHQAANIDPLGLMQREPVPDLDLRFHELSEADYDTVFQLGSLFFGPEEAPLRDIVADLKKTYCSTVGAEYMHIVDTQEKRWIQSRLEPVRSHPEAPVEKKKMVLERLTAAEGLEKYLGSRYAGAKRFGLEGGESMIVSLNTLIQRAGKQGAKEVVIGMAHRGRLNTLVNIFGKNPADLFDEFEGKKLVDTSGDVKYHQGFSSNVETSGGEVHIAMAFNPSHLEIAAPVVEGSVRARQDRREDAAGDSVVPVNIHGDQAFCGQGVVMETFQMSQTRAYKTGGTIHLVINNQVGFTTSKQEDSRSTEYSTDVAKMIQAPIFHVNGDDPEAVRFVTQLAVDYRNEFKKDVVIDLFCYRRRGHNEADEPSGTQPLMYAQIKKQKTTRDLYAQQLIAEGVITAEESKEMEKEYRKLLENGEHVVKSLVHEPNAELFVDWKPYLGHEWSFDCPETKVDLKLLQELGDKICNVPEGFAVQRQVQKIIDDRKRMSHGAMELNWGMAESLAYASILAEGHPVRITGQDVGRGTFSHRHAVLHDQKTAETYLPLDNLSEEQPRLTLHDSFLSEEAVLAFEYGYATTMPNALVIWEAQFGDFANGAQVVIDQFITSGEHKWQRLCGLTMLLPHGFEGQGPEHSSARLERYLQLCAEHNIQVCTPTTPAQIFHLLRRQVVRPLRKPLVVMSPKSLLRHKQATSTLEDLAEGSFQPVIGEVDQLEPKKVKRLVLCGGKVYYDLYNRRAELEKEDVAIVRIEQLYPFPEVQLAEAISEYTNLESVVWCQEEPLNQGAWYSMQHHMRHVMQKHDSKLHLEGVARPASAAPAVGYISVHAEQQEKLVNEAING

SEQ ID NO: 6191 - DNA, 2832 bp, Oceanobacter sp. RED65
  CDS (1)..(2832): transl_table=11
atgcacgaaggctcgatggagcagctatggagcacctcccagttagcagggggaaatgttgcttacatagaggagttatacgaactctatttgacggatccaaattccgtacccgaacagtggcgaaattactttggcaccttgccaagggttgagggtggtaacaccaacgatacgccgcatacccccattaaagagcagtttttactgatcgcccaaaatcagcgcaggcttggatcgacaacgcaagcccaggtaagcagtggctatgatcaaaaacaactgcgtgttttccagctcatcaatgcctaccgcttccgcggccatcagcacgccaagctagacccgctaggtatcatggagcgagagcaagttcctgatcttgatttacgttatcacgaactttccgaagccgacatggacagcgtgttccagaccggttctctattcatgggcaaagaagaagcgaccctatctgaaattcgtgatgcactagaagaaacctattgtcagtctatcggcgctgaattcatgcacattgttgatacggccgaaaaacgctggttccaacaacgcattgaaagcgtgcgcgccaaacccgattacggcgaagaagccaaaacccatttgcttgagcgattgactgcagcagaggggctagagaaattcctaggttcaaaatatccaggtgtaaaacgctttggtcttgagggcggcgaaacgcttatcccgttgatggatgaattaattcagcgtgtaggaacctatggtgccaaagaagtagtgatcggtatggcgcaccgtggacgcttgaacgtattggttaacactctgggtaaagcgcctggtgatttatttgacgaatttgatggtaaagcgacgttcgatcattctggtgacgttaaatatcaccaaggtttctcatcaaatgtattaacgccaggtggcgaagtacacttggctctggcctttaacccaagtcacttagaaattgtttctcctgtagttgagggttctgtgcgtgctcgtcaggatcgtcgtaatgatccagtgggtgacacggtcgttcctgtgaacatccatggcgattcagcatttgctggtcagggtgttgtaatggaaacattgcagatgtcccagactcgtggttacaaaacgggtggtacgatacacatagttgtaaacaatcaggttggctttactaccagtaagcgtgaggatgttcgttcaactgaatactgtactgacgttgccaagatggttcaggcaccgattcttcacgttaatggtgatgatccagaagctgttttatttgttactcagcttgctgttgattatcgcaatgaattcaaaaaagacgttgttattgatttggtttgttatcgccgtcgtggccataacgaagcggacgagccatctgctacgcagccactgatgtacagtgttattaagaaacagccaacgactcgaactctttacgccaaaacactgcaagatagcggagtggtaagcgaagatcacatcaaaaagatggagtcagattaccgcgatgcgctggaatcaggtaagcatgtcgtaaaaagcctagtgactaagccaaattcgcaattgtttgtcgattggtcgccttatttaggccacgataattcaacgacggccagcactaaatttgacctcaagcgactacaagagttagcgaacaaggctcaggaggttccagaaggcttccaagttcagcgtcaagtaaacaaaattctagaagaccgtcgtaaaatggccgctggcgcacaacccattaactggggttttgctgaaaccatggcttatgcaactttgttagatgaaggttacccaattcgtttgactggccaagacgtaggtcgtggtacgttctctcaccgtcacgcggtgatgcacaaccaaaaagacggctcttcatactgttcattgcaaagcctgaaagaagaccagcctacattcaccattcacgattcacttctttctgaagaagcggttttgggttttgaatatggttacgcaacaacaacgccaaacatgctagtgatttgggaggcacaatttggtgatttcgccaatggtgcccaagttgttatggaccagtttatttccagtggtgagcataagtggggtcgtttgtgcggcctaacgcaactgctaccgcatggctacgaagggcagggtcctgaacacagttctgctcgtttagagcgttacttgcagttatgtgccgagcacaacatgcaggtctgcgtaccaacgacaccttctcaaatcttccacttgttgcgtcgccaggtgattcgtccattgcgtaaaccgctagtggttatgtcaccaaagagcttgcttcgtcacaagcaagcggtaagtacgttggaagatttagctgaaggggaattccaaaccatccttcctgaaaccgaggagctgaatccaaaagatgtaacgcgcctcgtattctgtagcggtaaagtttattacgacctagtggatcgtcgccgtacggaagaaatgaataatgtagcgattattcgcatcgaacaattgtatccattcccagaagaagagctttatgctgctatttctgagtacagtaacgtgaaagaagttatgtggtgccaagaagagccgatgaaccaaggtgcttggtacagctcgcaacaccatatgcgtcgtgtaacacatcgactaaatcctaatttgtatttggattatgcaggtcgacaaccgtcagcagcaccggcggcaggttatatggctcttcacttagagcaacaagaacaattgattaaagatgcgttaggactataa

SEQ ID NO: 6192 - protein, 943 aa, Oceanobacter sp. RED65
MHEGSMEQLWSTSQLAGGNVAYIEELYELYLTDPNSVPEQWRNYFGTLPRVEGGNTNDTPHTPIKEQFLLIAQNQRRLGSTTQAQVSSGYDQKQLRVFQLINAYRFRGHQHAKLDPLGIMEREQVPDLDLRYHELSEADMDSVFQTGSLFMGKEEATLSEIRDALEETYCQSIGAEFMHIVDTAEKRWFQQRIESVRAKPDYGEEAKTHLLERLTAAEGLEKFLGSKYPGVKRFGLEGGETLIPLMDELIQRVGTYGAKEVVIGMAHRGRLNVLVNTLGKAPGDLFDEFDGKATFDHSGDVKYHQGFSSNVLTPGGEVHLALAFNPSHLEIVSPVVEGSVRARQDRRNDPVGDTVVPVNIHGDSAFAGQGVVMETLQMSQTRGYKTGGTIHIVVNNQVGFTTSKREDVRSTEYCTDVAKMVQAPILHVNGDDPEAVLFVTQLAVDYRNEFKKDVVIDLVCYRRRGHNEADEPSATQPLMYSVIKKQPTTRTLYAKTLQDSGVVSEDHIKKMESDYRDALESGKHVVKSLVTKPNSQLFVDWSPYLGHDNSTTASTKFDLKRLQELANKAQEVPEGFQVQRQVNKILEDRRKMAAGAQPINWGFAETMAYATLLDEGYPIRLTGQDVGRGTFSHRHAVMHNQKDGSSYCSLQSLKEDQPTFTIHDSLLSEEAVLGFEYGYATTTPNMLVIWEAQFGDFANGAQVVMDQFISSGEHKWGRLCGLTQLLPHGYEGQGPEHSSARLERYLQLCAEHNMQVCVPTTPSQIFHLLRRQVIRPLRKPLVVMSPKSLLRHKQAVSTLEDLAEGEFQTILPETEELNPKDVTRLVFCSGKVYYDLVDRRRTEEMNNVAIIRIEQLYPFPEEELYAAISEYSNVKEVMWCQEEPMNQGAWYSSQHHMRRVTHRLNPNLYLDYAGRQPSAAPAAGYMALHLEQQEQLIKDALGL

SEQ ID NO: 6193 - DNA, 2826 bp, Vibrio sp. Ex25
  CDS (1)..(2826): transl_table=11
atgcacaacggcgtgatgaaggcatggctcgagtcttcacacttggctggcgccaatgcaacgtatgtagaggacctctacgaactgtatctaagtgatcccgatctggtaagtgaggagtggaaacgtgtttttgaaggcttacctaagccgtcagaagaagtggcagaacaaccacattcacgtgtccgtgactacttccgtcgactcgctagagaaacaaagcattacaatgtccaagttagtgacccagatgtcgatgcaaaacaagtaaaagttctacagctaatcaacgcataccgtttccgcggacatgaagctgcagaattagacccactaggtctatggcaacgcccaaccgtggcggagttagaccctgcttttcataatcttaccgaagatgacttcgaagaaactttcaacgtaggttcttttgctgttgggcaagaaaccatgaagttgaaagacatctatgaagccctcaacaaaacttactgcggttccatcggtgctgaatacatgcacatgactgacacagagcaaaaacgttggatccaacaacgtcttgagtctgtcgtaggccagccatcattcaacaaagatgagaagcgcacattcctagaagagctaacagccgctgaaggtttggagcgttacctcggagcgaaattcccaggtgcaaaacgtttctctctagaaggtggtgacgcactgattccgatgacgaaagagttgatccgtcacgcgggaacaagtgggatgcgtgaagtggttatcggtatggctcaccgtggtcgtttgaacatgctggtgaacgtgcttggtaagaagcctcaagatctattcgatgagtttgccggtaaacacgacgaaacttggggcaccggtgatgtgaaatatcaccaaggtttctctgccgactttgccaccccaggtggtgatgttcacttagctcttgcatttaacccatcgcatctagaaatcgtcaacccagtagtcatggggtcggtgcgagcacgtcaagatcgcttgggtgataatcaaggtagcaaagtgcttcctatcactatccacggtgactctgcaatcgctggtcagggtgtggttgccgaaacgttcaacatgtcactggctcgtggtttccaagtcggtggtacggtgcgtatcgttattaacaaccaagttggttttacgacgtctaaccctcgtgacacgcgttcaacgatgtactgtacagatatcgcgaagatggttcaggcgccaatcttccatgtgaatgccgatgacccagaagcggttgcttttgttactcgtattgctttggattaccgcaacgagttcaagcgcgatgtcgtgattgatttggtgtgttaccgtcgccatggtcacaacgaggccgatgagccaaacgcgactcagcctttgatgtaccaaaaaatcaaaaaacaccctacaccacgcaaattgtatgcggatattctgatcgataaaaacgaatcagatatcgagacagcgactcagttagtcaatgagtatcgcgatgcattagatcgcggtgaagtggtggttaaagaatggcgtccaatggcgttgcactctgtagactggtccccttacttagggcacgaatgggatatggagtgggattcaaaatacgacaagacacgccttattgagctaggtaatcgtctgtgtcagtacccagaaagccataaactgcaaagccgtgttaataagctttataacgatcgcctagcaatgatgaccggtgaaaaagcaatcgactggggtatggcagaaactctcgcgtatgcaacattagttgatgatggtaagcgtattcgcctttctggtcaggattcgggtcgtggtactttcttccaccgtcactcggttcttcataaccaaacagatgcaagtacgtacattccattagcgaatattcatgacaatcagggtccattccaagtgtttgactcagtactgtcagaagaagcggtactggcatttgaatacggttacgcaacagcagagccaggtggtttgactatttgggaagcgcagtttggtgactttgccaacggcgcgcaggttgtgattgaccaattcatctcgtcaggtgagcagaaatgggcacgcttgtgtggtctcacaatgcttctacctcacggttacgaaggtcaaggcccagagcactcctctgcacgtctagagcgttaccttcagttgtgtgctgagcaaaatatgcaggttgtagttccttcaacaccggctcaggtataccacatgattcgtcgtcaagttgtacgcccaatgcgtcgacctctgattgtgatgtcgccaaaatctttgctgcgccatcctctatgtacttcgacaattgaagacttagcggacggtacattccaatctgcaattccagaagtagatgatttagacccaagcaaagtaaaacgcgtcgtgttctgttcaggtaaggtttattttgacctactggagcagcgccgtaacaacgagcaagacgatgttgctatcgtgcgtatcgagcagctttatccattcccgatggaagaagtacaaacagcgattgctcaatacactaacgttgaagacttcgtgtggtgtcaggaagagcctcagaaccaaggtgcttggtactgtagccaacacaacttccgtgccgctattcctgcaggtgcagatcttaaatacgcaggtcgcccagcttctgcttcgccagcagttggctacatgtcggtgcacttgaaacaacaaaaagcgttggttgaagacgctctgaacgtgaactcaaaaacttcgaattaa

SEQ ID NO: 6194 - protein, 941 aa, Vibrio sp. Ex25
MHNGVMKAWLESSHLAGANATYVEDLYELYLSDPDLVSEEWKRVFEGLPKPSEEVAEQPHSRVRDYFRRLARETKHYNVQVSDPDVDAKQVKVLQLINAYRFRGHEAAELDPLGLWQRPTVAELDPAFHNLTEDDFEETFNVGSFAVGQETMKLKDIYEALNKTYCGSIGAEYMHMTDTEQKRWIQQRLESVVGQPSFNKDEKRTFLEELTAAEGLERYLGAKFPGAKRFSLEGGDALIPMTKELIRHAGTSGMREVVIGMAHRGRLNMLVNVLGKKPQDLFDEFAGKHDETWGTGDVKYHQGFSADFATPGGDVHLALAFNPSHLEIVNPVVMGSVRARQDRLGDNQGSKVLPITIHGDSAIAGQGVVAETFNMSLARGFQVGGTVRIVINNQVGFTTSNPRDTRSTMYCTDIAKMVQAPIFHVNADDPEAVAFVTRIALDYRNEFKRDVVIDLVCYRRHGHNEADEPNATQPLMYQKIKKHPTPRKLYADILIDKNESDIETATQLVNEYRDALDRGEVVVKEWRPMALHSVDWSPYLGHEWDMEWDSKYDKTRLIELGNRLCQYPESHKLQSRVNKLYNDRLAMMTGEKAIDWGMAETLAYATLVDDGKRIRLSGQDSGRGTFFHRHSVLHNQTDASTYIPLANIHDNQGPFQVFDSVLSEEAVLAFEYGYATAEPGGLTIWEAQFGDFANGAQVVIDQFISSGEQKWARLCGLTMLLPHGYEGQGPEHSSARLERYLQLCAEQNMQVVVPSTPAQVYHMIRRQVVRPMRRPLIVMSPKSLLRHPLCTSTIEDLADGTFQSAIPEVDDLDPSKVKRVVFCSGKVYFDLLEQRRNNEQDDVAIVRIEQLYPFPMEEVQTAIAQYTNVEDFVWCQEEPQNQGAWYCSQHNFRAAIPAGADLKYAGRPASASPAVGYMSVHLKQQKALVEDALNVNSKTSN

SEQ ID NO: 6195 - DNA, 2820 bp, Alteromonadales bacterium TW-7
  CDS (1)..(2820): transl_table=11
atgcacgaaggtgtgatgaaggcatggttagaatcttcacatttaaacggcggtaacgttgcttatgtagaagagctttatgaagcgtatttagatgatgcgacttctgtgccagatgaatggcgagaagtgttcgaacaattaccaaaagttaatggtgtggatgttgaagttaagcattcagaagttcgtgcacagtttgcacagcttgcaaaaaacaagcatagagaagtagtggtagcagagggtagcggcggtgaccttaaacaggttaaagtcctgcaacttattaatgctttccgttttcgtggacaccaaaatgcaaacctagatccattaggtatttgggagcgagagcgtgttcgagatttagagctagattaccacgacttgtcagaagctgattttgagcgagagtttaatgtagggtcttttgcagttggttcagactctatgcctttaggtgaattataccaagcacttaaaactacatattgtggttctatcggtgcagagtatatgcacatcacatctacagaagaaaagcgttggttacaacaacgtttagaatctgttcaatctaggcctaaattcgaaaaagaagaaaagctacgtatcctcaaggggttaactgcagctgatggtcttgaaaaatatttgggtgctaagttccctggtgcaaaacggttctcactagaaggtggggatgcattagtacctatgcttaaagagctaattcaccgagctggtgaaagtggccaacaagaagccgtaattggtatggctcaccgcggacgcttgaacgttttagtgaacgttttaggtaaaaatccatcagagctttttgatgaattcgctggcaagcataaagatacattaagttctggtgatgttaaataccacatgggttattcatcggactttgccactaagggcggcaacgttcatatggcacttgcttttaatccttctcaccttgagatagtaaaccctgtagttatgggttctgtacgcgctcgtttagatcgtctaggtgatactacgggaataaaagcattaccgatcacaattcatggtgattctgctgtaacaggtcaaggtgtagtacaagaaacgtttaacttgtctcaaactaatgcgtttagttgtggtggcagtattcgaattgttgttaataaccaagttggttttactacttctaaacaagatgatgttcgttctacagattactgtactgatatcgccaaaatggttcagtcaccaattttccacgttaactctgatgatcctgaagcggttgcatttgttacacaaatagcacttgattttagaaacaaatttaagcgtgacgtagttattgacttagtttgttatcgtcgacatggccacaatgaagctgatgagccaaatgctactcagcctttgatgtaccaaaaaatcaaaaaacacccagttccgcgccttatttatgcagatcaactaatcgctgaaggctctttttcagaacaagaaattaaagcacttgccgatgaataccgtaatgggttagatgacggtaattgcgttgtatctgaaattcaaccagaaacctctcattcttcagattgggctaaatacgtgggccacgattgggatgttgattacgacgcaagtgtttcggttgaaaagctcaaagaacttggcgaaaaggtagcgaactaccctgaagaatataaagctcagtcgcgcgttaaaaagatttacgatgatcgtaagttaatggccactggtgaaaaaccgcttgattggggaatggcagaaacacttgcttatgcaactatcgcaaccgaaggcactgacattagaatgacaggccaagattctggtcgcggtaccttcttccatagacatgcagttgttcacagtcaaaaagatggtgcgacttatcttcctttacaacacttaagtgaagatcaaggcgctttccaagttttcgactctgtactgtctgaagaagcagtagttgcatttgagtatggttatgcgactgccgaaccaacttctcttgtgctttgggaagctcagtttggtgactttgcaaatggtgcgcaagttgtatttgaccaatttttgagttcaggtgagcaaaagtggggtcgcttatgtggtcttactattttgttaccacacggttatgaaggccaaggtccagagcatagctctgcacgtttagagcgttttttacagctttgtgctgatcacaacatgcaagtttgtgttccgtctacacctgcgcaagtatatgcaatgttacgacgtcagtcagtaagacctttacgtcgtccattgattgttatgacgcctaaatcgttactacgtcatcctcttgcagtttcatcacttgaagaactttcaaacggtgtattccataatatgatcgacgaagttgatgatattaaacctgagaacgttgaacgcgttgttttctgtagtggtaaagtttattacgagttactacaagagcgtcgtaagctggaacaaaataatattgctatcgttcgtgtagagcaattatacccgttcccacatgacgaaatgaaaactattatggaacgttaccaacacgttactgattttgtatggtgtcaagaagagccacaaaaccaaggtgcatggtactgttctcaacaccattttgttgacgcaattccacaaggtgctcagttgaaatacgctgggcgtaaagcatctgcatcaccagcgtgtggttacatgtcagtacatactaaagaacaacaagcgctcgttgctgacgcgcttactatagaaaataaaggataa

SEQ ID NO: 6196 - protein, 939 aa, Alteromonadales bacterium TW-7
MHEGVMKAWLESSHLNGGNVAYVEELYEAYLDDATSVPDEWREVFEQLPKVNGVDVEVKHSEVRAQFAQLAKNKHREVVVAEGSGGDLKQVKVLQLINAFRFRGHQNANLDPLGIWERERVRDLELDYHDLSEADFEREFNVGSFAVGSDSMPLGELYQALKTTYCGSIGAEYMHITSTEEKRWLQQRLESVQSRPKFEKEEKLRILKGLTAADGLEKYLGAKFPGAKRFSLEGGDALVPMLKELIHRAGESGQQEAVIGMAHRGRLNVLVNVLGKNPSELFDEFAGKHKDTLSSGDVKYHMGYSSDFATKGGNVHMALAFNPSHLEIVNPVVMGSVRARLDRLGDTTGIKALPITIHGDSAVTGQGVVQETFNLSQTNAFSCGGSIRIVVNNQVGFTTSKQDDVRSTDYCTDIAKMVQSPIFHVNSDDPEAVAFVTQIALDFRNKFKRDVVIDLVCYRRHGHNEADEPNATQPLMYQKIKKHPVPRLIYADQLIAEGSFSEQEIKALADEYRNGLDDGNCVVSEIQPETSHSSDWAKYVGHDWDVDYDASVSVEKLKELGEKVANYPEEYKAQSRVKKIYDDRKLMATGEKPLDWGMAETLAYATIATEGTDIRMTGQDSGRGTFFHRHAVVHSQKDGATYLPLQHLSEDQGAFQVFDSVLSEEAVVAFEYGYATAEPTSLVLWEAQFGDFANGAQVVFDQFLSSGEQKWGRLCGLTILLPHGYEGQGPEHSSARLERFLQLCADHNMQVCVPSTPAQVYAMLRRQSVRPLRRPLIVMTPKSLLRHPLAVSSLEELSNGVFHNMIDEVDDIKPENVERVVFCSGKVYYELLQERRKLEQNNIAIVRVEQLYPFPHDEMKTIMERYQHVTDFVWCQEEPQNQGAWYCSQHHFVDAIPQGAQLKYAGRKASASPACGYMSVHTKEQQALVADALTIENKG

SEQ ID NO: 6197 - DNA, 2901 bp, marine gamma proteobacterium HTCC2143
  CDS (1)..(2901): transl_table=11
gtggcaagtacacaggcattaactgatactggttttcttgttacggaggttaaaacaatgcaagaaagctctatggagttactgtggggtagctctcatatttcgggtggcaacgccgcctacgtagaagaactgtacgaagtttacctgcaagatcctaacgatgtgcctgaagagtggcgcacctacttcgaaaagctgccgcaagttaatggtagcggtcatcaagatgttcctcattcggccgttcgtgaacattttgctaagatagcaaaagtcaggactaagccactgtcggttcaaaacgatttgggcgtcagtgaacatgagcgcaagcaggttcgtgttattcagctgatcggtgccttccgccagcgcggccatcagcgcgcggatctcgatcccctaaaattgcatattcggccaccggtccccgacctcgatcttcattaccacaaactctctggtgcagattttgatacgctgtttcagacaggcagtttatttatcggcaaagatcgagtcaccttgcgggagatcgtcgatacactggaacaaacctatagcgcctcaataggtgcagaatttatgcatattgtcgcgactgaagagcggcagtggattcagcaacgtttggaaagcgtgcgatcaaagcctgtatacggtgatgatgtaaagaggcacttactagagcgactcacagctgccgagggcctcggtaaagtattggcgtccaaatatccaggggtaaagcgtttcggcttggaggggggtgagagcttgattccaatgatggattcgatgatccagcgcattggctcctatgaagcgaaagaaatagttatcagcatggcccatcgcggtcgacttaatgtactcgttaacgtgttgggcaagaatccggcagagttgttcgcggaatttgaggggcgtgctgaataccacggctcagcggatgttaaatatcaccagggtttttcttctacggttgaaacacccggtggcgaagtccatttagcgctggcttttaatccatctcatctggaaatcggtgcaccggtggttgaaggctcagtgagggctcgtcaagatcggcgtaaagattctgagggcaagaaggttgtgcctattatattgcatggtgatgcagcctttgccggtcaaggcgtggtgatggaaacattccaaatgtcgcaaactcgggcctataagaccggaggtactatccatgttgtgattaacaatcaggtgggttttaccaccagcgagcgagaggatgcacgttccacggaatactgtactgacgttgcgaaaatggttcaagcaccaatatttcatgtcaacggggatgatcccgaggctgtactcttggtcagtcagatggctgtcgattatcgccagcaattcaataaagatgttgtcattgatttgatttgttaccgacgccgagggcacaacgaggcagatgaaccttttggtacccagccattgatgtatcagaaaattaaagtacaacgaaccacgcgagatttgtacgctgacaaacttattgccgaaggcgtggtgaataaagctgatgacgatgagttgatagaaagttatagaagcgctctggagagcggggaacatgtcgctaaaagtttagttcacgagccgaatgagaagctgtttgtcgactggtctccctatcttggccatgattgggattgttcctgcgatacgagtattgacctgaaaaaaatgcaggaactagcggcgaaaactaatgaagttccggaagggtttccaattcagcggcaagtggcaaagatttacgaagatcggcataaaatgacagcgggtgctacgccaatcaattggggttatgcggaaacattggcctatgcaagcctgcttgatgccgggtatccagtacgtcttactggtcaagacgtgggccgtggtacgttttctcatcgtcacgcggtgttgcataatcagagtgatggcagtgtccatgtgccattacaaaacatggctgaagaacaaccggtctttaccattcacgactcgctgttgtcagaagaagctgttttggcatttgaatatgggtattcgacgacgttaccgaacgtgctggttgtgtgggaggcgcagttcggcgattttgccaatggagcgcaagtcgttattgaccaatttattgccagtggcgagcataaatggcaacgtttgtgtggtttgacaatgttactacctcatggctatgaaggtcaggggccagagcattcgtccgctaggctcgagcgatatttacaattatgtgcggaacacaatatgcaagtgtgtgtaccgacaactccggcgcaagtgtttcacatgttgcgacggcaggcgcttcgacctttgcgtaagccgttaattgttatgtctccgaaaagtttgttacgtcataaagaagcaatttcaacccttgaggaattggcggataaccaatttcacaatgtgctcggagagactgatgatctcgatcccgaaaagataacgcgagttgtgctatgcagtgggaaagtttattacgatcttcgcgagcgtcgccgtgatcgagaaatgtcccatgtggcgattattcgattggagcagttatacccgtttcccgagacggaactgcaagaggctctggcggcatataatggaatagcggaagtagtctggtgtcaggaagaaccgatgaatcagggagcctggtatgccagtcagcatcacatgcgacgggtaattaatagacataacccagtgctttacctcgactacgcggggcgtgatgcatcggcatcgcctgctgcaggttacatggcgctgcatgttgcgcaacaacaacaagtgattgctagtgcattgggctttagcgacggcgaataa

SEQ ID NO: 6198 - protein, 966 aa, marine gamma proteobacterium HTCC2143
MASTQALTDTGFLVTEVKTMQESSMELLWGSSHISGGNAAYVEELYEVYLQDPNDVPEEWRTYFEKLPQVNGSGHQDVPHSAVREHFAKIAKVRTKPLSVQNDLGVSEHERKQVRVIQLIGAFRQRGHQRADLDPLKLHIRPPVPDLDLHYHKLSGADFDTLFQTGSLFIGKDRVTLREIVDTLEQTYSASIGAEFMHIVATEERQWIQQRLESVRSKPVYGDDVKRHLLERLTAAEGLGKVLASKYPGVKRFGLEGGESLIPMMDSMIQRIGSYEAKEIVISMAHRGRLNVLVNVLGKNPAELFAEFEGRAEYHGSADVKYHQGFSSTVETPGGEVHLALAFNPSHLEIGAPVVEGSVRARQDRRKDSEGKKVVPIILHGDAAFAGQGVVMETFQMSQTRAYKTGGTIHVVINNQVGFTTSEREDARSTEYCTDVAKMVQAPIFHVNGDDPEAVLLVSQMAVDYRQQFNKDVVIDLICYRRRGHNEADEPFGTQPLMYQKIKVQRTTRDLYADKLIAEGVVNKADDDELIESYRSALESGEHVAKSLVHEPNEKLFVDWSPYLGHDWDCSCDTSIDLKKMQELAAKTNEVPEGFPIQRQVAKIYEDRHKMTAGATPINWGYAETLAYASLLDAGYPVRLTGQDVGRGTFSHRHAVLHNQSDGSVHVPLQNMAEEQPVFTIHDSLLSEEAVLAFEYGYSTTLPNVLVVWEAQFGDFANGAQVVIDQFIASGEHKWQRLCGLTMLLPHGYEGQGPEHSSARLERYLQLCAEHNMQVCVPTTPAQVFHMLRRQALRPLRKPLIVMSPKSLLRHKEAISTLEELADNQFHNVLGETDDLDPEKITRVVLCSGKVYYDLRERRRDREMSHVAIIRLEQLYPFPETELQEALAAYNGIAEVVWCQEEPMNQGAWYASQHHMRRVINRHNPVLYLDYAGRDASASPAAGYMALHVAQQQQVIASALGFSDGE

SEQ ID NO: 6199 - DNA, 2880 bp, marine gamma proteobacterium HTCC2080
  CDS (1)..(2880): transl_table=11
atggagtcagacatggcacaaccctctgccttgcagggaatgctggagttatgggggtcttctcatatctcaggttcaaatgcggcctatgtcgaaggcttatatgagcaatacctcacagacccaaatgccatagcgcctgaatggcgtgattacttcgataaactccctaaagttaataccgacaacacggcttttcgagacgtgccccactcagtggttagggagcagtttgcgaagatcagtaagatgcgtgtgcgaaccgaagctaccgtcgcccatgattcccaggcaacagagtatgagcgcaagcaggttcgcgttgtccagctgatatcagcctatcgtcagcgtggacaccagcaggcctctttggatccactagacatttatcctcgagaagccattccagatctcgatctggcctttcatcagttaagtgaggcagatgccgacacagtttttcaggtaggcagtttgtactacggtgctagcgatgcaacgctgcgtgacattgttgatgcactccagcgtacttattgcaacacgatcggcgccgagttcatgcatattgtggataccgaacagcgccattggattatgagccggatggaatctgtccgatctgctcccgaattctctcgggatcagcgattacaagtgctgcgacgtctgattaaagccgaagggcttgaaaagtctctaggctcaaaatatccaggcaccaaacgtttcggtttagagggtggggaaagcctaatccccatgatgtccgaagcgatagagcgggtcggtggttatggtgcgaaggaaattgttattggtatggcgcaccgtgggcgcttaaacgttctgatcaatattttagggaagaaccccactgagctattcgacgagtttgaggggagagcggaatacagtggctcaggggatgtcaaatatcaccaaggcttttcctcaaacgtaatgacgagtggcggtgaggttcacctcgctttagcctttaatccctcgcatttggagatcgtgtcaccagttgtcgaaggctctgttcgagcacggcaggatcgtcgcgaggatcctgcgggcgattcagtagtaccgattgtaattcatggcgatgctgcatttgctgggcagggcgttgttatggaaacgttccagatgtctcagacccggggttataaaaccggtgggacgctgcatattgttctaaacaatcaggtgggctttaccactagtcagcgtattgatgcccgttctactgagtactgcaccgatgtcgctaagatggttcaggcccccattttccatgtcaatgctgatgatccagaagctgtcgtttttgtcacgcagctcgcggttgacttcagaaatacgtttaaacgcgatgtcgttgttgatcttatctgttatcggcgtcgaggccacaacgaggcagatgaacctgccgttacccagccgcaaatgtatgcagcgatcaagaagcacgccactacccgcgacctttatgcgaagcggctcattgccgacggtattctgaccgaggatgaggacgttacgctcatggctcgctatcgtgagtcccttgagcggggagagccgctcgtgagctccttggttatggagcccaataacgcattgtttgtcgattggggaccttatgtgggtcatgaatggactgttgagtgcgatacgcgctaccccttaggacagctgaagactctttccgagcaaatcgcgagtgtgccagaagggttcgcggttcagcggcaggttacgaagttgctggaagatcggcgcaagatgggcgtaggcgctcaggaaattaactggggcttcgccgaaatcatggcatacgcgacgcttttggtagagggttttcccgtgcgaatgaccggccaagatattggtcgaggtactttttcacatcgccatgccgtcattcacaatcagaaagaagaggggcgccatattgctcttcagcacctcgatggcaatcaagctgacttccgtatttatgactcgctgctgtctgaggaggcggtgctagcctttgaatacggttatgcgacgacatcccccactggcttagtgatttgggaagcccagtttggagattttgccaacggcgcccaggtggttatcgatcagtttattgcaagcggtgagcataagtggtcccgtgtttgtggcttgaccatgttgcttcctcacggctatgaggggcaaggccctgaacattcatccgcgcgacttgagcggtatttgcaaatgtgcgctgagcaaaatatgcaggtctgtatgccgactactccagcgcaggttttccatatgttgcgtcgacaggcaattaggccgttgcgaaagccattaatagtaatgtcgcccaaaagtttactccgccataaagaggcgacttcaaccttagaagagctcgctgacgggagttttcaaacggtaatcgatgaaaccgataatctggatccggcctcaatcagacgcgtcctcctctgttctggaaaagtattttacgacctgcgtgcggcacggcgtgagcggcaaattgacaatattgtcattatacgtatcgagcagctctatccgtttcctgaagaagatttggctcgggtaattgctccctatacaaatattgaggatgcgatctggtgtcaggaggagcccatgaatcagggcgcttggtatgccagtcagcacaatatgcgccgggtaattcagcgtcataaggtcgatgtttatttgcgttacgccggtagagagccctcagcctcggtagcggcgggctatacggcattacatatccaacagcaggaaagtttcataaacgaagccctcggcccaatgccctggggtaattga

SEQ ID NO: 6200 - protein, 959 aa, marine gamma proteobacterium HTCC2080
MESDMAQPSALQGMLELWGSSHISGSNAAYVEGLYEQYLTDPNAIAPEWRDYFDKLPKVNTDNTAFRDVPHSVVREQFAKISKMRVRTEATVAHDSQATEYERKQVRVVQLISAYRQRGHQQASLDPLDIYPREAIPDLDLAFHQLSEADADTVFQVGSLYYGASDATLRDIVDALQRTYCNTIGAEFMHIVDTEQRHWIMSRMESVRSAPEFSRDQRLQVLRRLIKAEGLEKSLGSKYPGTKRFGLEGGESLIPMMSEAIERVGGYGAKEIVIGMAHRGRLNVLINILGKNPTELFDEFEGRAEYSGSGDVKYHQGFSSNVMTSGGEVHLALAFNPSHLEIVSPVVEGSVRARQDRREDPAGDSVVPIVIHGDAAFAGQGVVMETFQMSQTRGYKTGGTLHIVLNNQVGFTTSQRIDARSTEYCTDVAKMVQAPIFHVNADDPEAVVFVTQLAVDFRNTFKRDVVVDLICYRRRGHNEADEPAVTQPQMYAAIKKHATTRDLYAKRLIADGILTEDEDVTLMARYRESLERGEPLVSSLVMEPNNALFVDWGPYVGHEWTVECDTRYPLGQLKTLSEQIASVPEGFAVQRQVTKLLEDRRKMGVGAQEINWGFAEIMAYATLLVEGFPVRMTGQDIGRGTFSHRHAVIHNQKEEGRHIALQHLDGNQADFRIYDSLLSEEAVLAFEYGYATTSPTGLVIWEAQFGDFANGAQVVIDQFIASGEHKWSRVCGLTMLLPHGYEGQGPEHSSARLERYLQMCAEQNMQVCMPTTPAQVFHMLRRQAIRPLRKPLIVMSPKSLLRHKEATSTLEELADGSFQTVIDETDNLDPASIRRVLLCSGKVFYDLRAARRERQIDNIVIIRIEQLYPFPEEDLARVIAPYTNIEDAIWCQEEPMNQGAWYASQHNMRRVIQRHKVDVYLRYAGREPSASVAAGYTALHIQQQESFINEALGPMPWGN

SEQ ID NO: 6201 - DNA, 2832 bp, Pseudomonas putida GB-1
  CDS (1)..(2832): transl_table=11
atgcaagaaagcgtgatgcagcgcatgtgggatagcgcccacctttcaggtggtaacgctgcatatgtggaagagctctacgaactctacctgcacgaccctaacgctgtgccagaagagtggcgcacttacttccagaagttgccagccgacggcagcaccgctaccgatgtatcgcactcgacaatccgcgaccatttcgtactgctggcaaagaaccagcgccgcgcccaaccggtttccgccgggagcgtgagcagtgaacacgagaagaagcaggttgaagttctgcgactgatccaggcctatcgtatgcgcggccatcaggctgccaagctcgacccgttggggttgtggcagcgccctgcgcccgtagacctgtcgatcaatcactacggcttgaccaatgccgatcttgatacgaccttccgtgccggcgacctgttcatcggcaaagaggaggcgagcctacgcgacatcttcgatgcactccagaagacatattgtcgcaccattggcgccgaattcacccacatcgtcgattccgagcagcgcagctggttccagcagcgcctggaaagcgtgcgcggccgtccggagttttccgctgacgtgcaggcccacctgctcgagcgcgtgaccgccggtgagggcctggaaaaatacctgggcaccaagtacccgggcaccaagcgcttcggccttgaaggtggcgagagcctgatcccgatgctggatgaaatgatccagcgttccggctcctacgggaccaaggaagtcgtgatcggcatggctcaccgtggccgcctgaacgtcctggtgaacaccttcggcaagaacccgcgcgagctgttcgacgagttcgaaggcaagaagatgaacgagctgggctccggtgacgtgaagtatcaccagggcttctcctcgaacgtgatgaccaccggtggcgaagttcacctggccatggcgttcaacccgtcccacctggaaatcgtttcgcctgtggtcgaaggttcggtgcgcgcccgtcaggatcgccgcaacgacaccgttggcgacaaggtgctgccgatctcgatccacggcgacgcagcattcgccggccagggcgtggtcatggaaaccttccagatgtcgcagacccgcggtttcaagaccggcggcaccgtgcacatcgtgatcaacaaccaggttggcttcaccatcagcaacccgctggacgcgcgctccaccgagtacgccaccgacgttgccaagatgatccaggcgccgatcctgcacgtgaacggcgatgacccggaagcggtgctgttcgtcacccagctggccatcgactaccgcatgcagttcaagcgtgacgtggtcatcgacctggtctgctaccgtcgtcgcggccacaacgaggctgacgagccgaacggcacccagccgctgatgtaccagcagatcagcaagcagcgcaccactcgcgagctgtatgcagaagcgctgatccaggccggtcgcatcgatgccgagcgtgctcaggccaagatcgacgagtaccgcaacgccctggacaatggcctgcatgtagtgaagagcctggtcaaggaaccgaaccgcgagctgttcgtcgactggcgtccttacctgggccatgcctggaccgcgcgtcacgacacccgcttcgacctcaagaccctccaggacctgtcggccaagctgctcgagctgccagaaggtttcgtggtccagcgtcaggtatcgaagatctacgaagaccgtcagaagatgcaggccggtggcttgccgatcaactggggttatgcagagaccatggcctacgccaccctgcagttcgaaggtcacccgatccgcatgaccggccaggacatcggccgtggcaccttctcgcaccgtcacgcggtgctgcacaaccagaaggacgccagcacctacattccgctgcagaacctgttcccaggccagccacgtttcgacctgtacgattcgttcctgtccgaggaagcggtactggcgttcgaatacggctattccaccaccacgccgaacgcgttggtgatctgggaagcccagttcggcgacttcgccaacggtgcacaagtggtgatcgaccagttcatcaccagcggtgagcacaagtggggccgcctgtgcggtctgaccatgctgctgccacacggttatgaagggcagggcccggagcactcctccgcgcgtctggagcgttacctgcagctgtgcgccgagcacaacatccaggtctgcgtaccgaccaccccagcacagatctaccacctgctgcgtcgccaggtcatccgtccgctgcgcaagccgctggtggtcctgacgccgaagtcgctgctgcgccacaaactggccatctcgacgctggaagacctggcagaaggctcgttccagaccgtgatcccggaaatcgacgcaatcgatccggccaaggtcgagcgcctggtgctgtgcagcggcaaggtctactacgacctgctggaaaaacgccgtgccgaaggccgtgaagacatcgccatcctgcgtctcgagcagctgtacccgttcccggaggacgacctggtcgaaatcctggcgcaatacagcaacctcaagcacgccgtatggtgccaggaagagccgatgaaccagggcgcctggtacagcagtcagcatcacatgcgccgtatcctgggccgccacaacaaggcattggtcctggagtacgccggtcgcgacgcttctgccgcgccagcctgtggttacgcttcgaagcacgccgaacagcaggaaaaactgctgcaagacgccttcactgtctaa

SEQ ID NO: 6202 - protein, 943 aa, Pseudomonas putida GB-1
MQESVMQRMWDSAHLSGGNAAYVEELYELYLHDPNAVPEEWRTYFQKLPADGSTATDVSHSTIRDHFVLLAKNQRRAQPVSAGSVSSEHEKKQVEVLRLIQAYRMRGHQAAKLDPLGLWQRPAPVDLSINHYGLTNADLDTTFRAGDLFIGKEEASLRDIFDALQKTYCRTIGAEFTHIVDSEQRSWFQQRLESVRGRPEFSADVQAHLLERVTAGEGLEKYLGTKYPGTKRFGLEGGESLIPMLDEMIQRSGSYGTKEVVIGMAHRGRLNVLVNTFGKNPRELFDEFEGKKMNELGSGDVKYHQGFSSNVMTTGGEVHLAMAFNPSHLEIVSPVVEGSVRARQDRRNDTVGDKVLPISIHGDAAFAGQGVVMETFQMSQTRGFKTGGTVHIVINNQVGFTISNPLDARSTEYATDVAKMIQAPILHVNGDDPEAVLFVTQLAIDYRMQFKRDVVIDLVCYRRRGHNEADEPNGTQPLMYQQISKQRTTRELYAEALIQAGRIDAERAQAKIDEYRNALDNGLHVVKSLVKEPNRELFVDWRPYLGHAWTARHDTRFDLKTLQDLSAKLLELPEGFVVQRQVSKIYEDRQKMQAGGLPINWGYAETMAYATLQFEGHPIRMTGQDIGRGTFSHRHAVLHNQKDASTYIPLQNLFPGQPRFDLYDSFLSEEAVLAFEYGYSTTTPNALVIWEAQFGDFANGAQVVIDQFITSGEHKWGRLCGLTMLLPHGYEGQGPEHSSARLERYLQLCAEHNIQVCVPTTPAQIYHLLRRQVIRPLRKPLVVLTPKSLLRHKLAISTLEDLAEGSFQTVIPEIDAIDPAKVERLVLCSGKVYYDLLEKRRAEGREDIAILRLEQLYPFPEDDLVEILAQYSNLKHAVWCQEEPMNQGAWYSSQHHMRRILGRHNKALVLEYAGRDASAAPACGYASKHAEQQEKLLQDAFTV

SEQ ID NO: 6203 - DNA, 2838 bp, Marinobacter sp. ELB17
  CDS (1)..(2838): transl_table=11
atgcacgaaagcatcatggagcagttgtggcaaacttcccatctacagggaagtaatcttgcctacgttgaacagctttttgaaacctatctttcagaccctaacgccgttcctgaagagtggcgaagctacttcgacaagcttcccagtgtcgatggctatcagggcaaagatattgcccactccgcaatccgcgaacaatttaagcatatttccagcaatcagcgttttctggctagcaatactacgccagcaggtgccgtgcccgatgcggacaaaaagcagacacgcgtactgcaattgattaacgcataccgctttcgtggtcaccagcacgcgaagctggacccgctgaatgtcaaaccgcgtgaactggttgaagaccttgacccggcttttcatgagctttacaacgctgataacgacatcgagttccagactggctcgctgagtttcggttctgaaacgatgaagctaggcgacatcataaaaggcctgcaacagacttattgcaagagtattggtgcagaatacatgcacattgtggacactcgcatcaagcgttggttccaacaacgcatggagccgatccgctccaaccccggttttgatgccgacacccgtattcatttgcttgaacgcctgtcagcggcagagggcctggaaaaatatttgggttcacgctatcccggcgttaagcgttttggcctggaaggtgccgaaagcctgattccctgtcttgatgaaattatccagcgtgccggttccggtggcaccaaagaaatcgttctgggaatggcccaccgcggccgtttgaacgtgttggtcaatattttgggcaaaaatccgaaagaactgttcgacgagttcgaaggcaagaataaggcgggctcaggttctggtgatgttaagtatcaccaaggtttctcgtccaacgtgatgaccccgggtggtgagattcatctggccctggcttttaacccctcgcatctggaaatcgtgtccccagtagttgtgggctctgttcgcgctcgccaaacccgccgcgaagacaaagatggcaggcaggttttgccggtgattatgcacggcgatgctgcgtttgcgggccagggcgtggtgatggaaaccttccagatgtcacagacccgcggttttggtactggtggcaccgtacatattgtgatcaacaaccaagttggctttaccaccagcagacaagaagacgcccgttctaccgaatactgtacagatatcgccaaaatggttcaggctccaattctgcacgtgaacgcagacgacccggaagcagtgttgttcgtcactcggatggccatggactatcgcaacgaatttaaaggcgacgttgttattgacttggtgtgctaccgccgccgtggtcataacgaagccgacgagcctgccgcgactcagccgatgatgtacgagaaaattcgtaagctgaaaaccacgcgtaacatctatgtggacagtctgattgatgctggagtagtcagcgaagacttcgccaagcagatggaaaatgattaccgcacggttctggataagggggaacacgttgtaaaggcgctggttaaagaaccaaacgccaagttgcacgttgattggaccccgtatcttggccatgagtggacagccaagtgcaagtctagcgtgccactgaagaccattcagaagctgggtaaaaagctgagcgaagtgccagaaggtttcattattcagcgtcaagtgtctaaaatcgttaaggatcgggacaagatgacggccggtgctttgcctcttaattggggttacggcgagatcatggcctatgcaacattgttaaacgaaggttatccgattcgtataacaggacaggatgttagtcgcggcactttctcccaccgtcacgccgttctgcataaccagaaagatggcgctacgcacattgcgctgactcatctgtctgacgatcagcccaagttcgagctttacgattctctgctatccgaagaggccgcactggctttcgaatacggctatgcgaccacatcgccgagctcgctggttgtctgggaagcgcagtttggcgactttgccaacggtgcccaggttgtgattgatcagttcctgaccagtggtgagcacaagtggggacgtctgtgcggccttaccatgttattgccgcacggttatgaagggcagggtccagaacatagttcggcgcgtatcgagcgcttcttgcagctgagcgcggaacagaatatccaagtatgtgtgcccacaacgccttcgcaagtattccacatgctgcgccgacaggtgaaacgcccggttcgtaagccattgattgccattacgccaaagagcctgctgcgccataaagaagctatttctagcctggacgatctgacttcaggtacgttccagaccgtgctgcccgaaaaagagccgtctgatgcaaaaaaaatcactcgggttattctttgcagcggtaaggtctattatgagttgctggagaagaagaaaaccagcgagcgtaacgacacggccattattcgtatagaacagctgtatccgttcccgggtgaagatctggatgaattactggcggaattcagcaagctcaagcacgctgtctggtgccaggaagaacctatgaaccagggcgcttggtatagcagccagcaccatatgcgcaacgcgctgcaacggctgaaccctaaactgcacctcgaatatgcgggtcgtgacgcctcggctgcacctgctgccggccacatgtctgtgcacatcgaacagcagaaaaaattggttaacgacgcatttgaagtctga

SEQ ID NO: 6204 - protein, 945 aa, Marinobacter sp. ELB17
MHESIMEQLWQTSHLQGSNLAYVEQLFETYLSDPNAVPEEWRSYFDKLPSVDGYQGKDIAHSAIREQFKHISSNQRFLASNTTPAGAVPDADKKQTRVLQLINAYRFRGHQHAKLDPLNVKPRELVEDLDPAFHELYNADNDIEFQTGSLSFGSETMKLGDIIKGLQQTYCKSIGAEYMHIVDTRIKRWFQQRMEPIRSNPGFDADTRIHLLERLSAAEGLEKYLGSRYPGVKRFGLEGAESLIPCLDEIIQRAGSGGTKEIVLGMAHRGRLNVLVNILGKNPKELFDEFEGKNKAGSGSGDVKYHQGFSSNVMTPGGEIHLALAFNPSHLEIVSPVVVGSVRARQTRREDKDGRQVLPVIMHGDAAFAGQGVVMETFQMSQTRGFGTGGTVHIVINNQVGFTTSRQEDARSTEYCTDIAKMVQAPILHVNADDPEAVLFVTRMAMDYRNEFKGDVVIDLVCYRRRGHNEADEPAATQPMMYEKIRKLKTTRNIYVDSLIDAGVVSEDFAKQMENDYRTVLDKGEHVVKALVKEPNAKLHVDWTPYLGHEWTAKCKSSVPLKTIQKLGKKLSEVPEGFIIQRQVSKIVKDRDKMTAGALPLNWGYGEIMAYATLLNEGYPIRITGQDVSRGTFSHRHAVLHNQKDGATHIALTHLSDDQPKFELYDSLLSEEAALAFEYGYATTSPSSLVVWEAQFGDFANGAQVVIDQFLTSGEHKWGRLCGLTMLLPHGYEGQGPEHSSARIERFLQLSAEQNIQVCVPTTPSQVFHMLRRQVKRPVRKPLIAITPKSLLRHKEAISSLDDLTSGTFQTVLPEKEPSDAKKITRVILCSGKVYYELLEKKKTSERNDTAIIRIEQLYPFPGEDLDELLAEFSKLKHAVWCQEEPMNQGAWYSSQHHMRNALQRLNPKLHLEYAGRDASAAPAAGHMSVHIEQQKKLVNDAFEV

SEQ ID NO: 6205 - DNA, 2814 bp, Moritella sp. PE36
  CDS (1)..(2814): transl_table=11
atgcagaataacgtcatgaaagcctggttagaatcctctcatctagccggtgcgaaccagacatacattgaagatctatatgagcaatttttggcagatccagattcagttagcgaagaatggcaaactgtatttttagagctacctaaagttgataatactaaagaagttccacatggtcctgtaaaggattatttcattcgcctggcgaaagatacctctcgatatgctgctcaagtaagcgacccacataatgatgcgaaacaggttaaagtattacagttaatcaatgcttttcgttttcgaggtcatcaacatgctaacttagatccattaggtctttggaaacgtgatcgtgtacaagatctagacccggcatatcacaatctttctgatgctgattttgatgccagttttaatgttggttcatatgcaattggccaagaaagcatgaaacttagtgcgctttatacttcgttacaaaaaacctattgtggttcaattgcagctgagtatatgcatattgtttctactgaagaaaaacgttggatccaaagccgtttagaatcagttgaaagcacgcctgagtttgaaaaagaagataaattacgatttttagataacttaaccgcggctgaaggtctggaaaaataccttggtgctaagttccctggtgcaaaacgtttctcgcttgagggcggtgatgcactgattccaatgatgaaagaattaattcgtcgtagtggtgaacaaggtatcaaagaaaccgttattggtatggcgcatcgcggcagactgaatatgctggtgaatgtacttggtaaaaaaccaaatgacctgtttgatgaatttgctggtaaacacggtgacgcatggggtgcgggtgatgttaaatatcatcagggcttcagttctgatttcagtacgccaggcggtaatgtacatttagcacttgcttttaatccatcgcatttagaaattgttaacccagtagtcatgggctctgttcgtgcacgtcaagaacgttatggtagcactaacggtgatgatgtactggcaattacaattcatggtgattctgcaattactggccaaggtgttgttgctgagacattcaatatgtcgcaaacacgagcttatggcattggtggtacaattcgaattgttgtcaataaccaagttggttttacaacatcaaacccgaaagatatgcgttctacagaatactgtacggatatcgcaaaaatggttcaggcccccatcttccatgttaatgcagatgaccctgaagctgttgtattggtaacacaaatcgcacttgatttccgtaatacatttaagcgtgatgttgtgattgatttagtttgttatcgccgccatggccataatgaagctgatgaaccaagtgcaacacagccattaatgtataagaaaatcaaaaaacacccaacgccacgtaaaatatatgctgatcaacttgtaaatgaaggcgttattgatgctgctgaagcaacgggctatattaacgaatatcgtgatcaacttgatcatggtgaatgtgttgttaaagaatggcgcccaatgcaacagcactccgttgattggaacccatacttaaaacacgaatgggatatgccttatcaatcacaagttcctcaagataaattatctgaccttgcattgaaaatgacggcagtacctgaagggcacaagatccaatctcgtgttcaaaagatttattcagaccgtattttaatggcaaaaggtgagaaaccatgtgattggggttttgctgaaacgcttgcatatgcaacattacttgatgataactacaaagtccgtcttactggacaagatgtgggtcgtggtactttcttccatcgccatgcagtggtacataatcaagacgacgccagtacatacacgccattagctaatttaaaacctgaacaaggtgagctaactattcacgattcagtattgtctgaagccgcggtattagcgtttgaatatggttatgcgacgactgaaccaagtggtttaactatttgggaagcacagtttggtgatttcgccaatggcgcacaagttgtatttgatcaattcctttcttctggcgaacagaaatggggtcgtatgtgtggcttaacagtattgttaccacatggctatgaagggcaaggtcctgagcattcatctgcacgtttagaacgttatatgcaaatgtgtgctgagcacaactggcaagtgtgtgtacctagtacacctgcgcaggtttatcatatgctgcgtcgtcaaacagtacgcccaatgcgtcgtccattgatcgtgatgacacctaaatcgttattacgtcacccattagctatttctagtttatctgaattagccgatggcacgttccaaaacataattggtgaaattgatacgctcgattcagcacaagttaaacgtgttgtgatgtgtagtggtaaagtgtatttcgatttactagaaacacgtcgtaaagcgggtcagacggatgttgctattgtacgtattgagcagctttatcctttcccacatgcagaaattgcagctgtatttgcagagtatcaacacgtcgaccagtttgtttggtgtcaagaagaacctcagaatcagggtgcttggtattcaagtcagcataatttctggggcgcaatcccgcaaggggcgaagttaagttatgctggacgtgctgcatcagcatctcctgcagtcggttacatgtctgtacatacaaaacaacagttagcacttattgaagatgctttaactgttgcacagaaatag

SEQ ID NO: 6206 - protein, 937 aa, Moritella sp. PE36
MQNNVMKAWLESSHLAGANQTYIEDLYEQFLADPDSVSEEWQTVFLELPKVDNTKEVPHGPVKDYFIRLAKDTSRYAAQVSDPHNDAKQVKVLQLINAFRFRGHQHANLDPLGLWKRDRVQDLDPAYHNLSDADFDASFNVGSYAIGQESMKLSALYTSLQKTYCGSIAAEYMHIVSTEEKRWIQSRLESVESTPEFEKEDKLRFLDNLTAAEGLEKYLGAKFPGAKRFSLEGGDALIPMMKELIRRSGEQGIKETVIGMAHRGRLNMLVNVLGKKPNDLFDEFAGKHGDAWGAGDVKYHQGFSSDFSTPGGNVHLALAFNPSHLEIVNPVVMGSVRARQERYGSTNGDDVLAITIHGDSAITGQGVVAETFNMSQTRAYGIGGTIRIVVNNQVGFTTSNPKDMRSTEYCTDIAKMVQAPIFHVNADDPEAVVLVTQIALDFRNTFKRDVVIDLVCYRRHGHNEADEPSATQPLMYKKIKKHPTPRKIYADQLVNEGVIDAAEATGYINEYRDQLDHGECVVKEWRPMQQHSVDWNPYLKHEWDMPYQSQVPQDKLSDLALKMTAVPEGHKIQSRVQKIYSDRILMAKGEKPCDWGFAETLAYATLLDDNYKVRLTGQDVGRGTFFHRHAVVHNQDDASTYTPLANLKPEQGELTIHDSVLSEAAVLAFEYGYATTEPSGLTIWEAQFGDFANGAQVVFDQFLSSGEQKWGRMCGLTVLLPHGYEGQGPEHSSARLERYMQMCAEHNWQVCVPSTPAQVYHMLRRQTVRPMRRPLIVMTPKSLLRHPLAISSLSELADGTFQNIIGEIDTLDSAQVKRVVMCSGKVYFDLLETRRKAGQTDVAIVRIEQLYPFPHAEIAAVFAEYQHVDQFVWCQEEPQNQGAWYSSQHNFWGAIPQGAKLSYAGRAASASPAVGYMSVHTKQQLALIEDALTVAQK

SEQ ID NO: 6207 - DNA, 3129 bp, Oryza sativa subsp
  CDS (1)..(3129)
atggggtggtttcgggctgcgtccggattggctcgggtggcgctgaggaggaacctggcgcgtgctccggcgaacccttttgccggtcctgcgccacggtacttccactccacccgcccccggcggttcgccgctcctgtgccccgcgccgtgccgctctcgcgcctcaccgacagcttccttgatggcaccagcagcgtgtaccttgaggagctccagagggcgtgggaggctgatcccacctctgtcgacgagtcctgggacaatttctttcggaactttgtcgggcaggctgcaacttcgcctggcatatctgggcagacaattcaggaaagcatgaggttgctgcttcttgtgcgagcgtaccaggtgagtggtcacctgaaggctaagcttgatcctctcgcgctagaggagcggcctatccctgatgttctggaccctgcgttctatgggttctctgaggctgatctggaccgggagttttttcttggtgtgtggaggatggctgggttcttgtcggagaatcgccctgtgcagacactccgttctgtgttggagcggcttgagcaagcttactgtggtaccattgggtatgagtacatgcacatacctgacagggagaaatgtaattggctgagggataggattgagacggtcaatgcaagggagtactcctacgaccgtcgccaggtcatgcttgataggctcatgtggagcactcagtttgagagcttcttggcacagaaatggacgaccgccaagcggtttggtcttgaaggtgcggagacactgatccctggcatgaaggagatgtttgacagggcagctgatcttggtgtagagagcattgtgattggtatgccacacagaggtaggctgaatgtcttgggaaatgtcgtgaggaagcccttgcgacagatcttcagtgagtttagtggtggtaccaagcctgccgaagaaggggagggcttgtatacagggactggagatgtcaaataccatctaggaacttcatacgataggcctaccagaggtggaaagcatatccatctgtctctggttgcaaacccaagtcatttggaagcagtcgatcctgttgttgctgggaagaccagagcaaaacagtactattctaatgatcttgacaggaccaagaatttaggagtcttgttgcatggtgatggaagcttctcagggcagggtgtagtgtatgaaaccctgcatctcagtgctcttccaaactacactactggtgggacaattcacattgtggtcaataatcaggttgctttcactactgatccaagggcagggaggtcttcgcagtattgcacagatgttgctaaagcattggatgctccaattttccatgtgaatggtgatgacttggaggcagtggttcatgtctgtgagcttgctgcggagtggcggcaaacatttcattctgatgttgtggtggatattgtatgctaccgccggtttgggcataacgagattgatgagccttccttcacccagcctaaaatgtacaagataattaggaaccaccagagtgctcttgagatataccaaaacagacttttagaatctgggaagatatccaaggaagatattgataagatgcagaagaaggtcagcactatcttgaatgatgaattccaaaacagcaaagaatatattcccaataagagagactggctctcagcttactggactggattcaagtcaccagaacagatttcacgaatccgaaatactggtgtcaagccagagattctaaaacgtgttggagaagccatgactactctgcctgaaaatttcaagccccacagggctgtcaaaaagatttttgagctgcgtcgtcagatgattgagacgggcgaaggcattgattgggctgttggtgaagcacttgcttttgcaactcttataattgagggaaaccatgttaggttaagtggtcaggatgttgagaggggtacattcagccaccgccatgctgttatccatgaccaggaaactggagagcaatactgtccgcttgataatcttgttatgaatcaagatgaggaactatttactgttcgacttgttagccttgggagttctactgccaatttatctgctgatcatgacactagtaatttgagcagcccacatattgctgctagttccctgtcagagtttgctgttttgggctttgaattgggctattccatggagaatccaaactcactggttttatgggaagcccagtttggtgatttttccaatggagctcaagtgatatttgatcagtttctgagtagtggagaggcaaaatggctccgccagaccggtcttgtcgtttgccttcctcacggatatgatggtcaggggcctgaacattccagtgcaaggttggagcgtttccttcagatgagtgatgacaacccttatgttattcctgagatggatccaactctgaggaagcaaatccagcagtgcaactggcaagttgtgaatgtcacaactcctgcaaactatttccatgtcctgcgtcgccagattcaccgggacttcagaaagcctttgattgttatgtctccaaagaatctccttcgacacaaggactgcaaatcgaatctttctgaatttgatgaccttgctggtcaccctggatttgacaagcaaggaacccggtttaagcgtctaattaaagatcagaacaaccataaggaccttgaggagggaatcaagcgtttagttctctgttctggaaaggtatattatgagttggacgaagaaagaagaaaaaaggagcgtgatgatgttgctatatgtagagttgaacagctctgtccattcccatatgacctcatccagcgcgagttgaagcgatatccaaatgccgagattgtttggtgccaagaggaacccatgaacatgggggcgtacagctacatcaatcctcgcctcctgaccgcgatgagggcgcttggtcggggcacgatagacgacatcaaatacgttggaagggccccatctgcagccaccgcaacaggtttctactccgtccatgtgcaggagcaaaccgagcttgtgcagaaggcactgcagcgagaccctatcaactctccattttga

SEQ ID NO: 6208 - protein, 1042 aa, Oryza sativa subsp
MGWFRAASGLARVALRRNLARAPANPFAGPAPRYFHSTRPRRFAAPVPRAVPLSRLTDSFLDGTSSVYLEELQRAWEADPTSVDESWDNFFRNFVGQAATSPGISGQTIQESMRLLLLVRAYQVSGHLKAKLDPLALEERPIPDVLDPAFYGFSEADLDREFFLGVWRMAGFLSENRPVQTLRSVLERLEQAYCGTIGYEYMHIPDREKCNWLRDRIETVNAREYSYDRRQVMLDRLMWSTQFESFLAQKWTTAKRFGLEGAETLIPGMKEMFDRAADLGVESIVIGMPHRGRLNVLGNVVRKPLRQIFSEFSGGTKPAEEGEGLYTGTGDVKYHLGTSYDRPTRGGKHIHLSLVANPSHLEAVDPVVAGKTRAKQYYSNDLDRTKNLGVLLHGDGSFSGQGVVYETLHLSALPNYTTGGTIHIVVNNQVAFTTDPRAGRSSQYCTDVAKALDAPIFHVNGDDLEAVVHVCELAAEWRQTFHSDVVVDIVCYRRFGHNEIDEPSFTQPKMYKIIRNHQSALEIYQNRLLESGKISKEDIDKMQKKVSTILNDEFQNSKEYIPNKRDWLSAYWTGFKSPEQISRIRNTGVKPEILKRVGEAMTTLPENFKPHRAVKKIFELRRQMIETGEGIDWAVGEALAFATLIIEGNHVRLSGQDVERGTFSHRHAVIHDQETGEQYCPLDNLVMNQDEELFTVRLVSLGSSTANLSADHDTSNLSSPHIAASSLSEFAVLGFELGYSMENPNSLVLWEAQFGDFSNGAQVIFDQFLSSGEAKWLRQTGLVVCLPHGYDGQGPEHSSARLERFLQMSDDNPYVIPEMDPTLRKQIQQCNWQVVNVTTPANYFHVLRRQIHRDFRKPLIVMSPKNLLRHKDCKSNLSEFDDLAGHPGFDKQGTRFKRLIKDQNNHKDLEEGIKRLVLCSGKVYYELDEERRKKERDDVAICRVEQLCPFPYDLIQRELKRYPNAEIVWCQEEPMNMGAYSYINPRLLTAMRALGRGTIDDIKYVGRAPSAATATGFYSVHVQEQTELVQKALQRDPINSPF

SEQ ID NO: 6209 - DNA, 2907 bp, Oryza sativa subsp
  CDS (1)..(2907)
atggggtggtttcgggctgcgtccggattggctcgggtggcgctgaggaggaacctggcgcgtgctccggcgaacccttttgccggtcctgcgccacggtacttccactccacccgcccccggcggttcgccgctcctgtgccccgcgccgtgccgctctcgcgcctcaccgacagcttccttgatggcaccagcagcgtgtaccttgaggagctccagagggcgtgggaggctgatcccacctctgtcgacgagtcctgggacaatttctttcggaactttgtcgggcaggctgcaacttcgcctggcatatctgggcagacaattcaggaaagcatgaggttgctgcttcttgtgcgagcgtaccaggtgagtggtcacctgaaggctaagcttgatcctctcgcgctagaggagcggcctatccctgatgttctggaccctgcgttctatgggttctctgaggctgatctggaccgggagttttttcttggtgtgtggaggatggctgggttcttgtcggagaatcgccctgtgcagacactccgttctgtgttggagcggcttgagcaagcttactgtggtaccattgggtatgagtacatgcacatacctgacagggagaaatgtaattggctgagggataggattgagacggtcaatgcaagggagtactcctacgaccgtcgccaggtcatgcttgataggctcatgtggagcactcagtttgagagcttcttggcacagaaatggacgaccgccaagcggtttggtcttgaaggtgcggagacactgatccctggcatgaaggagatgtttgacagggcagctgatcttggtgtagagagcattgtgattggtatgccacacagaggtaggctgaatgtcttgggaaatgtcgtgaggaagcccttgcgacagatcttcagaccaaagaatttaggagtcttgttgcatggtgatggaagcttctcagggcagggtgtagtgtatgaaaccctgcatctcagtgctcttccaaactacactactggtgggacaattcacattgtggtcaataatcaggttgctttcactactgatccaagggcagggaggtcttcgcagtattgcacagatgttgctaaagcattggatgctccaattttccatgtgaatggtgatgacttggaggcagtggttcatgtctgtgagcttgctgcggagtggcggcaaacatttcattctgatgttgtggtggatattgtatgctaccgccggtttgggcataacgagattgatgagccttccttcacccagcctaaaatgtacaagataattaggaaccaccagagtgctcttgagatataccaaaacagacttttagaatctgggaagatatccaaggaagatattgataagatgcagaagaaggtcagcactatcttgaatgatgaattccaaaacagcaaagaatatattcccaataagagagactggctctcagcttactggactggattcaagtcaccagaacagatttcacgaatccgaaatactggtgtcaagccagagattctaaaacgtgttggagaagccatgactactctgcctgaaaatttcaagccccacagggctgtcaaaaagatttttgagctgcgtcgtcagatgattgagacgggcgaaggcattgattgggctgttggtgaagcacttgcttttgcaactcttataattgagggaaaccatgttaggttaagtggtcaggatgttgagaggggtacattcagccaccgccatgctgttatccatgaccaggaaactggagagcaatactgtccgcttgataatcttgttatgaatcaagatgaggaactatttactgttcgacttgttagccttgggagttctactgccaatttatctgctgatcatgacactagtaatttgagcagcccacatattgctgctagttccctgtcagagtttgctgttttgggctttgaattgggctattccatggagaatccaaactcactggttttatgggaagcccagtttggtgatttttccaatggagctcaagtgatatttgatcagtttctgagtagtggagaggcaaaatggctccgccagaccggtcttgtcgtttgccttcctcacggatatgatggtcaggggcctgaacattccagtgcaaggttggagcgtttccttcagatgagtgatgacaacccttatgttattcctgagatggatccaactctgaggaagcaaatccagcagtgcaactggcaagttgtgaatgtcacaactcctgcaaactatttccatgtcctgcgtcgccagattcaccgggacttcagaaagcctttgattgttatgtctccaaagaatctccttcgacacaaggactgcaaatcgaatctttctgaatttgatgaccttgctggtcaccctggatttgacaagcaaggaacccggtttaagcgtctaattaaagatcagaacaaccataaggaccttgaggagggaatcaagcgtttagttctctgttctggaaaggtatattatgagttggacgaagaaagaagaaaaaaggagcgtgatgatgttgctatatgtagagttgaacagctctgtccattcccatatgacctcatccagcgcgagttgaagcgatatccaaatgccgagattgtttggtgccaagaggaacccatgaacatgggggcgtacagctacatcaatcctcgcctcctgaccgcgatgagggcgcttggtcggggcacgatagacgacatcaaatacgttggaagggccccatctgcagccaccgcaacaggtttctactccgtccatgtgcaggagcaaaccgagcttgtgcagaaggcactgcagcgagaccctatcaactctccattttga

SEQ ID NO: 6210 - protein, 968 aa, Oryza sativa subsp
MGWFRAASGLARVALRRNLARAPANPFAGPAPRYFHSTRPRRFAAPVPRAVPLSRLTDSFLDGTSSVYLEELQRAWEADPTSVDESWDNFFRNFVGQAATSPGISGQTIQESMRLLLLVRAYQVSGHLKAKLDPLALEERPIPDVLDPAFYGFSEADLDREFFLGVWRMAGFLSENRPVQTLRSVLERLEQAYCGTIGYEYMHIPDREKCNWLRDRIETVNAREYSYDRRQVMLDRLMWSTQFESFLAQKWTTAKRFGLEGAETLIPGMKEMFDRAADLGVESIVIGMPHRGRLNVLGNVVRKPLRQIFRPKNLGVLLHGDGSFSGQGVVYETLHLSALPNYTTGGTIHIVVNNQVAFTTDPRAGRSSQYCTDVAKALDAPIFHVNGDDLEAVVHVCELAAEWRQTFHSDVVVDIVCYRRFGHNEIDEPSFTQPKMYKIIRNHQSALEIYQNRLLESGKISKEDIDKMQKKVSTILNDEFQNSKEYIPNKRDWLSAYWTGFKSPEQISRIRNTGVKPEILKRVGEAMTTLPENFKPHRAVKKIFELRRQMIETGEGIDWAVGEALAFATLIIEGNHVRLSGQDVERGTFSHRHAVIHDQETGEQYCPLDNLVMNQDEELFTVRLVSLGSSTANLSADHDTSNLSSPHIAASSLSEFAVLGFELGYSMENPNSLVLWEAQFGDFSNGAQVIFDQFLSSGEAKWLRQTGLVVCLPHGYDGQGPEHSSARLERFLQMSDDNPYVIPEMDPTLRKQIQQCNWQVVNVTTPANYFHVLRRQIHRDFRKPLIVMSPKNLLRHKDCKSNLSEFDDLAGHPGFDKQGTRFKRLIKDQNNHKDLEEGIKRLVLCSGKVYYELDEERRKKERDDVAICRVEQLCPFPYDLIQRELKRYPNAEIVWCQEEPMNMGAYSYINPRLLTAMRALGRGTIDDIKYVGRAPSAATATGFYSVHVQEQTELVQKALQRDPINSPF

SEQ ID NO: 6211 - DNA, 3072 bp, Medicago truncatula
  CDS (1)..(3072)
atggcatggtttagagctggtgctagtatagcaaaaaatgctataaaacgaaccatttcacaaaacagatcttcatcatatcttgtatctaggtcaagaatcttaccatcaacacatggtagaaagtttcatacaactgtttttaagcagcaagctgcaccggttccgcgtgcggttccgttgtcgaggttaacagacagttttttagatgggactagtagtgtgtatttggaggagttgcagagggcatgggaggctgacccgaatagtgtcgacgagtcgtgggataatttctttagaaattttgttgggcaagcgagtacgtctcctgggatatcggggcaaacgattcaggaaagtatgaggttgttgttgatggttagggcttatcaggttaatgggcatatgaaggcgaagttggatccgttgaatttggaagcgagacagataccggatgatttggatccggcgctttatgggtttagtgaggcggatcttgatcgggagttttttttgggtgtttggaggatggcgggttttttgtctgagaataggcctgttcagacgcttaggtcgattttgacaaggcttgagcaggcttattgtgggagtattgggtttgagtatatgcatatttcggatcgtgagaagtgtaattggcttagggataaaattgagacacctacaccggtgcagtttaacagggagcgtcgtgaggctatatttgatagacttgcttggagttcgttgtttgagaattttttggctactaaatggacttcggcgaagaggtttgggcttgaaggaggagagactcttattcctggtatgaaagaaatgtttgatcgagcatctgatctcggggttgagagcatagttattggaatggcacacaggggaagattgaatgttttgggtaatgtggtccggaagccgttgcgtcagatcttttgtgagttcagtggtggtctctcgcctgaggatgaagttgggctttacacgggaactggtgatgttaagtatcatttgggaacatcttatgatcgtcctactagaggtggcaagaggatacatttgtctttggtggcaaatcctagtcacttggaagctgttgaccccgttgttgttgggaaaactcgagctaagcagtattactcgaatgacgtggacaggacaaaaaacatgggtattttgcttcatggagatggtagttttgccggacagggtgtggtctatgaaaccctgcatttaagtgctcttcctaattacactacgggtgggactattcatattgtgttaaacaatcaagttgcgtttacaactgatccaatgtctggcaggtcttcacagtattgcacagacgttgctaaagctttagatgctcccatctttcatgttaacggtgatgatgtggaagcagttgtacatgcctgtgaacttgctgctgagtggcgccaaactttccattcagacgtggttgtggatttggtgtgttatcgtcgatttggccacaatgagattgacgaaccatctttcacgcagcctaaaatgtacaaggtcatcagaagccatccttcaactcttgaaatctatcagaagaagcttttggaaacaggggagctgacacaagatgacattgacaagatacacaagaaggtcacctcaattctaaatgaagaatttcaagctagcaaagattacattccaaaaagaagagattggctatcagcatactggcttgggttcaagtcacctgaacagctttcccgtgtccgaaacactggtgtgaagccagagatcttaaaaactgttgggaaagcaatcacaactatccctgaaaatttcacacctcataaagcagtgaagaggatttatgaacagcgtgcgcaaatgattgagactggggaagatattgactggggatttggagaggcacttgcttttgctaccttgcttgttgaaggtaaccatgttcgattgagtggtcaggacgttgaaagaggaacttttagtcaccgtcactcagtagttcatgatcagacaactggggagaaatattgcccccttgacaatgttatattgaaccaagatgaagagatgtttactgttagcaacagctcactttcagagttcgccgttcttggatttgaattgggttactcaatggaaaaccccaattcattgataatttgggaagcacaatttggagattttgctaatggggctcatgtgatatttgacaatttcttggcttctggtgaggccaagtggctccgtcagactgggctagttgtgttgcttcctcatggttatgatggccagggccctgagcattcaagtgcaagattggaacgctttcttcagatggctgatgacaatccgtatattatccctgagatggatccaactcttcggaaacagattcaggagtgtaatttgcagattgtgaatgtcacaactcctgccaactttttccatgttctaaggaggcagatacatagagaattccgaaaacctctcattgtaatgtcccctaagaacttgcttcgtagcaagtcttgcagatcaaacctatcagagtttgatgatgtccaagggcacccgggttttgacaaacagggaaccagatttaagcgcctcataaaagaccgaaatgaccacaacactgttgaggagggtattagacgtttagtactctgctctggaaaggtttactatgaacttgatgatcatcgatctaaggttgatgcatcagatgttgcaatatgtagggtggaacagctttgtcctttcccatatgaccttgtccaacgagaacttaaacgatatccaaatgcagaggttgtttggtgtcaagaagagccaatgaacatgggtggatacacttacattttacccagacttgtctcttccatgaaagctgtaggtaggggtggttttgatgatgtcaaatatgttggtcgtgctccatctgctgctacagccaccggtttcctcaaggttcaccagaaggagcaagctgagattgccgagaaggcccttcaacgcgagccagtcaacttcccattttga

SEQ ID NO: 6212 - protein, 1023 aa, Medicago truncatula
MAWFRAGASIAKNAIKRTISQNRSSSYLVSRSRILPSTHGRKFHTTVFKQQAAPVPRAVPLSRLTDSFLDGTSSVYLEELQRAWEADPNSVDESWDNFFRNFVGQASTSPGISGQTIQESMRLLLMVRAYQVNGHMKAKLDPLNLEARQIPDDLDPALYGFSEADLDREFFLGVWRMAGFLSENRPVQTLRSILTRLEQAYCGSIGFEYMHISDREKCNWLRDKIETPTPVQFNRERREAIFDRLAWSSLFENFLATKWTSAKRFGLEGGETLIPGMKEMFDRASDLGVESIVIGMAHRGRLNVLGNVVRKPLRQIFCEFSGGLSPEDEVGLYTGTGDVKYHLGTSYDRPTRGGKRIHLSLVANPSHLEAVDPVVVGKTRAKQYYSNDVDRTKNMGILLHGDGSFAGQGVVYETLHLSALPNYTTGGTIHIVLNNQVAFTTDPMSGRSSQYCTDVAKALDAPIFHVNGDDVEAVVHACELAAEWRQTFHSDVVVDLVCYRRFGHNEIDEPSFTQPKMYKVIRSHPSTLEIYQKKLLETGELTQDDIDKIHKKVTSILNEEFQASKDYIPKRRDWLSAYWLGFKSPEQLSRVRNTGVKPEILKTVGKAITTIPENFTPHKAVKRIYEQRAQMIETGEDIDWGFGEALAFATLLVEGNHVRLSGQDVERGTFSHRHSVVHDQTTGEKYCPLDNVILNQDEEMFTVSNSSLSEFAVLGFELGYSMENPNSLIIWEAQFGDFANGAHVIFDNFLASGEAKWLRQTGLVVLLPHGYDGQGPEHSSARLERFLQMADDNPYIIPEMDPTLRKQIQECNLQIVNVTTPANFFHVLRRQIHREFRKPLIVMSPKNLLRSKSCRSNLSEFDDVQGHPGFDKQGTRFKRLIKDRNDHNTVEEGIRRLVLCSGKVYYELDDHRSKVDASDVAICRVEQLCPFPYDLVQRELKRYPNAEVVWCQEEPMNMGGYTYILPRLVSSMKAVGRGGFDDVKYVGRAPSAATATGFLKVHQKEQAEIAEKALQREPVNFPF

SEQ ID NO: 6213 - DNA, 2994 bp, Pichia guilliermondii
  CDS (1)..(2994)
atgcttagagtaaatacaagggcacgtttgttgcaccggatggcagcaaagttgctgcctccaagacttacgcttgctagaacccttgctaccgattcgtttcttcaaggcaataatgctaactatgtggatgaaatgtacaatgcttggcgccaggacccatctagtgtccatgtttcttggaatgcttatttcaagaacattgaaaccacgggatctgcatcgctggccttccaggctcctccaactatcgttccaaccccagctggaggtgctgctagtttcaaccctagctcttcttcgtcgcctgacgttgttgctcacttgaaggtgcagttgttggtgagagcctatcaagtcagaggacatcaaaaggccaagattgatcctttgggcatctcgtacggtgacaccgaagacttgccaaaagagttgtctttagactactatggcttcaccgaagctgaccttgacaaacaaatcaccttggggccaggtatcttgcccagattcgctgagtcgggcaaaaaaaccatgtcgcttcgtgaaatcgtcgacacttgtgagcgtttgtactgttcttcttacggtgtggaatacattcacatcccttcaaaggagcagtgtgactggttgcgtgaacgtattgaaatccctcaaccatacaacttctctcctgatgaaaagcgtcaaattcttgaccggttaatatgggcttgctctttcgagtctttcttgtcttccaaattccccaacgacaagcgtttcggtcttgaaggtgccgagtcctccgttcccggtatcaaagctttgatcgatacttccgtcgagtacggcgtggaagatatcgtgattggtatgccccacagaggtagattgaatatgttgtccaatgtggtgcgtaaacctaatgagtctatcttcttcgaattcaccggttccaaggaatttgatgaaggttcgggagatgtcaagtaccatcttggtatgaactacgccagaccaaccacttctggtaagcacgttaacttatctcttgtcgccaacccttcgcacttggaagccgaggatggtgttgttcttggtaagactcgtgccattcagcactacaaacatgacattggtactttcaagaaggctatgccaatcttgatgcatggtgatgccgctttctccgctcaaggtgttgtgtacgaaactatgggtttcgaaaaccttcctgcctactctaccggtggtaccattcatgtcattgtcaataaccaaattggtttcactactgaccctagatttgctcgttctaccttgtatccttccgacatcgctaaggccatcaacgctcccatcttccacgttaacgcagatgatgttgaggctatggtgttcgtttttaacttggctgccgaatggcgtgctactttccactctgatgttcttatcgatgtggttggttaccgtaaatacggtcacaacgagactgatcaaccatctttcactcaacctttgatgtacagaaagattgccgagaagaagtctgttcttgattactataccgaacaattgatcaaggaaaagactttcacgaaggaagatatcgacgaacataagaaatggtgttggggaatgttggaagagtctttcaagaagtccaaggattaccaacctacttcaagagaatggttgactaccccatgggaagacttcaagtctcccaaggaattagcaactgaagtgcttcctcacttacctactgcggtagaggaggatactctcaagaagatcggtgatgtcatttctgacgcaccaaagggttttgagattcacagaaacttgaagagaatcttgaacaccagaaagaaggctgttgaaaccggtgaaggaatcgactggtctactggtgaagctttggcttttggatctttggtattggaaggataccacgttcgtgtttccggtcaagatgtcgagagaggaactttctctcaacgtcatgcggtgcttcatgatcaatcttctgaacaaacttacacaccattgaaccacctcagcgaggaccaggctgcttttgtcatctccaactcgtctttgtctgagtacggtgtcatgggctttgagtatggttactctttgacctcgccagatgctttggttatgtgggaagctcagtttggtgactttgccaacactgcccaagttgtcattgaccagttcattgccgctgccgaatccaagtggaagcaacgttcaggattggttctttctcttcctcacggttacgatggtcaaggtcctgagcattcttcaggtcgtattgagcgttacttgcagctttgtaatgaagacccacgttacttccctgccccagaaaagttggagcgccaacatcaagacgccaacatgcaagttgcatacccaaccacccctgctaacttgttccacttgttgagaagacagatgcaccgtcaattccgtaagccattggctcttttcttctccaagtctttgttgcgtcatcctcttgcaagatctcagttgtctgactttactggcgactcgcacttccaatggatcatcgatgatgtcgaattaggcaagagcatttctgccaaggaggacataaaaagattgatcatatgtaccggtcaggtctacaccgcattgcacaaaaagagagcaagccttgaagacaagtctactgccatcgtgaaggttgagcaattgcacccattcccattcgcccaattgcgtgacaccttgaactcttaccctggtcttgaggatattgcatggtgtcaagaagagccattgaacatgggttcatggtcttacgttgccccacgtttcgccaccaccttgaaggagactgacaagtacaaggacttgaccttgcgttattgtggtcgtgatccttccgcatctgttgctgcgggatccaagggtatgcacactggagaagaagaaaaattcttagaggctgcttttgaagctgtatag

SEQ ID NO: 6214 - protein, 997 aa, Pichia guilliermondii
MLRVNTRARLLHRMAAKLLPPRLTLARTLATDSFLQGNNANYVDEMYNAWRQDPSSVHVSWNAYFKNIETTGSASLAFQAPPTIVPTPAGGAASFNPSSSSSPDVVAHLKVQLLVRAYQVRGHQKAKIDPLGISYGDTEDLPKELSLDYYGFTEADLDKQITLGPGILPRFAESGKKTMSLREIVDTCERLYCSSYGVEYIHIPSKEQCDWLRERIEIPQPYNFSPDEKRQILDRLIWACSFESFLSSKFPNDKRFGLEGAESSVPGIKALIDTSVEYGVEDIVIGMPHRGRLNMLSNVVRKPNESIFFEFTGSKEFDEGSGDVKYHLGMNYARPTTSGKHVNLSLVANPSHLEAEDGVVLGKTRAIQHYKHDIGTFKKAMPILMHGDAAFSAQGVVYETMGFENLPAYSTGGTIHVIVNNQIGFTTDPRFARSTLYPSDIAKAINAPIFHVNADDVEAMVFVFNLAAEWRATFHSDVLIDVVGYRKYGHNETDQPSFTQPLMYRKIAEKKSVLDYYTEQLIKEKTFTKEDIDEHKKWCWGMLEESFKKSKDYQPTSREWLTTPWEDFKSPKELATEVLPHLPTAVEEDTLKKIGDVISDAPKGFEIHRNLKRILNTRKKAVETGEGIDWSTGEALAFGSLVLEGYHVRVSGQDVERGTFSQRHAVLHDQSSEQTYTPLNHLSEDQAAFVISNSSLSEYGVMGFEYGYSLTSPDALVMWEAQFGDFANTAQVVIDQFIAAAESKWKQRSGLVLSLPHGYDGQGPEHSSGRIERYLQLCNEDPRYFPAPEKLERQHQDANMQVAYPTTPANLFHLLRRQMHRQFRKPLALFFSKSLLRHPLARSQLSDFTGDSHFQWIIDDVELGKSISAKEDIKRLIICTGQVYTALHKKRASLEDKSTAIVKVEQLHPFPFAQLRDTLNSYPGLEDIAWCQEEPLNMGSWSYVAPRFATTLKETDKYKDLTLRYCGRDPSASVAAGSKGMHTGEEEKFLEAAFEAV

SEQ ID NO: 6215 - DNA, 2922 bp, Arabidopsis thaliana
  CDS (1)..(2922)
atggtttggtttagaatcggttcttctgtggcaaagcttgccataagaaggacactgtctcagtctcgttgtggttcatatgccactagaacaagggttttgccttgtcaaaccagatgttttcactctacaatactcaaatcaaaggcagagtctgctgcacctgttccacgtcctgtcccactttctaagctaactgatagcttcttagatggaacaagcagtgtgtatctagaggagttacaaagagcttgggaggctgatcccaacagtgttgatgagtcgtgggataacttttttaggaattttgtgggtcaggcttctacatcgcctggtatctcggggcaaaccattcaagaaagcatgcgtttgttgttgctagttagagcttaccaggttaatggccacatgaaggccaagcttgatcctttaggtctagagaagagagagattccagaggatctcacgccaggtctttatgggtttactgaggctgatcttgatcgggaattctttctgggtgtatggaggatgtcgggttttctctctgagaaccgcccggttcaaacactgaggtcgatactgtcgaggcttgagcaagcttactgtgggactatagggtatgagtacatgcacattgctgatagggataaatgtaactggttgagagacaagatcgagaccccaactcctcgacagtacaatagtgagcgtcggatggttatttatgataggcttacctggagcacacagtttgagaatttcttggctactaagtggaccacggctaaaaggtttggactggaaggtgctgaatctttgattcctggcatgaaggagatgttcgataggtctgcagatctcggggtagagaacatagttatcggtatgccccataggggtcgacttaatgttttgggtaatgttgttagaaaacctctacgccaaatattcagcgagtttagcggtggtactaggccagtagatgaagttgggctttacaccggaacaggtgatgtgaaataccacttgggtacatcttatgatcgtccaactagaggaggcaaacatctccacttgtctttggtagcaaatcccagtcacttggaagcagtagatcctgttgtgataggtaaaaccagagcgaaacaatattacacgaaagacgagaacagaacaaagaacatgggtattttgatccatggggatggtagctttgccggacaaggagtggtgtatgaaactctccatcttagtgcacttcctaactactgtaccggtggaacagtgcacattgtggtgaataatcaagtggctttcacaaccgatcccagggaaggaaggtcttcacagtattgcactgatgttgcaaaggctttgagcgccccaattttccatgtcaatgcagatgacattgaagcagtagtgcatgcttgtgagcttgctgctgagtggcgccagacgttccattctgatgttgttgttgatttagtatgctaccgtcgctttgggcataacgagatagacgaaccgtcattcacacaaccaaaaatgtacaaggtgatacgcagtcatccctcgtcacttcaaatctaccaggagaagctcttgcaatctggacaggtaacccaagaagatattgataagattcaaaagaaagtaagctctatcctcaatgaagaatatgaggcaagtaaagattatattccacaaaaacgtgactggctggcaagtcactggactggattcaagtctccggagcagatttctaggattcgaaacaccggagtgaagccagagattttgaagaatgtgggaaaggcaatctcaaccttccctgagaactttaagccacacagaggagttaaaagagtttatgaacaacgtgctcaaatgattgaatcgggagaaggcattgactggggacttggagaagcacttgcttttgctacactggttgtggaagggaaccatgttcggctaagtggtcaagatgttgaaagaggaactttcagtcatagacactcagtgcttcatgatcaagaaaccggggaggaatattgtcccctcgatcacctaatcaaaaaccaagaccctgaaatgttcactgtcagcaacagctccctttcagaatttggtgttctcggtttcgaactgggttattcgatggaaaatcccaattctctggtgatatgggaagctcagtttggagactttgctaatggcgcacaagttatgtttgatcagttcataagcagtggggaagccaaatggctccgtcaaactggtctagtagttttacttcctcatggatatgatggtcagggtcctgaacattccagtggaagattggaacgtttccttcagatgagtgatgacaatccttacgttatccctgagatggacccaactcttcgaaagcagattcaagaatgtaattggcaagttgttaatgttactacacctgccaactatttccatgttctgcgtcggcagatacacagggactttcgcaagcctcttatagtgatggcccccaaaaacttgcttcgtcacaaacagtgtgtatctaatctctcggaattcgatgatgttaaaggacatcctggatttgacaagcaaggaactcgatttaaacggttgatcaaagatcaaagtggccactctgatcttgaagaagatgcagagatcgtgtggtgtcaagaagagccgatgaacatgggaggataccaatacatagccctaaggctttgcaccgcgatgaaagcactgcaaagaggaaacttcaacgacatcaaatacgttggtcgtcttccctcagctgctacagccacaggattttaccagcttcatgttaaggagcagactgatcttgtgaagaaagctcttcaacctgaccccatcacccccgtcatcccttaa

SEQ ID NO: 6216 - protein, 973 aa, Arabidopsis thaliana
MVWFRIGSSVAKLAIRRTLSQSRCGSYATRTRVLPCQTRCFHSTILKSKAESAAPVPRPVPLSKLTDSFLDGTSSVYLEELQRAWEADPNSVDESWDNFFRNFVGQASTSPGISGQTIQESMRLLLLVRAYQVNGHMKAKLDPLGLEKREIPEDLTPGLYGFTEADLDREFFLGVWRMSGFLSENRPVQTLRSILSRLEQAYCGTIGYEYMHIADRDKCNWLRDKIETPTPRQYNSERRMVIYDRLTWSTQFENFLATKWTTAKRFGLEGAESLIPGMKEMFDRSADLGVENIVIGMPHRGRLNVLGNVVRKPLRQIFSEFSGGTRPVDEVGLYTGTGDVKYHLGTSYDRPTRGGKHLHLSLVANPSHLEAVDPVVIGKTRAKQYYTKDENRTKNMGILIHGDGSFAGQGVVYETLHLSALPNYCTGGTVHIVVNNQVAFTTDPREGRSSQYCTDVAKALSAPIFHVNADDIEAVVHACELAAEWRQTFHSDVVVDLVCYRRFGHNEIDEPSFTQPKMYKVIRSHPSSLQIYQEKLLQSGQVTQEDIDKIQKKVSSILNEEYEASKDYIPQKRDWLASHWTGFKSPEQISRIRNTGVKPEILKNVGKAISTFPENFKPHRGVKRVYEQRAQMIESGEGIDWGLGEALAFATLVVEGNHVRLSGQDVERGTFSHRHSVLHDQETGEEYCPLDHLIKNQDPEMFTVSNSSLSEFGVLGFELGYSMENPNSLVIWEAQFGDFANGAQVMFDQFISSGEAKWLRQTGLVVLLPHGYDGQGPEHSSGRLERFLQMSDDNPYVIPEMDPTLRKQIQECNWQVVNVTTPANYFHVLRRQIHRDFRKPLIVMAPKNLLRHKQCVSNLSEFDDVKGHPGFDKQGTRFKRLIKDQSGHSDLEEDAEIVWCQEEPMNMGGYQYIALRLCTAMKALQRGNFNDIKYVGRLPSAATATGFYQLHVKEQTDLVKKALQPDPITPVIP

SEQ ID NO: 6217 - DNA, 2832 bp, Pseudomonas putida
  CDS (1)..(2832): transl_table=11
atgcaagatagcgttatgcagcgcatgtgggaaagcgcccacctttcaggtggtaacgctgcatatgtggaagagctctacgagctctacctgcacgaccctaacgctgtgccagaagagtggcgcacctacttccagaagttgcccgccgacggcagcaccgctaccgatgtatcgcactcgacaatccgcgaccaatttgtactgctggcaaagaaccagcgccgcgcccaaccggtatccgccgggagcgtgagcagtgaacacgagaagaagcaggttgaagttctgcgactgatccaggcctatcgtatgcgcggccatcaggctgccaagctcgacccgttggggttgtggcagcgtcctgcgcccgtagacctgtcgatcaatcactacggcttgaccaatgccgatcttgatacgaccttccgtgccggcgacctgttcatcggcaaagaggaggcgagcctacgcgagatcttcgaggcgctccagaagacatattgtcgcaccattggcgccgagttcacccacatcgtcgattccgagcagcgcagctggtttcagcagcgcctggaaagcgtgcgcggtcgtccggagttttccgctgacgtgcaggctcacctgctcgagcgcgtgacggccggtgaaggccttgagaaatacctgggcaccaagtacccaggcaccaagcgtttcggccttgagggcggcgaaagcctgatcccgatgctggacgagatgattcagcgttccggctcctacggcaccaaggaagtcgtgatcggcatggcccaccgtggccgtctgaacgtcctggtgaacaccttcggcaagaacccgcgcgagctgttcgacgagttcgaaggcaagaagatgaacgagctgggctccggtgacgtgaagtatcaccagggcttctcctcgaacgtgatgaccgccggtggcgaagtgcacctggccatggcgttcaacccgtcccacctggaaatcgtatcgccagtggtcgaaggttcggtgcgcgcccgtcaggaccgccgcaacgacaccgttggcgacaaggtactgccgatctcgatccacggcgacaaagcgttcgccggccagggcgtggtcatggaaaccttccagatgtcgcagacccgcggtttcaagaccggcggcaccgtgcacatcgtgatcaacaaccaggtgggtttcaccatcagcaacccgctggacgcgcgctctaccgagtacgccaccgacgttgccaagatgatccaggcgccgatcctgcacgtgaacggcgatgacccggaagcggtgctgttcgtcacccagctgaggatcgactaccgcatgcagttcaagcgtgacgtggtgatcgacctggtctgctaccgtcgtcgcggccacaacgaggccgacgagccaaacggtacccagccgctgatgtatcagcaaatcagcaagcagcgcactacccgtgagctgtacgccgaggcactgatccaggctggccgcatcgatgccgagcgcgcccaggccaagatcgacgagtaccgcaacgcgctggacaacggcctgcacgttgtgaagagcctggtcaaggagccgaaccgcgagctgttcgtcgactggcgcccgtacctgggccatgcctggaccgcacgtcacgacacccgtttcgacctcaagaccctgcaagacctgtcggccaagctgctggaaatcccggaaggcttcgtcgttcagcgtcaggtcgcgaagatctacgaagaccgccagaagatgcaggccgggggcttgccgatcaactggggctatgcagagaccatggcttacgccaccctgcagttcgaaggtcacccgatccgcatgaccggccaggacatcggccgtggcaccttctcgcaccgtcacgcggtgctgcacaaccagaaggacgccagcacctacgtaccgctgaagaacctgttcccgggccagccgatgttcgagctgtacgactccttcctgtcggaagaagcggtactggcgttcgaatacggctactccaccaccacgccgaacgcgctggtgatctgggaagcccagttcggcgacttcgccaacggtgcgcaagtggtgatcgaccagttcatcaccagcggcgagcacaagtggggccgtctgtgtggcctgaccatgctgctgccccacggttatgaagggcagggcccggagcactcctccgcgcgtctggagcgttacctgcagctgtgcgccgagcacaacatccaggtgtgcgtaccgaccaccccggctcacatctaccacctgctgcgtcgtcaggtcatccgtccgctgcgcaagccgctgatcgtgctgacgccaaagtcgctgctgcgccacaagctggccgtctctaccctggaagacctggccgagggctcgttccagaccgtgatcccggaaatcgacaccctcgatccggccaaggtcgaacgcctggtcctgtgcggtggcaaggtttactacgacctgctggaaaaacgccgtgccgaaggccgcgaagacatcgccatcgtgcgtatcgagcagctgtatccgttcccggaggacgacctggtcgaaatcctggcgccgtacaccaacctcaagcatgcggtctggtgtcaggaagagccgatgaaccagggcgcctggtacagcagccagcaccacatgcgccgtatcctgggccgcctcaacaaggcgctggtcctggaatacgccggccgcgacgcttctgccgcgccagcctgtggttacgcttcgaagcacgccgaacagcaggaaaaactgctgcaagacgccttcactgtctaa

SEQ ID NO: 6218 - protein, 943 aa, Pseudomonas putida
MQDSVMQRMWESAHLSGGNAAYVEELYELYLHDPNAVPEEWRTYFQKLPADGSTATDVSHSTIRDQFVLLAKNQRRAQPVSAGSVSSEHEKKQVEVLRLIQAYRMRGHQAAKLDPLGLWQRPAPVDLSINHYGLTNADLDTTFRAGDLFIGKEEASLREIFEALQKTYCRTIGAEFTHIVDSEQRSWFQQRLESVRGRPEFSADVQAHLLERVTAGEGLEKYLGTKYPGTKRFGLEGGESLIPMLDEMIQRSGSYGTKEVVIGMAHRGRLNVLVNTFGKNPRELFDEFEGKKMNELGSGDVKYHQGFSSNVMTAGGEVHLAMAFNPSHLEIVSPVVEGSVRARQDRRNDTVGDKVLPISIHGDKAFAGQGVVMETFQMSQTRGFKTGGTVHIVINNQVGFTISNPLDARSTEYATDVAKMIQAPILHVNGDDPEAVLFVTQLRIDYRMQFKRDVVIDLVCYRRRGHNEADEPNGTQPLMYQQISKQRTTRELYAEALIQAGRIDAERAQAKIDEYRNALDNGLHVVKSLVKEPNRELFVDWRPYLGHAWTARHDTRFDLKTLQDLSAKLLEIPEGFVVQRQVAKIYEDRQKMQAGGLPINWGYAETMAYATLQFEGHPIRMTGQDIGRGTFSHRHAVLHNQKDASTYVPLKNLFPGQPMFELYDSFLSEEAVLAFEYGYSTTTPNALVIWEAQFGDFANGAQVVIDQFITSGEHKWGRLCGLTMLLPHGYEGQGPEHSSARLERYLQLCAEHNIQVCVPTTPAHIYHLLRRQVIRPLRKPLIVLTPKSLLRHKLAVSTLEDLAEGSFQTVIPEIDTLDPAKVERLVLCGGKVYYDLLEKRRAEGREDIAIVRIEQLYPFPEDDLVEILAPYTNLKHAVWCQEEPMNQGAWYSSQHHMRRILGRLNKALVLEYAGRDASAAPACGYASKHAEQQEKLLQDAFTV

SEQ ID NO: 6219 - DNA, 2958 bp, Bradyrhizobium japonicum
  CDS (1)..(2958): transl_table=11
atgtctcgccaagacgcgaacgcagcctttgccctctcatcttttttgcagggcaccaacgccacctacatcgacgaaatctacgcccgctacgagaaggacccgtcctcggtcgacgccgagtggcaggagttcttcaagagcctgaaggaccagccggacgacgtccgcaggaacgccgagggcccgtcctgggagcgcgccaactggccgctgacgccgcaggacgacctgacctccgccctcgacggcaattgggccgaggtcgagaaggcggtcggcggcaagatcgccgccaaggcgcaggccaagggcgccgacatctcctccgccgatctgctccaggcgacgcgcgactcggtccgcgccttgatgctgatccgctcccaccgcatgcgcggccacttccacgccaagctcgatccgctcggcatcgaggcgccgcgcaaccgcgaagagctcgacccgcgcacctacggcttcagcgaggccgatttcgaccgcaagatcttcctcgatcacgtgctcggtctcgaatacggcacgctgcgcgagatcaccgcgatctgcgagcgcacctactgccagacgctcggcgtcgagttcatgcatatcagcaatgccgcgcagaaggcctggatccaggagcgcatcgaggggcccgataaggaaatctccttcacccgcgagggccgcagagccatcctgaccaagctggtcgaagccgaaggctttgaaaagttctgcgataccaagtttaccggcaccaagcgtttcggtctcgacggtgctgaatccctgatccccgcgctcgagcagatcatcaagcgcggcggcaatctcggcgtgaaggaaatcgtgctgggcatgccgcatcgcggccgcctcaacgtgctgacccaggtgatgggcaaggcccaccgcgcgctgttccacgagttcaagggcggctcggccaaccccgacgcggtcgaaggctccggcgacgtcaagtatcacctcggcgcctcctcggaccgcgagttcgacggcaaccgcatccatctgtcgctgaccgccaatccctcgcatctcgagatcgtcgatcccgtcgtgctcggcaaggtccgcgccaagcaggaccagcatggcgatccgccggatatgcgcatctccgtcatgccgctgctgatgcacggcgacgccgcgttcgccggccagggcgtggtcgcggaatgcttcggtctgtcggacctgaagggctaccgcaccggcggctccgtgcacttcatcgtcaacaaccagatcggtttcaccacctatccgtgttactcgcgctcctcgccctatccgtcggatgtggcgaagatgatcgacgcgccgatcttccacgtgaacggcgacgatccggaagccgtggtgttcgcggccaaggtcgcgaccgaattccggcagaagttccacaagcccgtcgtcatcgacatgttctgctaccgcaggcatggccataacgagggcgacgagccggcgttcacccagccggtgatgtacaagaagatcgcggcgcatccgtccacgctcgagctctacgcccgccgcctcatcagcgaaggcgtgatgaccgagggcgaggtcgacaaggccaaggccgactggcgcgcgcggctcgatgccgagttcgaggccggtacctcctacaagccgaacaaggccgactggctcgacggcaagtgggcgggcttcaagatcgccgaccaggaagaggacgcccgccgcggcgtcaccggcgtcgacatcaacgcgctgaaggatatcggccgcaagatcaccaaggtgccggatggtttccgcgtccaccgcaccatccagcgcttcctggagaaccgctccaaggcgatcgacagcggcgccggcatcgactgggcgaccggcgaagcgctggcgttctgctcgttgctcaacgagaaccatcacgtccggctgtccggccaggattccgagcgcggcaccttctcgcagcgccactcggtcctgatcgaccaggaagacgagagccgctacacgccgttcaaccatctcggccacgagcagggccattacgaggtcatcaactcgctgctgtcggaagaagccgtgctcggcttcgaatatggctattcgctcgccgagccgaacacgctgaccctgtgggaagcgcagttcggcgacttcgccaacggcgcgcaggtcgtgttcgaccagttcatctcctcgggcgagcgcaaatggctgcgcatgtccggcctcgtctgcctcttgccgcacggctatgaagggcagggaccggagcactcctcggcgcgcctcgagcgttacttgcagatgtgcgcggaagacaacatgcaggtggtctacccgaccacgccggcgaactacttccacgtgctgcgccggcagctgcatcgcgagatccgtaaacccctgatcctgatgacgccgaagtcgctgctgcgtcacaagcgggcggtgtcgcgtctcgaggagcttgcgaagggaacgaccttccaccgcatcctgtacgacgacgcccagatgctgccgaccgatgccatcaagctcgttccggacgagaagatccgccgcatcgtgctctgctccggcaaggtctattacgacctctacgaggagcgcgagaagcgcggcatcgacgacatctacctgatgcgcgtcgagcagctctatccggtgccgctgaaggcgctggtggccgagctgtcgcgcttcaagaaggccgaagtggtgtggtgccaggaagagccccgcaacatgggtgcctggcacttcatcgagccctatctggagtgggtgctgaaccaggtgaacggtgtgagccggcgtccgcgttatgtcggccgcgccgcttccgccgcgaccgccacgggtctgatgtccaagcatcaggctcagctgaaggcgttcctggacgaagcactgagctga

SEQ ID NO: 6220 - protein, 985 aa, Bradyrhizobium japonicum
MSRQDANAAFALSSFLQGTNATYIDEIYARYEKDPSSVDAEWQEFFKSLKDQPDDVRRNAEGPSWERANWPLTPQDDLTSALDGNWAEVEKAVGGKIAAKAQAKGADISSADLLQATRDSVRALMLIRSHRMRGHFHAKLDPLGIEAPRNREELDPRTYGFSEADFDRKIFLDHVLGLEYGTLREITAICERTYCQTLGVEFMHISNAAQKAWIQERIEGPDKEISFTREGRRAILTKLVEAEGFEKFCDTKFTGTKRFGLDGAESLIPALEQIIKRGGNLGVKEIVLGMPHRGRLNVLTQVMGKAHRALFHEFKGGSANPDAVEGSGDVKYHLGASSDREFDGNRIHLSLTANPSHLEIVDPVVLGKVRAKQDQHGDPPDMRISVMPLLMHGDAAFAGQGVVAECFGLSDLKGYRTGGSVHFIVNNQIGFTTYPCYSRSSPYPSDVAKMIDAPIFHVNGDDPEAVVFAAKVATEFRQKFHKPVVIDMFCYRRHGHNEGDEPAFTQPVMYKKIAAHPSTLELYARRLISEGVMTEGEVDKAKADWRARLDAEFEAGTSYKPNKADWLDGKWAGFKIADQEEDARRGVTGVDINALKDIGRKITKVPDGFRVHRTIQRFLENRSKAIDSGAGIDWATGEALAFCSLLNENHHVRLSGQDSERGTFSQRHSVLIDQEDESRYTPFNHLGHEQGHYEVINSLLSEEAVLGFEYGYSLAEPNTLTLWEAQFGDFANGAQVVFDQFISSGERKWLRMSGLVCLLPHGYEGQGPEHSSARLERYLQMCAEDNMQVVYPTTPANYFHVLRRQLHREIRKPLILMTPKSLLRHKRAVSRLEELAKGTTFHRILYDDAQMLPTDAIKLVPDEKIRRIVLCSGKVYYDLYEEREKRGIDDIYLMRVEQLYPVPLKALVAELSRFKKAEVVWCQEEPRNMGAWHFIEPYLEWVLNQVNGVSRRPRYVGRAASAATATGLMSKHQAQLKAFLDEALS

SEQ ID NO: 6221 - DNA, 3369 bp, Ostreococcus tauri
  CDS (1)..(3369)
atgacgctcgcgatcgcgcgtcgacgcctgtgcgcgctcgcgcgtcacccgcgcgccctcgtcgccgtcgcgagagacggcgcgtcgcgagcgagcacggtggggacgatcgggcgcgattggcccatcgaaagagaatttgccacgaagagcgtcggttctggagcttttccgtcgttgaagcgcgctcgggcgacggtggagagatcgttggcggtccagacggcgcacgcgcgggaaaaggcgacgatgtcgagcacggcggcgccgaaaccgacgccggtgagagagatgcgggacgagtttttgaacgccacgagcgcggcgtacttggaggcgatggaggatgatttcaggcgagacccgaagagcgtgccggaatcgtgggcgatgttgctgagacagatggactccggggtgacaggggcggagatctcggatatgcacaacgcggcgctcacggggacggcgccgcacgcggtcgggcggccgttggacgcgcagacgattcaagagtccatgcggctcatgctgttgattcgcgcgtaccaaacgagcggtcacgccgcagcgcggctcgatccgttgggattggacaagcgcgaggggatcatttaccttgagcccgctttgtacggtttcagtgaggacgacatggaccgcgagttcttcatcggcacttggaagatgcaaggtttcctcagtgaagatcgccctgtgcagagcctacgacaaattttgacccgcctccaggacacatactgcgggacgatcggctacgagtacatgcacatccaagaccgcgaccagtgcaactggctgcgttcaaagattgagacggagcgtaaaaagcaatactcaacagaacgcaaacgtatcattctcgatcgcttgtcctggagcgaactcttcgagaacttcttatcgaacaagtatagcgcggcaaagagattcggcttagaggggtgcgaaagtctcgtgcccggattcaaggaagcgattgataaggcggcagagatgggagtcgaaaacatcaccatcggcatgccgcatcgtggtcgcttgaatgtgctcgcgaacgtcgtgcgtaaacctcttcaaaccattttcaatgagtttaaaggtggacctaaattggtggaagagttggggaacgcgggctcgtcgtacaccggatcaggcgacgtaaagtatcacctcggaacttcgtttgaccgtcccacattacgtggaggacaaatccacctttcggtcgttgcaaacccctcgcacctcgaggcggtgaacaccgttgtcacgggaaaaacgcgtgccaaacagttttacacaaaggatccgaaaggtgagcgttctatggccgtcttgctgcacggcgacggtgcgttcagcggtcaaggaatagtttacgaaacgctcgacatgagtaaacttccagagtaccaagttggtgggactttacacatcgtggtgaacaatcaagtcgcgttcacgactgatccgaaatattcgcggtcgagtccttattgcactgacgtcgcgaagggtatggaagttcctattttccatgtgaatggcgacgacgttgaggccgtcgcttgggttatggaacttgccacggaatggagaatgaagtggaagaccgacgctgtcgtcgatatcgtgtgctatcgcaaatatgggcacaatgagatcgacgaacccatgttcacgcaacctctgatgtacaaggtcattcagaaacatccaagtgcgttgacgcagtacagcaacaagctcattgatgacggcaccgtcactccggaggaagtcatggagatgagaaacagaatcaactcgaagatggaggaagaattcaactcgtcgaaggattacgtacccaagcagcgagattggctctcttcccactggcaaggttttaagagccccgaccaactgtcccgcatcagagacactggtttgccgccagagcacctgaaaaaccttggcaatctcatcacaacaatccccgcgggattcacgccacatcgcgtcgttaaacgtgtgtacgaggcccgacgcgcgatgatcgataacggtgagggacttgactgggctatgggtgaagcattggcgtttgcgtcattgctcgatgatggtaatcatgttcgcttatctggacaggatgtcgaacgcggcaccttctctcatcgccacgctctgctccacgatcaaatcaccggcgaacgcttcatccctctgcgtaatgtgtacagtggaaacatgggtcggggtcgagacttctttaccgtgtgcaactcgtcactttctgagtacggcgttctcggctttgaactcggttactcgctggagcatcccaacgctttgatcttgtgggaggcgcaattcggtgactttgcgaacacggcacaagtcattatcgatcaatttattagctctggggaagcgaagtggttgagacaaagtggtctcgtcatgcttcttcctcatggttatgatggacaaggtcccgagcatagcagtgctcgtttagagcgtttcttacagatgacggatgaggatccaacgcgcattccggagatgtcgatggaaaagcgtacgcagctgcaagagtgcaactggcaaatctgcaacgttacgactcctgcgaattacttccacatgcttcggcgtcaggttcatcgtgagttccgtaaaccgctcgtcgtcatgagcccgaagaatctgctgcgccatccgaaggctgtttcgaagctcaacgagttcgataacagcgatgaaaatgactctctccaaggcattcgcttcaagcgactcatcatggataagacgtcaacttcgcgctctttggatccaccccctcaacctgaggttgatcgcgtcatcttctgctctgggaaggtttactacgatcttgacgacgccagagacaaagcgagcaaactggacaaggtgaaaatctgccgaatagaacagctcgctccgttcccttgggatctcgttcagcgcgagctcaagcgctatcccaacgccgaggtcgtttggtgccaggaggaaccgatgaacatgggcgcttggactcacgttcaggccagaatgagcaccttgttcgaccatctcgagcgtcccggcagaacgcgttacgccggacgtaagcccgcggcgtctccagccaccggttacgccgcggtgcacgcccaagaacaggcccagctccgcccgggcgcgcgtaatagaagacgacttgtcataatcacagggcggcgccacgctgggcgcgatcacgactggaaaattccgcgagttggcgccgacctaggggtgggggacttgcgcaagacgccccgaaacacccgcaatgtgcacctgtaa

SEQ ID NO: 6222 - protein, 1122 aa, Ostreococcus tauri
MTLAIARRRLCALARHPRALVAVARDGASRASTVGTIGRDWPIEREFATKSVGSGAFPSLKRARATVERSLAVQTAHAREKATMSSTAAPKPTPVREMRDEFLNATSAAYLEAMEDDFRRDPKSVPESWAMLLRQMDSGVTGAEISDMHNAALTGTAPHAVGRPLDAQTIQESMRLMLLIRAYQTSGHAAARLDPLGLDKREGIIYLEPALYGFSEDDMDREFFIGTWKMQGFLSEDRPVQSLRQILTRLQDTYCGTIGYEYMHIQDRDQCNWLRSKIETERKKQYSTERKRIILDRLSWSELFENFLSNKYSAAKRFGLEGCESLVPGFKEAIDKAAEMGVENITIGMPHRGRLNVLANVVRKPLQTIFNEFKGGPKLVEELGNAGSSYTGSGDVKYHLGTSFDRPTLRGGQIHLSVVANPSHLEAVNTVVTGKTRAKQFYTKDPKGERSMAVLLHGDGAFSGQGIVYETLDMSKLPEYQVGGTLHIVVNNQVAFTTDPKYSRSSPYCTDVAKGMEVPIFHVNGDDVEAVAWVMELATEWRMKWKTDAVVDIVCYRKYGHNEIDEPMFTQPLMYKVIQKHPSALTQYSNKLIDDGTVTPEEVMEMRNRINSKMEEEFNSSKDYVPKQRDWLSSHWQGFKSPDQLSRIRDTGLPPEHLKNLGNLITTIPAGFTPHRVVKRVYEARRAMIDNGEGLDWAMGEALAFASLLDDGNHVRLSGQDVERGTFSHRHALLHDQITGERFIPLRNVYSGNMGRGRDFFTVCNSSLSEYGVLGFELGYSLEHPNALILWEAQFGDFANTAQVIIDQFISSGEAKWLRQSGLVMLLPHGYDGQGPEHSSARLERFLQMTDEDPTRIPEMSMEKRTQLQECNWQICNVTTPANYFHMLRRQVHREFRKPLVVMSPKNLLRHPKAVSKLNEFDNSDENDSLQGIRFKRLIMDKTSTSRSLDPPPQPEVDRVIFCSGKVYYDLDDARDKASKLDKVKICRIEQLAPFPWDLVQRELKRYPNAEVVWCQEEPMNMGAWTHVQARMSTLFDHLERPGRTRYAGRKPAASPATGYAAVHAQEQAQLRPGARNRRRLVIITGRRHAGRDHDWKIPRVGADLGVGDLRKTPRNTRNVHL

SEQ ID NO: 6223 - DNA, 3051 bp, Oryza sativa
  CDS (1)..(3051)
atggggtggtttcgggctgcgtccggattggctcgggtggcgctgaggaggaacctggcgcgtgctccggcgaacccttttgccggtcctgcgccacggtacttccactccacccgcccccagcggttcgccactcctgtgccccgcgccgtgccgctctcgcgcctcaccgacagcttccttgatggcaccagcagcgtgtaccttgaggagctccagagggcgtgggaggctgatcccacctctgtcgacgagtcctgggacaatttctttcggaactttgtcgggcaggctgcaacttcgcctggcatatctgggcagacaattcaggaaagcatgaggttgctgcttcttgtgcgagcgtaccaggtgagtggtcacctgaaggctaagcttgatcctctcgcgctagaggagcggcctatccctgatgttctggaccctgcgttctatgggttctctgaggctgatctggaccgggagttttttcttggtgtgtggaggatggctgggttcttgtcggagaatcgccctgtgcagacactccgttctgtgttggagcggcttgagcaagcttactgtggtaccattgggtatgagtacatgcacatacctgacagggagaaatgtaattggctgagggataggattgagacggtcaatgcaagggagtactcctacgaccgtcgccaggtcatgcttgataggctcatgtggagcactcagtttgagagcttcttggcacagaaatggacgaccgccaagcggtttggtcttgaaggtgcggagacactgatccctggcatgaaggagatgtttgacagggcagctgatcttggtgtagagagcattgtgattggtatgccacacagaggtaggctgaatgtcttgggaaatgtcgtgaggaagcccttgcgacagatcttcagtgagtttagtggtggtaccaagcctgccgaagaaggggagggcttgtatacagggactggagatgtcaaataccatctaggaacttcatacgataggcctaccagaggtggaaagcatatccatctgtctctggttgcaaacccaagtcatttggaagcagtcgatcctgttgttgctgggaagaccagagcaaaacagtactattctaatgatcttgacaggaccaagaatttaggagtcttgttgcatggtgatggaagcttctcagggcagggtgtagtgtacgaaaccctgcatctcagtgctcttccaaactacactactggtgggacaattcacattgtggtcaataatcaggttgctttcactactgatccaagggcagggaggtcttcgcagtattgcacagatgttgctaaagcattggatgctccaattttccatgtgaatggtgatgacttggaggcagtggttcatgtctgtgagcttgctgcggagtggcggcaaacatttcattctgatgtcgtggtggatattgtatgctaccgccggtttgggcataacgagattgatgagccttccttcacccagcctaaaatgtacaagataattaggaaccaccagagtgctcttgagatataccaaaacagacttttagaatctgggaagatatccaaggaagatattgataagatgcagaagaaggtcagcactatcttgaatgatgaattccaaaacagcaaagaatatattcccaataagagagactggctctcagcttactggactggattcaagtcaccagaacagatttcacgaatccgaaatactggtgtcaagccagagattctaaaacgtgttggagaagccatgactactctgcctgaaaatttcaagccccacagggctgtcaaaaagatttttgagctgcgtcgtcagatgattgagacgggggaaggcattgattgggctgttggtgaagcacttgcttttgcaactcttataattgagggaaaccatgttaggttaagtggtcaggatgttgagaggggtacattcagccaccgccatgctgttatccatgaccaggaaactggagagcaatactgtccgcttgataatcttgttatgaatcaagatgaggaactatttactgtaagcaacagttccctgtcagagtttgctgttttgggctttgaattgggctattccatggagaatccaaactcactggttttatgggaagcccagtttggtgatttttccaatggagctcaagtgatatttgatcagtttctgagtagtggagaggcaaaatggctccgccagaccggtcttgtcgtttgccttcctcacggatatgatggtcaggggcctgaacattccagtgcaaggttggagcgtttccttcagatgagtgatgacaacccttatgttattcctgagatggatccaactctgaggaagcaaatccagcagtgcaactggcaagttgtgaatgtcacaactcctgcaaactatttccatgtcctgcgtcgccagattcaccgggacttcagaaagcctttgattgttatgtctccaaagaatctccttcgacacaaggactgcaaatcgaatctttctgaatttgatgaccttgctggtcaccctggatttgacaagcaaggaacccggtttaagcgtctaattaaagatcagaacaaccataaggaccttgaggagggaatcaagcgtttagttctctgttctggaaaggtatattatgagttggacgaagaaagaagaaaaaaggagcgtgatgatgttgctatatgtagagttgaacagctctgtccattcccatatgacctcatccagcgcgagttgaagcgatatccaaatgccgagattgtttggtgccaagaggaacccatgaacatgggggcgtacagctacatcaatcctcgcctcctgaccgcgatgagggcgcttggtcggggcacgatagacgacatcaaatacgttggaagggccccatctgcagccaccgcaacaggtttctactccgtccatgtgcaggagcaaaccgagcttgtgcagaaggcactgcagcgagaccctatcaactctccattttga

SEQ ID NO: 6224 - protein, 1016 aa, Oryza sativa
MGWFRAASGLARVALRRNLARAPANPFAGPAPRYFHSTRPQRFATPVPRAVPLSRLTDSFLDGTSSVYLEELQRAWEADPTSVDESWDNFFRNFVGQAATSPGISGQTIQESMRLLLLVRAYQVSGHLKAKLDPLALEERPIPDVLDPAFYGFSEADLDREFFLGVWRMAGFLSENRPVQTLRSVLERLEQAYCGTIGYEYMHIPDREKCNWLRDRIETVNAREYSYDRRQVMLDRLMWSTQFESFLAQKWTTAKRFGLEGAETLIPGMKEMFDRAADLGVESIVIGMPHRGRLNVLGNVVRKPLRQIFSEFSGGTKPAEEGEGLYTGTGDVKYHLGTSYDRPTRGGKHIHLSLVANPSHLEAVDPVVAGKTRAKQYYSNDLDRTKNLGVLLHGDGSFSGQGVVYETLHLSALPNYTTGGTIHIVVNNQVAFTTDPRAGRSSQYCTDVAKALDAPIFHVNGDDLEAVVHVCELAAEWRQTFHSDVVVDIVCYRRFGHNEIDEPSFTQPKMYKIIRNHQSALEIYQNRLLESGKISKEDIDKMQKKVSTILNDEFQNSKEYIPNKRDWLSAYWTGFKSPEQISRIRNTGVKPEILKRVGEAMTTLPENFKPHRAVKKIFELRRQMIETGEGIDWAVGEALAFATLIIEGNHVRLSGQDVERGTFSHRHAVIHDQETGEQYCPLDNLVMNQDEELFTVSNSSLSEFAVLGFELGYSMENPNSLVLWEAQFGDFSNGAQVIFDQFLSSGEAKWLRQTGLVVCLPHGYDGQGPEHSSARLERFLQMSDDNPYVIPEMDPTLRKQIQQCNWQVVNVTTPANYFHVLRRQIHRDFRKPLIVMSPKNLLRHKDCKSNLSEFDDLAGHPGFDKQGTRFKRLIKDQNNHKDLEEGIKRLVLCSGKVYYELDEERRKKERDDVAICRVEQLCPFPYDLIQRELKRYPNAEIVWCQEEPMNMGAYSYINPRLLTAMRALGRGTIDDIKYVGRAPSAATATGFYSVHVQEQTELVQKALQRDPINSPF

SEQ ID NO: 6225 - DNA, 3060 bp, Aspergillus oryzae
  CDS (1)..(3060)
atgctcccccggatgccttcggtggcacaagcgcgactgattctccaatcgacaagtggggaccaccacataacctctcgcagcaacaaaacagtattgaaggatcccaatgattccttcctctcgggcaacactgcaaactatatcgacgagatgtacctggcgtggaagaaggacccgtcaagcgtccacatctcgtggcagacctacttcaaaaacatggaggacggtaacatgcctgtctcacaggccttccaaccacccccgacaattgtccctaccccgaccggtggtgttccccaaaccatgcctggcgctggtctgtccatggctgccggtaccgacgtcacgaatcacttgaaggttcagctactcgttcgcgcctaccaggcacgtggtcaccacaaggctaagatcgaccctctgggtatccgtggcgaggctgaggcctttggctacaacaagcctaaggaactcgagcttgatcattatggatttaccgagcgtgatctggatgaggagttcacccttggacccggtattctgccgcgtttcgctaccgagagccgcaagaagatgaccttgcgcgaaatcatcgccacctgtgagagtatctactgtggctcttacggcgttgagtacatccacattcctgatcgcaagccttgtgactggatccgtgatcgcttcgagatccccgagccttacaagtactctgttgatgacaagcgccgcattctcgaccgtctcatttggagtcacagcttcgaatccttccttgccaccaaattccccaacgacaagcgtttcggtctcgagggctgtgaatcgctcgtccctggtatgaaggccttgatcgaccgcagtgttgactacggtatcaaggacattgtcatcggtatgccccaccgtggccgtctcaatgtcctgtccaacgtcgtccgtaagccgaacgagtccatcttcagtgagttcgctggctccgctgagccatccgatgaaggctctggtgatgtcaagtaccacttgggtatgaacttcgagcgccctactccctctggtaagcgtgtccaattgtctctggttgccaacccgtcccacttggaagccgaagaccccgtcgtgctcggaaagacccgctctatccagcactacaacaaggatgagaagaatttcgactctgctatgggagtgttgctgcacggtgatgctgcatttgctggccagggtgtcgtgtacgagaccatgggcttccactccttgcctgcttactccactggcggtaccattcacatcatcgtgaacaaccagattggtttcactaccgatcctcgttattcccgttccaccccctactgctcggacatcgccaagtcgattgatgcccctgtcttccacgtcaacggtgatgacgtcgaggccgtgaattatgtctgccaggttgccgcggactggcgtgcggagttcaagagcgatgtcgtcattgacattgtctgctaccgtaagcagggtcacaacgagaccgatcagccgtctttcactcagcccttgatgtacaagcgtattgccgctcagaagaatcagcttgacaagtatgtcgagaagttgatcaccgagggtaccttcactaaggaggacatcgatgagcataagaagtgggtctggggaatgcttaacgacagctttgaccgtagcaaggactaccagcctactggcaaggaatggttgacctccgcatggaacggattcaagacccccaaggagttggccaccgaggttctgcctcacctgcccactggtgttgagggccctcttctgaagcacgttgctgacaaggttagcggtgctccggatggctttactctgcaccgtaacctcaagcgtattttgtccaaccgcaagaaggctgtggatgagggcaagaacatcgactgggctactgccgaggctcttgctttcggctccctcgtttcggaaggctaccatgtccgtgtctccggtcaggatgtcgagcgtggtactttctcccagcgccatgccgttctgcatgaccaggagaacgagaacacttatacccctctgcagcacatctccgaggatcagggcagcttcgtcatctctaactcctctctgagtgaatttggagcccttggattcgaatacggttactccttgacctcccctaacgccctcgttatgtgggaagcgcagtttggtgactttgccaacaacgctcagtgcattattgaccagttcattgcctcgggagaatccaagtggttgcaacgctccggtcttgttgtctccctgcctcatggttacgatggccagggcccagagcactcctccggcagaatggagcgctggttgcagctctgtaacgaggaacctcgtatcttcccctctcaggacaagcttgaccgccagcaccaagactgcaacatgcagattgcgtacatgaccgaacccgccaacctgttccacatcctgcgtcgtcaaatccaccgccagttccgcaagcctcttgtgattttcttctcgaaggcactcctccgtcatccgattgcccgctctgatattgaggacttctctggcgactctcacttccggtgtatcatccctgaccccgctcacggctctgccattgatgaacctgagaagattgagcgtgtcatcctgtgctccggacaagtctacgcttctctgctgaagcaccgtgaggcgaatggcatccgcaacactgctatcactcgtatcgagcagctccaccccttcccttgggcacagctcaaggagaacctcgacagctaccccaacgcccgcaacattgtctgggctcaagaagagcctctgaatgcgggtgcctggagctacacccagcctcgcattgagactctgctgaacgagaccgagcaccacaaccgtcgccatgtcctctacgctggtcgttcccccagtgcatccgtggccactggtctcaagggtgttcatctcaaggaagagcaggagttcctcgaggaggccttctctgttcaccaggagcggttgaagggtgagtaa

SEQ ID NO: 6226 - protein, 1019 aa, Aspergillus oryzae
MLPRMPSVAQARLILQSTSGDHHITSRSNKTVLKDPNDSFLSGNTANYIDEMYLAWKKDPSSVHISWQTYFKNMEDGNMPVSQAFQPPPTIVPTPTGGVPQTMPGAGLSMAAGTDVTNHLKVQLLVRAYQARGHHKAKIDPLGIRGEAEAFGYNKPKELELDHYGFTERDLDEEFTLGPGILPRFATESRKKMTLREIIATCESIYCGSYGVEYIHIPDRKPCDWIRDRFEIPEPYKYSVDDKRRILDRLIWSHSFESFLATKFPNDKRFGLEGCESLVPGMKALIDRSVDYGIKDIVIGMPHRGRLNVLSNVVRKPNESIFSEFAGSAEPSDEGSGDVKYHLGMNFERPTPSGKRVQLSLVANPSHLEAEDPVVLGKTRSIQHYNKDEKNFDSAMGVLLHGDAAFAGQGVVYETMGFHSLPAYSTGGTIHIIVNNQIGFTTDPRYSRSTPYCSDIAKSIDAPVFHVNGDDVEAVNYVCQVAADWRAEFKSDVVIDIVCYRKQGHNETDQPSFTQPLMYKRIAAQKNQLDKYVEKLITEGTFTKEDIDEHKKWVWGMLNDSFDRSKDYQPTGKEWLTSAWNGFKTPKELATEVLPHLPTGVEGPLLKHVADKVSGAPDGFTLHRNLKRILSNRKKAVDEGKNIDWATAEALAFGSLVSEGYHVRVSGQDVERGTFSQRHAVLHDQENENTYTPLQHISEDQGSFVISNSSLSEFGALGFEYGYSLTSPNALVMWEAQFGDFANNAQCIIDQFIASGESKWLQRSGLVVSLPHGYDGQGPEHSSGRMERWLQLCNEEPRIFPSQDKLDRQHQDCNMQIAYMTEPANLFHILRRQIHRQFRKPLVIFFSKALLRHPIARSDIEDFSGDSHFRCIIPDPAHGSAIDEPEKIERVILCSGQVYASLLKHREANGIRNTAITRIEQLHPFPWAQLKENLDSYPNARNIVWAQEEPLNAGAWSYTQPRIETLLNETEHHNRRHVLYAGRSPSASVATGLKGVHLKEEQEFLEEAFSVHQERLKGE

SEQ ID NO: 6227 - DNA, 3045 bp, Saccharomyces cerevisiae
  CDS (1)..(3045)
atgctaaggttcgtgtcttcgcaaacctgccggtatagttcaagaggactattaaaaacatctttacttaaaaatgcatctactgtcaaatttgtcggaagagggttagccaccactggtacagataattttctatcgacatcaaatgccacctatatcgatgaaatgtaccaagcttggcaaaaagacccatcttcagtccatgtttcatgggacgcatatttcaagaatatgtctaacccaaagattcctgctacaaaggcttttcaggctcctcccagtatcagtaactttcctcagggtaccgaagcagctcccttagggaccgcaatgactggttcagtagatgagaacgtctccattcatctaaaagtgcaattgctatgtagagcttaccaagttagaggtcatttaaaagcccatatagatcctttagggatctcatttggtagtaataaaaataaccctgttcctccggaattgactctagactactacggctttagcaaacacgatcttgataaagaaatcaacctaggacctggtatcctgccaaggtttacaagggacgggagatctaaaatgtctctgaaagagattgtggatcatctagaaaagttatattgttcctcttatggggtacaatacacacatattccatctaagcaaaagtgtgattggttaagagagagaattgagattcctgaaccttaccaatatacagtggaccaaaagagacaaatcttagatagattaacatgggccacttcttttgagtcattcttatctacaaaatttccaaatgataagaggttcggtttagaaggtttggaaagtgttgttccaggtattaaaactttggttgatcgttctgttgaattgggtgtagaagatattgttttgggtatggctcaccgtggtagattgaacgttttatccaatgtggtccgtaaaccaaatgaatctattttttctgaatttaagggttcgagcgctcgcgatgatattgaaggatcgggtgatgtcaagtaccatttgggtatgaactaccaaagaccaactacatctggtaagtacgtcaatttatcgctggtggcaaatccttctcatttagaatcccaagatccagttgttcttggtagaactagagctttattgcatgccaagaacgatttgaaggaaaaaacaaaggccttaggtgtgttattacatggtgatgctgcttttgctgggcagggtgttgtttatgaaaccatgggtttcttgaccctaccagaatactctactggtggtactattcatgttattacaaacaaccagatcggattcactacggatccaagatttgcaaggtccacaccatatccttccgatttggctaaggccattgatgccccaattttccatgttaacgctaatgacgtggaagctgtgacctttattttcaatttagccgcagaatggagacataagttccacacagatgccataattgatgtcgttggttggagaaaacatggacataatgaaaccgatcagccatcgtttactcaaccattaatgtacaaaaaaattgcaaaacaaaaatctgtcattgacgtctatacggaaaaattgataagtgaaggcacattttctaaaaaagatattgatgagcacaagaaatgggtatggaacttatttgaagatgctttcgaaaaggcaaaggattacgtcccatctcaaagagaatggttaactgctgcctgggaaggattcaaatccccaaaggaattggccactgagatattaccacatgaaccaactaatgttccagagagtactttgaaagaactaggtaaggtactctcttcgtggccagaaggttttgaagtgcacaaaaatctaaagagaattttgaaaaatagagggaaatctattgagacaggtgaaggcatcgattgggccaccggtgaagcattagcgttcggtacattggttttggatggtcagaacgttagggtttccggtgaagatgtagaaagaggtacattttctcaacgtcatgcagtcttgcatgaccaacaatctgaagccatttacacaccgctaagcactctgaataatgaaaaggcagacttcaccattgcaaattcctcgttgtctgagtacggtgtaatgggtttcgaatatggttattcgctaacctccccagattatctagtcatgtgggaggctcaattcggtgactttgcaaatacagcacaggttattattgaccaatttattgccggtggtgaacaaaaatggaagcaacgctctggtttagttttgtctttaccccatggttatgatggccaggggccagaacattcgtctggtagattggaaagattcttgcaactagccaatgaagacccaagatatttcccatctgaagaaaagctacagagacaacatcaggattgtaatttccaggttgtttatccaactacgcctgctaatttattccacattctaaggagacagcaacatcgtcaattccgtaaaccattggcgttattcttttctaaacagctgctgcgtcacccattggccagatcatctctttccgaattcactgaaggcggattccaatggattatcgaagatattgaacatggaaaaagtattggtacgaaagaggaaaccaagagattagttttgctgagtggccaagtgtacactgccctacataaaagacgtgaaagtttgggtgataagaccactgctttcttaaagattgaagagctgcacccattcccatttgctcagctacgtgattcattaaattcttatccaaacttggaagaaattgtttggtgccaggaagagccattgaacatgggttcgtgggcatacacagaaccacgcttacacacaacattaaaagaaacggataaatataaggatttcaaggtcagatactgtggtagaaacccaagtggtgctgttgctgccggtagcaaatcactacatttggccgaagaagatgcctttttgaaagatgttttccaacaatcctaa

SEQ ID NO: 6228 - protein, 1014 aa, Saccharomyces cerevisiae
MLRFVSSQTCRYSSRGLLKTSLLKNASTVKFVGRGLATTGTDNFLSTSNATYIDEMYQAWQKDPSSVHVSWDAYFKNMSNPKIPATKAFQAPPSISNFPQGTEAAPLGTAMTGSVDENVSIHLKVQLLCRAYQVRGHLKAHIDPLGISFGSNKNNPVPPELTLDYYGFSKHDLDKEINLGPGILPRFTRDGRSKMSLKEIVDHLEKLYCSSYGVQYTHIPSKQKCDWLRERIEIPEPYQYTVDQKRQILDRLTWATSFESFLSTKFPNDKRFGLEGLESVVPGIKTLVDRSVELGVEDIVLGMAHRGRLNVLSNVVRKPNESIFSEFKGSSARDDIEGSGDVKYHLGMNYQRPTTSGKYVNLSLVANPSHLESQDPVVLGRTRALLHAKNDLKEKTKALGVLLHGDAAFAGQGVVYETMGFLTLPEYSTGGTIHVITNNQIGFTTDPRFARSTPYPSDLAKAIDAPIFHVNANDVEAVTFIFNLAAEWRHKFHTDAIIDVVGWRKHGHNETDQPSFTQPLMYKKIAKQKSVIDVYTEKLISEGTFSKKDIDEHKKWVWNLFEDAFEKAKDYVPSQREWLTAAWEGFKSPKELATEILPHEPTNVPESTLKELGKVLSSWPEGFEVHKNLKRILKNRGKSIETGEGIDWATGEALAFGTLVLDGQNVRVSGEDVERGTFSQRHAVLHDQQSEAIYTPLSTLNNEKADFTIANSSLSEYGVMGFEYGYSLTSPDYLVMWEAQFGDFANTAQVIIDQFIAGGEQKWKQRSGLVLSLPHGYDGQGPEHSSGRLERFLQLANEDPRYFPSEEKLQRQHQDCNFQVVYPTTPANLFHILRRQQHRQFRKPLALFFSKQLLRHPLARSSLSEFTEGGFQWIIEDIEHGKSIGTKEETKRLVLLSGQVYTALHKRRESLGDKTTAFLKIEELHPFPFAQLRDSLNSYPNLEEIVWCQEEPLNMGSWAYTEPRLHTTLKETDKYKDFKVRYCGRNPSGAVAAGSKSLHLAEEDAFLKDVFQQS

SEQ ID NO: 6229 - DNA, 3054 bp, Arabidopsis thaliana
  CDS (1)..(3054)
atggtgtggtttcgtgctggttccagtgttacaaagctagctgttagaaggattttgaatcagggtgcttcgtatgcgacgaggacacggtctattccgtctcaaactcgttcctttcactcgactatatgcagaccaaaggctcagagtgctccagttcctagagctgttcctctttctaagctaactgatagtttcttagatgggacgagcagtgtctaccttgaggagttacaaagggcttgggaagctgatcctaacagtgtagatgagtcttgggataatttctttaggaactttgttggtcaggctgccacgtctcctggcatctctgggcagacaattcaggagagtatgaggctgttattacttgttagggcttatcaggtgaatggtcacatgaaagcgaagttggatccgttaggtttggaacagcgagagatccctgaggatcttgacttggctctttatggattcactgaggctgaccttgacagagagttcttcttgggggtgtggcagatgtcaggattcatgtctgagaaccgaccagtgcagacccttcgttccatattgacaaggctcgaacaggcatactgtgggaatatcggatttgagtatatgcacattgcagatcgagataaatgtaactggttgagagaaaagattgagacaccaactccttggcggtacaacagggagcgccgtgaggtgattctcgatcggcttgcatggagtactcagttcgagaatttcttagctaccaagtggacaacagccaaaagatttggacttgagggaggagaatcattaattcctggaatgaaggagatgtttgacagagcagcagatcttggagtagagagtattgttattggaatgtctcacagaggaagattgaatgttctgagtaatgttgttcggaagccactccgtcagatatttagtgagttcagtggtggtattaggcctgtagatgaagttggctacactggaactggtgatgtcaaatatcacttgggaacctcttatgatcgacctacaagaggtgggaagaaaatccatctctctttggttgctaatccaagtcacttggaagctgcagattctgttgttgttggcaaaaccagagcaaaacagtactactccaatgatttagacaggaccaaaaatttaggtattttgattcacggagatggtagttttgctggacaaggggtagtctatgaaactctccatcttagtgctcttccaaactacaccaccggaggaaccatacatattgtggtgaacaaccaagtggttttcacgacagatccaagggcggggagatcttcccagtattgtactgatgttgcaaaggctttgagtgctcccatctttcatgttaatggggatgatgttgaggctgttgttcatgcctgcgagcttgctgctgagtggcgtcagacttttcattctgatgttgtcgttgatttggtttgctaccgtaggttcgggcataatgagatagatgaaccatctttcactcagccaaaaatgtacaaggttatcaaaaatcatccttcaacccttcagatctaccacaaaaagctcttggaatgcggtgaagtatcacaacaggatattgaccggatacaggaaaaggttaacaccatcctcaatgaagaatttgtcgctagtaaggactatctccctaagaaacgagattggctttcaaccaactgggctggatttaagtctcctgagcagatctcacgtgttagaaacactggcgtcaaaccagagatactgaagactgttggcaaggcaatttcatctcttccagaaaacttcaagccacacagggcagtgaagaaagtttatgaacaacgtgcccaaatgattgaatcaggagagggagttgactgggcccttgcagaagctcttgcttttgctaccttagttgtggaaggcaatcatgtccgattgagtggtcaggatgtcgaacgaggaacatttagtcatcgtcattctgtccttcatgaccaggaaactggagaagagtattgtcctctagatcatctcatcatgaatcaggatcctgagatgtttactgttagcaacagttctctttcagaatttggtgtccttgggttcgaattgggttactccatggaaagcccgaactcgttggtactatgggaagctcagtttggagacttcgccaatggagctcaggtgatatttgatcagttcatcagcagtggagaagccaaatggctgcgtcaaaccgggcttgttatgctacttccccatggttatgatggtcagggacctgaacattcaagtgcgaggttggaacgttaccttcagatgagtgatgataatccctatgtcataccagacatggaaccaacaatgcgaaagcaaattcaagaatgtaattggcagattgtcaatgccacaactcccgccaactatttccatgttctgcggcgacagatacacagagacttccgtaagcctctgattgtaatggcaccaaagaacttgctccgtcacaaggactgcaaatcaaatctctcagagtttgatgatgtccaaggccacccaggttttgacaagcaaggaactagatttaagcgattaatcaaggatcagaatgatcactctgatcttgaagaaggcatcagaagattggtactttgctccggaaaggtctattatgagcttgatgatgaacggaagaaggttggcgcaacagatgttgctatctgtagagttgaacagctttgtcctttcccatatgatctcattcagcgtgagctcaagagatatccaaatgcggagatcgtttggtgccaagaagaggcgatgaacatgggagcattcagctacatatctccacggctatggacagcaatgagaagcgtaaacagaggagatatggaagacattaagtatgttggtcgtggtccttctgctgcaactgccacgggtttctatactttccatgtcaaagagcaagccgggcttgtccagaaagccatcgggaaggaacccatcaattaa

SEQ ID NO: 6230 - protein, 1017 aa, Arabidopsis thaliana
MVWFRAGSSVTKLAVRRILNQGASYATRTRSIPSQTRSFHSTICRPKAQSAPVPRAVPLSKLTDSFLDGTSSVYLEELQRAWEADPNSVDESWDNFFRNFVGQAATSPGISGQTIQESMRLLLLVRAYQVNGHMKAKLDPLGLEQREIPEDLDLALYGFTEADLDREFFLGVWQMSGFMSENRPVQTLRSILTRLEQAYCGNIGFEYMHIADRDKCNWLREKIETPTPWRYNRERREVILDRLAWSTQFENFLATKWTTAKRFGLEGGESLIPGMKEMFDRAADLGVESIVIGMSHRGRLNVLSNVVRKPLRQIFSEFSGGIRPVDEVGYTGTGDVKYHLGTSYDRPTRGGKKIHLSLVANPSHLEAADSVVVGKTRAKQYYSNDLDRTKNLGILIHGDGSFAGQGVVYETLHLSALPNYTTGGTIHIVVNNQVVFTTDPRAGRSSQYCTDVAKALSAPIFHVNGDDVEAVVHACELAAEWRQTFHSDVVVDLVCYRRFGHNEIDEPSFTQPKMYKVIKNHPSTLQIYHKKLLECGEVSQQDIDRIQEKVNTILNEEFVASKDYLPKKRDWLSTNWAGFKSPEQISRVRNTGVKPEILKTVGKAISSLPENFKPHRAVKKVYEQRAQMIESGEGVDWALAEALAFATLVVEGNHVRLSGQDVERGTFSHRHSVLHDQETGEEYCPLDHLIMNQDPEMFTVSNSSLSEFGVLGFELGYSMESPNSLVLWEAQFGDFANGAQVIFDQFISSGEAKWLRQTGLVMLLPHGYDGQGPEHSSARLERYLQMSDDNPYVIPDMEPTMRKQIQECNWQIVNATTPANYFHVLRRQIHRDFRKPLIVMAPKNLLRHKDCKSNLSEFDDVQGHPGFDKQGTRFKRLIKDQNDHSDLEEGIRRLVLCSGKVYYELDDERKKVGATDVAICRVEQLCPFPYDLIQRELKRYPNAEIVWCQEEAMNMGAFSYISPRLWTAMRSVNRGDMEDIKYVGRGPSAATATGFYTFHVKEQAGLVQKAIGKEPIN

SEQ ID NO: 6231 - DNA, 2760 bp, Drosophila melanogaster
  CDS (1)..(2760)
atgctgcgttatctggcgctttcggaggcgggaatcgcaaaactgccacgcccacaatcgcggtgctatcacagcgaaaagggcgtttggggctataagccgattgcccagcgtgaatttcaagtggccgaggatgtgcgggcctcaaggaactcgcaggccaacgtctatcgctttgtggaggcctttcgccagcatgggcacaaattggcagccgtaaatcccatcagcatcaggacgagccagcaggagctgcaggaattaagtcccgcattttatggactgcagacacaggagccggtgcgcaccgatggccttttaagtggtccgcaggtggcccacaacgtcgcccagcttgagcagctgctcaaggacatttactgcggccgctcaaccagcgccgagttctcctacgtcgaggacatcgaggagcgtgagtggctggcccggaactttgagacgctggaccagcagcagctgggaaaaagcgagcgctgcgaaatcgccgagctgttaattaagtcgcaggcctgggacaatttcatggcactcaagtttcccacagtcaagcgatacggaggcgaaggagccgagtccatgctagccttcttctggcaactgctccgtgacagtgtccaagcgaacatcgagcacgtggtcctggcgatgccccatcgaggaaggactccgctgcaggcggcgctcctcaacatgcggccggcgaaggttttccgcaaactcggcggcgcatccgagttttccgaagacatcgaggccatgtccgacgtcataagtcatttccatgtttccgagcagctgaaaatactgggcaagaagctgagcttcagcatggtgcggaatccctcccatctggaggcggccaatcctgtggccatgggaaaaacgcgatcgaaacagcaagccagaggagagggtgccttcggggatggcagtcagccctttggagagcacgtgctcaacgtaatccttcatggtgatgctgcgttcgccggccagggaatcaaccaggagtgcctcaacatggcctatgtgcctcacttcgaggtgggcggaagtctgcacctgattgtcaacaaccaggtgggattcaccacgcccggagatcgaggacgatccactgcctacacctcagacttggccaagtctattcaggctcctgtgttccatgtcaacggcgatgatcccgaggctttggccagggtcacaagcttggcctttaggtaccagagggaattccgcaaagacatctttattgatctgaactgcttcagaaggtggggtcacaacgagctggatgaccccaccttcaccaatcccttggtctacaagattgttcaccagcgggaatcggttccggacttgtatgcccagcagttggccaaggagcaggttctatcagaatcgaaggccaaggagatgagggatgagtacatgaaatatctaggcgaggagctagccttggctcctgcataccagccaccaccttcctacttcgagaagcagtggacgaactttcagttggctccctccaaggagctaacctattgggacactggcttggattactcactacttcattacattggtcagcagagtgtgactttccccgaagactttaacatccatccccacctgctgaaaacgcatgtcaatgctcggctgaagaaactggaaaacggagtcaagatcgattggtccacagccgaagccctggctattgggagcctgatgtaccagggacacaatgtgaggatcagtggtgaggacgtgggtcggggaaccttctcccatcgccacgccatgctggtggatcagcagaccaacgagatgttcattcccttgaacagcatggagggcggaaacggtggaaaactggagctggctcacagtattctgtcggaggaggcggtgctgggattcgagtacggcatggccattgacaatcccaacaacctgattatctgggaagcgcagtttggtgactttgccaatggagcacaaattataatcgacaccttcatcgtctcgggagaaaccaagtggatggagtccaacgcccttgtgatgctactgccccacggatacgacggcgctgcatcggagcacagttcctgtcgcatcgagcgcttcctgcagctctgcgactccaaggaaacatccgccgatggcgattccgtcaacgtgcacatcgtgaaccccaccacgcccgcccaatactatcatgtgctgcgtcgccaactggcaaggaacttccgcaagcccctcgtggtggtggcccccaaaacgttgctccgtcttcctgcggccacatccacgcacgaggacttccagccgggcacgctcttccacaatgtcctgggagacaccatagcgaagcctgagcaggtgcgcaaggtcatcctgtgcagtggaaagcactactacactctcgccgaggagcgggagaagcggcaggcctacgacacggccattctgcgcctggagtccctgtgtcctttccccatccaggagctgcaggcccagctggcccagtacggcaacgtgcaatcttttgtttggagccaggaggagcatcgcaacatgggcgcctggacgtttgtgcggccacgttttgaaaatttaattggccaacagctccactactgcggtcgctgcgaggcacccacccccgccaccggaatcggaaaagtgcataaacgggaagtcgatgagattgatgctgccccattcgaactttag

SEQ ID NO: 6232 - protein, 919 aa, Drosophila melanogaster
MLRYLALSEAGIAKLPRPQSRCYHSEKGVWGYKPIAQREFQVAEDVRASRNSQANVYRFVEAFRQHGHKLAAVNPISIRTSQQELQELSPAFYGLQTQEPVRTDGLLSGPQVAHNVAQLEQLLKDIYCGRSTSAEFSYVEDIEEREWLARNFETLDQQQLGKSERCEIAELLIKSQAWDNFMALKFPTVKRYGGEGAESMLAFFWQLLRDSVQANIEHVVLAMPHRGRTPLQAALLNMRPAKVFRKLGGASEFSEDIEAMSDVISHFHVSEQLKILGKKLSFSMVRNPSHLEAANPVAMGKTRSKQQARGEGAFGDGSQPFGEHVLNVILHGDAAFAGQGINQECLNMAYVPHFEVGGSLHLIVNNQVGFTTPGDRGRSTAYTSDLAKSIQAPVFHVNGDDPEALARVTSLAFRYQREFRKDIFIDLNCFRRWGHNELDDPTFTNPLVYKIVHQRESVPDLYAQQLAKEQVLSESKAKEMRDEYMKYLGEELALAPAYQPPPSYFEKQWTNFQLAPSKELTYWDTGLDYSLLHYIGQQSVTFPEDFNIHPHLLKTHVNARLKKLENGVKIDWSTAEALAIGSLMYQGHNVRISGEDVGRGTFSHRHAMLVDQQTNEMFIPLNSMEGGNGGKLELAHSILSEEAVLGFEYGMAIDNPNNLIIWEAQFGDFANGAQIIIDTFIVSGETKWMESNALVMLLPHGYDGAASEHSSCRIERFLQLCDSKETSADGDSVNVHIVNPTTPAQYYHVLRRQLARNFRKPLVVVAPKTLLRLPAATSTHEDFQPGTLFHNVLGDTIAKPEQVRKVILCSGKHYYTLAEEREKRQAYDTAILRLESLCPFPIQELQAQLAQYGNVQSFVWSQEEHRNMGAWTFVRPRFENLIGQQLHYCGRCEAPTPATGIGKVHKREVDEIDAAPFEL

SEQ ID NO: 6233 - DNA, 3030 bp, Arabidopsis thaliana
  CDS (1)..(3030)
atggtgtggtttcgtgctggttccagtgttacaaagctagctgttagaaggattttgaatcagggtgcttcgtatgcgacgaggacacggtctattccgtctcaaactcgttcctttcactcgactatatgcagaccaaaggctcagagtgctccagttcctagagctgttcctctttctaagctaactgatagtttcttagatgggacgagcagtgtctaccttgaggagttacaaagggcttgggaagctgatcctaacagtgtagatgagtcttgggataatttctttaggaactttgttggtcaggctgccacgtctcctggcatctctgggcagacaattcaggagagtatgaggctgttgttacttgttagggcttatcaggtgaatggtcacatgaaagcgaagttggatccgttaggtttggaacagcgagagatccctgaggatcttgacttggctctttatggattcactgaggctgaccttgacagagagttcttcttgggggtgtggcagatgtcaggattcatgtctgagaaccgaccagtgcagacccttcgttccatattgacaaggctcgaacaggcatactgtgggaatatcggatttgagtatatgcacattgcagatcgagataaatgtaactggttgagagaaaagattgagacaccaactccttggcggtacaacagggagcgccgtgaggtgattctcgatcggcttgcatggagtactcagttcgagaatttcttagctaccaagtggacaacagccaaaagatttggacttgagggaggagaatcattaattcctggaatgaaggagatgtttgacagagcagcagatcttggagtagagagtattgttattggaatgtctcacagaggaagattgaatgttctgggtaatgttgttcggaagccactccgtcagatatttagtgagttcagtggtggtattaggcctgtagatgaagttggctacactggaactggtgatgtcaaatatcacttgggaacctcttatgatcgacctacaagaggtgggaagaaaatccatctctctttggttgctaatccaagtcacttggaagctgcagattctgttgttgttggcaaaaccagagcaaaacagtactactccaatgatttagacaggaccaaaaatttaggtattttgattcacggagatggtagttttgctggacaaggggtagtctatgaaactctccatcttagtgctcttccaaactacaccaccggaggaaccatacatattgtggtgaacaaccaagtggctttcacgacagatccaagggcggggagatcttcccagtattgtactgatgttgcaaaggctttgagtgctcccatctttcatgttaatggggatgatgttgaggctgttgttcatgcctgcgagcttgctgctgagtggcgtcagacttttcattctgatgttgtcgttgatttggtttgctaccgtaggttcgggcataatgagatagatgaaccatctttcactcagccaaaaatgtacaaggttatcaaaaatcatccttcaacccttcagatctaccacaaaaagctcttggaatgcggtgaagtatcacaacaggatattgaccggatacaggaaaaggttaacaccatcctcaatgaagaatttgtcgctagtaaggactatctccctaagaaacgagattggctttcaaccaattgggctggatttaagtctcctgagcagatctcacgtgttagaaacactggcgtcaaaccagagatactgaagactgttggcaaggcaatttcatctcttccagaaaacttcaagccacacagggcagtgaagaaagtttatgaacaacgtgcccaaatgattgaatcaggagagggagttgactgggcccttgcagaagctcttgcttttgctaccttagttgtggaaggcaatcatgtccgattgagtggtcaggatgtcgaacgaggaacatttagtcatcgtcattctgtccttcatgaccaggaaactggagaagagtattgtcctctagatcatctcatcatgaatcaggatcctgagatgtttactgttagcaacagttctctttcagaatttggtgtccttgggttcgaattgggttactccatggaaagcccgaactcgttggtactatgggaagctcagtttggagacttcgccaatggagctcaggtgatatttgatcagttcatcagcagtggagaagccaaatggctgcgtcaaaccgggcttgttatgctacttccccatggttatgatggtcagggacctgaacattcaagtgcgaggttggaacgttaccttcagatgagtgatgataatccctatgtcataccagacatggaaccaacaatgcgaaagcaaattcaagaatgtaattggcagattgtcaatgccacaactcccgccaactatttccatgttctgcggcgacagatacacagagacttccgtaagcctctgattgtaatggcaccaaagaacttgctccgtcacaaggactgcaaatcaaatctctcagagtttgatgatgtccaaggccacccaggttttgacaagcaaggaactagatttaagcgattaatcaaggatcagaatgatcactctgatcttgaagaaggcatcagaagattggtactttgctccggaaaggtctattatgagcttgatgatgaacggaagaaggttggcgcaacagatgttgctatctgtagagttgaacagctttgtcctttcccatatgatctcattcagcgtgagctcaagagatatccaaaagaggcgatgaacatgggagcattcagctacatatctccacggctatggacagcaatgagaagcgtaaacagaggagatatggaagacattaagtatgttggtcgtggtccttctgctgcaactgccacgggtttctatactttccatgtcaaagagcaagccgggcttgtccagaaagccatcggaaaggaacccatcaattaa

SEQ ID NO: 6234 - protein, 1009 aa, Arabidopsis thaliana
MVWFRAGSSVTKLAVRRILNQGASYATRTRSIPSQTRSFHSTICRPKAQSAPVPRAVPLSKLTDSFLDGTSSVYLEELQRAWEADPNSVDESWDNFFRNFVGQAATSPGISGQTIQESMRLLLLVRAYQVNGHMKAKLDPLGLEQREIPEDLDLALYGFTEADLDREFFLGVWQMSGFMSENRPVQTLRSILTRLEQAYCGNIGFEYMHIADRDKCNWLREKIETPTPWRYNRERREVILDRLAWSTQFENFLATKWTTAKRFGLEGGESLIPGMKEMFDRAADLGVESIVIGMSHRGRLNVLGNVVRKPLRQIFSEFSGGIRPVDEVGYTGTGDVKYHLGTSYDRPTRGGKKIHLSLVANPSHLEAADSVVVGKTRAKQYYSNDLDRTKNLGILIHGDGSFAGQGVVYETLHLSALPNYTTGGTIHIVVNNQVAFTTDPRAGRSSQYCTDVAKALSAPIFHVNGDDVEAVVHACELAAEWRQTFHSDVVVDLVCYRRFGHNEIDEPSFTQPKMYKVIKNHPSTLQIYHKKLLECGEVSQQDIDRIQEKVNTILNEEFVASKDYLPKKRDWLSTNWAGFKSPEQISRVRNTGVKPEILKTVGKAISSLPENFKPHRAVKKVYEQRAQMIESGEGVDWALAEALAFATLVVEGNHVRLSGQDVERGTFSHRHSVLHDQETGEEYCPLDHLIMNQDPEMFTVSNSSLSEFGVLGFELGYSMESPNSLVLWEAQFGDFANGAQVIFDQFISSGEAKWLRQTGLVMLLPHGYDGQGPEHSSARLERYLQMSDDNPYVIPDMEPTMRKQIQECNWQIVNATTPANYFHVLRRQIHRDFRKPLIVMAPKNLLRHKDCKSNLSEFDDVQGHPGFDKQGTRFKRLIKDQNDHSDLEEGIRRLVLCSGKVYYELDDERKKVGATDVAICRVEQLCPFPYDLIQRELKRYPKEAMNMGAFSYISPRLWTAMRSVNRGDMEDIKYVGRGPSAATATGFYTFHVKEQAGLVQKAIGKEPIN

SEQ ID NO: 6235 - DNA, 3264 bp, Neurospora crassa
  CDS (1)..(3264)
atgcacagcagcacagctggacggcagcactcgctcgctcttgcagtttgcaccgacaggtcgaccgaccgcccgactccagtgagtggacggagcaactcgacgcacctgcacggcgggcagaccacccatcatgttgcgcggttccatccgggccctgcagaccgcagcgcctcaaaacgatgctattcccaggtcgcccagaccaccagggcctccctcaagcccgccgttggccgccgtcccctggccgtctcccagcagaggcgccatgagagcgccctccacagcccgcccgaccccaacgacaacttcctctcgggcagcgccgccaactatatcgacgagatgtacctccagtggaagcaggaccccaagagcgtccacgtctcgtggcaggtctacttcaagaacatggagagcggcaacatgcccatctcccaggccttccagcctcctcccagcctggttcccggtgccgccaacgtggtgcccggtctcgctgccggcgccggcgtcggcattggcgagggtgccaacgtcaccaaccacttgaaggtccagctcctcgtccgcgcctaccaggcccgtggtcaccacaaggccaacattgaccctctgggcatccgcaacactcctgcctccaagggcttcggcaacatcaggcccaaggagctcacccccgaatactacggcttcaccgagaaggatctcgacaccgagtacagcctcggccccggcatcctcccccgtttcgcccgcgatggccgcgagaagatgacgctccgcgagatcatcgacgcctgcgagaagatctactgcggctcctatggtgtcgagttcatccacatccccgacagggagaagtgcgactggctccgtgagcgtctcgagatcccccagcctttcaagtactcgatcgatgagaagcgccgcattctcgaccgcctcatctggtcctccagcttcgagtccttcctcgccaccaagtaccccaacgacaagcgtttcggtctcgagggttgcgagacccttgttcctggtatgaaggccctcatcgaccgctccgttgactacggcgtcaaggacatcgtcattggtatgccccatcgtggccgtctcaacgtcctctccaacgtcgtccgcaagcccaacgaggccatcttttccgaattcgccggcatggccggtgccgatgaggagggttccggtgatgtcaagtaccacttgggtatgaacttcgagcgccctaccccctcgggcaagcgcgtccagctctccctcgttgccaacccctcgcatctcgaggctgaggaccccgtcgtcctcggcaaggtccgcgccatccagcactacaacaacgacgagagtgaccacaagagcgccatgggtgtcctcctccacggtgatgccgccatcgctggtcagggtatcgtctacgagtgcttgggcttccacaacctccccgccttctctaccggtggtaccatccacttggttgtcaacaaccagatcggtttcaccactgacccccgttttgcccgctccactgcctactgcacggatatcgccaaggccattgacgcccctgtcttccacgtcaatgctgacgatgtcgaggctgtcaacttcgtctgccagctcgcttctgactggcgtgccgagttcaagcaggatgttatcatcgaccttgtctgctaccgcaagcacggccacaacgagaccgaccagcctgcctttactcagcccctcatgtacaagcgcatcagcgaaaagagccctcagatcgacatctacgttgaccagctcctcaaggagggcaccttcaccaaggaggacatcgaggagcacaagcagtgggtctggggcatgctcgaggagagcttctccaagtccaaggactaccagcccacttccaaggagtggaccaccagcgcctggaacaacttcaagagccccaaggagcttgctagcgaggttctcccccacatgcctaccgcggttgacaagccgacccttgagcacattggtaccgtcattggcagcactcccgagggcttccatgcccaccgtaacctgaagcgtatcctgaccaaccgcaccaagtccgttgtggagggcaagggcatcgactgggctaccgctgaggctcttgcctttggtaccctcgtcaaggagggccaccacgtccgtatcaccggtcaggatgtcgagcgtggtaccttctctcagcgccacgccgtcttccacgaccaggagactgaagacacctacattcctctccagcatatcagcgaggaccaggcccccttcgtcatctccaactcttccctctccgagtatggtatcctcggtttcgagtacggttactctctccaggaccccaacggcttcaacatgtgggaggcccagttcggtgatttcgccaacactgctcaggtcatcattgatcagttccttgcctctggtgagagcaagtggatgcagcgtaccggcctcgtcatgtctctcccccacggttatgacggccagggtcccgagcactcttccgctcgtatggagcgtttcctctcgctttgcaacgaggatcctcgcatctacccctcccccgagaagcttgaacgtcagcaccaggactgcaacatgcagattgcctacatgacctcccctgccaacctcttccacattctccgccgccagctgaagagacagttccgcaagcctctcgtcattttcttctccaaggcgctcttgcgtcaccccgttgctcgttccgacatcgaggagttcactgacgacgcccacttccgctggatccttcccgactctgctcaccagactggtgagatcaaggcccctgaggagattgagcgtgtcattctctgcactggtcaggtctatgccgctctcctcaagcaccgccaggacaacaagatcgacaacgtcgccatcactcgtatcgagcagctccaccccttcccctgggagcagctccgtgagaacctcgaccagtacaccaacgccaagaccatcgtctgggcccaggaggagcccctcaacgctggtgcctggtcttacacccagcctcgtcttgagactcttctcaaccacaccaagcaccatgaccgcaagcacgtcatgtacgctggtcgtgctcccagcgcttctgtcgctactggcaagaagtcttctcacgtcaaggaggagaaggagcttgtcgacatggctttctctgttactcagagcaagctcaagggcgagtaa

SEQ ID NO: 6236 - protein, 1087 aa, Neurospora crassa
MHSSTAGRQHSLALAVCTDRSTDRPTPVSGRSNSTHLHGGQTTHHVARFHPGPADRSASKRCYSQVAQTTRASLKPAVGRRPLAVSQQRRHESALHSPPDPNDNFLSGSAANYIDEMYLQWKQDPKSVHVSWQVYFKNMESGNMPISQAFQPPPSLVPGAANVVPGLAAGAGVGIGEGANVTNHLKVQLLVRAYQARGHHKANIDPLGIRNTPASKGFGNIRPKELTPEYYGFTEKDLDTEYSLGPGILPRFARDGREKMTLREIIDACEKIYCGSYGVEFIHIPDREKCDWLRERLEIPQPFKYSIDEKRRILDRLIWSSSFESFLATKYPNDKRFGLEGCETLVPGMKALIDRSVDYGVKDIVIGMPHRGRLNVLSNVVRKPNEAIFSEFAGMAGADEEGSGDVKYHLGMNFERPTPSGKRVQLSLVANPSHLEAEDPVVLGKVRAIQHYNNDESDHKSAMGVLLHGDAAIAGQGIVYECLGFHNLPAFSTGGTIHLVVNNQIGFTTDPRFARSTAYCTDIAKAIDAPVFHVNADDVEAVNFVCQLASDWRAEFKQDVIIDLVCYRKHGHNETDQPAFTQPLMYKRISEKSPQIDIYVDQLLKEGTFTKEDIEEHKQWVWGMLEESFSKSKDYQPTSKEWTTSAWNNFKSPKELASEVLPHMPTAVDKPTLEHIGTVIGSTPEGFHAHRNLKRILTNRTKSVVEGKGIDWATAEALAFGTLVKEGHHVRITGQDVERGTFSQRHAVFHDQETEDTYIPLQHISEDQAPFVISNSSLSEYGILGFEYGYSLQDPNGFNMWEAQFGDFANTAQVIIDQFLASGESKWMQRTGLVMSLPHGYDGQGPEHSSARMERFLSLCNEDPRIYPSPEKLERQHQDCNMQIAYMTSPANLFHILRRQLKRQFRKPLVIFFSKALLRHPVARSDIEEFTDDAHFRWILPDSAHQTGEIKAPEEIERVILCTGQVYAALLKHRQDNKIDNVAITRIEQLHPFPWEQLRENLDQYTNAKTIVWAQEEPLNAGAWSYTQPRLETLLNHTKHHDRKHVMYAGRAPSASVATGKKSSHVKEEKELVDMAFSVTQSKLKGE

SEQ ID NO: 6237 - DNA, 3084 bp, Arabidopsis thaliana
  CDS (1)..(3084)
atggtttggtttagaatcggttcttctgtggcaaagcttgccataagaaggacactgtctcagtctcgttgtggttcatatgccactagaacaagggttttgccttgtcaaaccagatgttttcactctacaatactcaaatcaaaggcagagtctgctgcacctgttccacgtcctgtcccactttctaagctaactgatagcttcttagatggaacaagcagtgtgtatctagaggagttacaaagagcttgggaggctgatcccaacagtgttgatgagtcgtgggataacttttttaggaattttgtgggtcaggcttctacatcgcctggtatctcggggcaaaccattcaagaaagcatgcgtttgttgttgctagttagagcttaccaggttaatggccacatgaaggccaagcttgatcctttaggtctagagaagagagagattccagaggatctcacgccaggtctttatgggtttactgaggctgatcttgatcgggaattctttctgggtgtatggaggatgtcgggttttctctctgagaaccgcccggttcaaacactgaggtcgatactgtcgaggcttgagcaagcttactgtgggactatagggtatgagtacatgcacattgctgatagggataaatgtaactggttgagagacaagatcgagaccccaactcctcgacagtacaatagtgagcgtcggatggttatttatgataggcttacctggagcacacagtttgagaatttcttggctactaagtggaccacggctaaaaggtttggactggaaggtgctgaatctttgattcctggcatgaaggagatgttcgataggtctgcagatctcggggtagagaacatagttatcggtatgccccataggggtcgacttaatgttttgggtaatgttgttagaaaacctctacgccaaatattcagcgagtttagcggtggtactaggccagtagatgaagttgggctttacaccggaacaggtgatgtgaaataccacttgggtacatcttatgatcgtccaactagaggaggcaaacatctccacttgtctttggtagcaaatcccagtcacttggaagcagtagatcctgttgtgataggtaaaaccagagcgaaacaatattacacgaaagacgagaacagaacaaagaacatgggtattttgatccatggggatggtagctttgccggacaaggagtggtgtatgaaactctccatcttagtgcacttcctaactactgtaccggtggaacagtgcacattgtggtgaataatcaagtggctttcacaaccgatcccagggaaggaaggtcttcacagtattgcactgatgttgcaaaggctttgagcgccccaattttccatgtcaatgcagatgacattgaagcagtagtgcatgcttgtgagcttgctgctgagtggcgccagacgttccattctgatgttgttgttgatttagtatgctaccgtcgctttgggcataacgagatagacgaaccgtcattcacacaaccaaaaatgtacaaggtgatacgcagtcatccctcgtcacttcaaatctaccaggagaagctcttgcaatctggacaggtaacccaagaagatattgataagattcaaaagaaagtaagctctatcctcaatgaagaatatgaggcaagtaaagattatattccacaaaaacgtgactggctggcaagtcactggactggattcaagtctccggagcagatttctaggattcgaaacaccggagtgaagccagagattttgaagaatgtgggaaaggcaatctcaaccttccctgagaactttaagccacacagaggagttaaaagagtaagagtttatgaacaacgtgctcaaatgattgaatcgggagaaggcattgactggggacttggagaagcacttgcttttgctacactggttgtggaagggaaccatgttcggctaagtggtcaagatgttgaaagaggaactttcagtcatagacactcagtgcttcatgatcaagaaaccggggaggaatattgtcccctcgatcacctaatcaaaaaccaagaccctgaaatgttcactgtcagcaacagctccctttcagaatttggtgttctcggtttcgaactgggttattcgatggaaaatcccaattctctggtgatatgggaagctcagtttggagactttgctaatggcgcacaagttatgtttgatcagttcataagcagtggggaagccaaatggctccgtcaaactggtctagtagttttacttcctcatggatatgatggtcagggtcctgaacattccagtggaagattggaacgtttccttcagatgagtgatgacaatccttacgttatccctgagatggacccaactcttcgaaagcagattcaagaatgtaattggcaagttgttaatgttactacacctgccaactatttccatgttctgcgtcggcagatacacagggactttcgcaagcctcttatagtgatggcccccaaaaacttgcttcgtcacaaacagtgtgtatctaatctctcggaattcgatgatgttaaaggacatcctggatttgacaagcaaggaactcgatttaaacggttgatcaaagatcaaagtggccactctgatcttgaagaaggtatcagacgtctagtcctctgctctgggaaggtctactatgagcttgacgaagagcgaaagaagtctgaaacaaaggatgtagccatttgcagagtagagcagctttgcccatttccatatgatctcatccaaagagaactaaagcgatatccaaatgcagagatcgtgtggtgtcaagaagagccgatgaacatgggaggataccaatacatagccctaaggctttgcaccgcgatgaaagcactgcaaagaggaaacttcaacgacatcaaatacgttggtcgtcttccctcagctgctacagccacaggattttaccagcttcatgttaaggagcagactgatcttgtgaagaaagctcttcaacctgaccccatcacccccgtcatcccttaa

SEQ ID NO: 6238 - protein, 1027 aa, Arabidopsis thaliana
MVWFRIGSSVAKLAIRRTLSQSRCGSYATRTRVLPCQTRCFHSTILKSKAESAAPVPRPVPLSKLTDSFLDGTSSVYLEELQRAWEADPNSVDESWDNFFRNFVGQASTSPGISGQTIQESMRLLLLVRAYQVNGHMKAKLDPLGLEKREIPEDLTPGLYGFTEADLDREFFLGVWRMSGFLSENRPVQTLRSILSRLEQAYCGTIGYEYMHIADRDKCNWLRDKIETPTPRQYNSERRMVIYDRLTWSTQFENFLATKWTTAKRFGLEGAESLIPGMKEMFDRSADLGVENIVIGMPHRGRLNVLGNVVRKPLRQIFSEFSGGTRPVDEVGLYTGTGDVKYHLGTSYDRPTRGGKHLHLSLVANPSHLEAVDPVVIGKTRAKQYYTKDENRTKNMGILIHGDGSFAGQGVVYETLHLSALPNYCTGGTVHIVVNNQVAFTTDPREGRSSQYCTDVAKALSAPIFHVNADDIEAVVHACELAAEWRQTFHSDVVVDLVCYRRFGHNEIDEPSFTQPKMYKVIRSHPSSLQIYQEKLLQSGQVTQEDIDKIQKKVSSILNEEYEASKDYIPQKRDWLASHWTGFKSPEQISRIRNTGVKPEILKNVGKAISTFPENFKPHRGVKRVRVYEQRAQMIESGEGIDWGLGEALAFATLVVEGNHVRLSGQDVERGTFSHRHSVLHDQETGEEYCPLDHLIKNQDPEMFTVSNSSLSEFGVLGFELGYSMENPNSLVIWEAQFGDFANGAQVMFDQFISSGEAKWLRQTGLVVLLPHGYDGQGPEHSSGRLERFLQMSDDNPYVIPEMDPTLRKQIQECNWQVVNVTTPANYFHVLRRQIHRDFRKPLIVMAPKNLLRHKQCVSNLSEFDDVKGHPGFDKQGTRFKRLIKDQSGHSDLEEGIRRLVLCSGKVYYELDEERKKSETKDVAICRVEQLCPFPYDLIQRELKRYPNAEIVWCQEEPMNMGGYQYIALRLCTAMKALQRGNFNDIKYVGRLPSAATATGFYQLHVKEQTDLVKKALQPDPITPVIP

SEQ ID NO: 6239 - DNA, 2832 bp, Azotobacter vinelandii
  CDS (1)..(2832): transl_table=11
atgcaagatagcgttatgcagcgcatgtggaacagtgcccacctttccggtggaaatgctgcttatgtggaagagctctatgagctttacctgcacgaccccaacgctgtgcccgaagagtggcgcacctatttcgagaagctgcccgccgaagccggtacctccaccgatgttccgcacgctcccgtccgcgaccagttcgttctgctggccaagaaccagcggcgtgcacagccggtcgcaacctccagcgtaagcaccgaacacgagaagaagcaggtcgaagtcctgcgtctgatccaggcttaccgcacgcgcggccatcaggcctcgcaactggatccgctcggtctgtggcagcgcactgcgccttccgacctgtcgatcacccattacgggctgaccaacgccgatctggatacccccttccgtaccggagagctctacatcggtaaggaagaggcgaccctacgcgaaatcctgcaggcattgcaggagacatattgccgcactatcggcgccgaattcacccatatcgtcgattccgagcagcgcaactggttcgcccagcgcctggaaagcgtacgcggtcgtccggtgtactccaaggaggcgaaaagccacctgctcgagcgcctgagcgctgccgaaggcctggaaaaatacctgggcaccaaatatccgggcaccaagcgcttcggtttggaaggcggcgagagcctggtgccggtcgtcgacgagatcatccagcgctcaggctcctacggcaccaaggaagtcgtcatcggcatggctcaccgcggccgtctgaacctgctggtcaacgcgctgggcaagaatccacgcgacctgttcgacgagttcgaaggcaagcatctggtcgaactgggctccggtgacgtgaagtaccaccagggcttctcctccaacgtgatgacctcgggtggcgaagtgcacctggccatggcgttcaacccctcgcacctggaaatcgtctccccggtggtcgagggctccgtgcgtgcccgccaggaccgtcgcgtcgacgctaccggcgagaaggtggtaccgatctccatccacggcgactcggcctttgccggtcagggcgtggtgatggaaaccttccagatgtcgcagatccgcggctacaagacgggcggtaccattcacatcgtggtcaacaaccaggtcggcttcaccaccagtaacccggtcgacacccgttcgaccgagtactgcaccgatccggcgaagatgattcaggcgccggtactgcacgtcaacggcgacgatccggaagccgtgctgttcgtgacccaactggccgtcgactatcgcatgcagttcaagcgcgacgtagtcatcgatctggtctgctaccgccgtcgcggtcacaacgaggccgacgagccgagcggcacccagccgctgatgtaccagaagatcgccaagcagcccaccacccgcgagctgtatgccgacgcgctggtcaaggagggcagcctgagccaggaagaagtccaggccaaggtcgacgaataccgtaccgcgctggataacggtcagcacgtgctcaagagcctggtcaaggagccgaacaccgagctgttcgtcgactggaccccctatctgggccatgcctggaccgctcgtcacgacaccagcttcgagctgaagaccctgcaggaactgaacgccaagctgctgcagatcccggaaggtttcgtggtccagcgccaggttgccaagatcctcgaggatcgcggccgcatgggcgtcggcgccatgccgatcaactggggctgcgccgagaccctggcctacgccactctgctgaaggaaggccatccggtacgcatcaccggtcaggacgtcggccgtggcaccttctcgcaccgccatgccgcgctgcacaaccagaaggatgccagccgctacatcccgctgcagaacctctacgagggacagccgaagttcgagctgtatgattccttcctctcggaagaggccgtgctggccttcgaatacggctatgccaccaccacgccgaacgcgctggtgatctgggaagccagttccggcgacttcgccaacggtgcccaggtggtgatcgaccagttcatcagcagcggcgagaccaagtggggagccctgtgcggcctgaccatgctgctgccgcacggctacgagggccagggtccggagcactcttccgcacgtctggagcgctacctgcaactgtgcgccgagcagaacatccaggtgtgcgtgccgaccaccccggcgcaggtctaccacatgctgcgtcgccaggtgatccgcccgctgcgcaagccgctggtggccttgacgccgaagtcgctgctgcgtcacaaatcggcgatctccaccctggaagatctggctctcggctccttccatccggtcctgccggaggtcgatagcctcgatccgaagaaggtcgagcgtctggtcctgtgcagcggcaaggtctactacgacctgctggacaagcgccatgccgaaggtcgcgaggacatcgccatcgtccgtatcgagcagctctatccgttcccggaagaggaactggccgaggtcatggcgccgtacaccaacctcaagcatgtggtctggtgtcaggaagagccgatgaaccagggcgcctggtactgcagtcagcatcacatgcgtcgcgtcgccagcgcgcacaagaaggagctgttcctccagtatgctggtcgcgaggcgtcggccgctccggcttgcggttacgcgtcgatgcatgccgagcagcaggaaaaactgctgcaggacgctttcactgtttaa

SEQ ID NO: 6240 - protein, 943 aa, Azotobacter vinelandii
MQDSVMQRMWNSAHLSGGNAAYVEELYELYLHDPNAVPEEWRTYFEKLPAEAGTSTDVPHAPVRDQFVLLAKNQRRAQPVATSSVSTEHEKKQVEVLRLIQAYRTRGHQASQLDPLGLWQRTAPSDLSITHYGLTNADLDTPFRTGELYIGKEEATLREILQALQETYCRTIGAEFTHIVDSEQRNWFAQRLESVRGRPVYSKEAKSHLLERLSAAEGLEKYLGTKYPGTKRFGLEGGESLVPVVDEIIQRSGSYGTKEVVIGMAHRGRLNLLVNALGKNPRDLFDEFEGKHLVELGSGDVKYHQGFSSNVMTSGGEVHLAMAFNPSHLEIVSPVVEGSVRARQDRRVDATGEKVVPISIHGDSAFAGQGVVMETFQMSQIRGYKTGGTIHIVVNNQVGFTTSNPVDTRSTEYCTDPAKMIQAPVLHVNGDDPEAVLFVTQLAVDYRMQFKRDVVIDLVCYRRRGHNEADEPSGTQPLMYQKIAKQPTTRELYADALVKEGSLSQEEVQAKVDEYRTALDNGQHVLKSLVKEPNTELFVDWTPYLGHAWTARHDTSFELKTLQELNAKLLQIPEGFVVQRQVAKILEDRGRMGVGAMPINWGCAETLAYATLLKEGHPVRITGQDVGRGTFSHRHAALHNQKDASRYIPLQNLYEGQPKFELYDSFLSEEAVLAFEYGYATTTPNALVIWEASSGDFANGAQVVIDQFISSGETKWGALCGLTMLLPHGYEGQGPEHSSARLERYLQLCAEQNIQVCVPTTPAQVYHMLRRQVIRPLRKPLVALTPKSLLRHKSAISTLEDLALGSFHPVLPEVDSLDPKKVERLVLCSGKVYYDLLDKRHAEGREDIAIVRIEQLYPFPEEELAEVMAPYTNLKHVVWCQEEPMNQGAWYCSQHHMRRVASAHKKELFLQYAGREASAAPACGYASMHAEQQEKLLQDAFTV

SEQ ID NO: 6241 - DNA, 2868 bp, Bacillus anthracis
  CDS (1)..(2868): transl_table=11
atgacgaggaagaatacaacgacaaacccttgggccaagttccacggtccgaaccttggttatgttattgaacagtatgatctttacgtaactggagcaggttctgttgatccggaattacaagagctttttgaaatttttggagctccttcgtttcaagatgatgtcgtaacaggggacaacacagcaacacatttttctcctcaaaacacaggtaacattgaaaagattcttaaagtcgttcaacttgttgaacagattcgttctttcgggcatacgttggctcacatcaatccgatggaggatgctgcaaatggacaatctcttcttgagaaagcaatgaacgaactgagcgatgctgatttgaaagcgattccagcgaaaacagtatggcaagatgcaccagaaggtattcacactgcacttgatgtaattcatagattaaaagaagtgtatacacaatctttagcttatgaattttctcatatacaagatagtgaagaacgcgcgtggttgcatcaaatggtggaatcaaattcattgcgtcaaccactatcaaataaaaaacgaactgctcttttaaaacgtttaacagctgttgaaggtttcgagcaattcttgcataaaacattcgttgggcaaaagcgtttctctatcgagggcgttgatatgcttgtacctgttctagatgaaattgtgctagaaggagctaaaaacggcgtagaagatgtcatgattggtatggctcaccgcggtcgtctaagcgtacttgctcacgtattagaaaaaccatatagtcacatgtttgctgagttcaaacatgcaaaaatagaaggcgcagtggcaaattctggctggactggcgacgtgaaataccatttaggtagagaacaagtcgttagtaacgaagaagttagcactcgcgttacattagcaaataacccaagtcaccttgagttcgttaatcccgttgtggaaggtttcgcacgtgcggctcaagaaaaccgtaaaaaatctggtcttccagaacaagatacttcaaaatcattcgtaattttagttcatggtgatgctgcattccctggtcaaggtattgtatctgagacattgaacttaagcagattgaacgcgtatcaaacgggcggaacaattcatgttatcgcaaacaatgcagttggttttacgactgatagctatgactctcgttctacgaaatattcaagtgaccttgcaaaaggtttcgatattccgattgttcacgtgaacgctgatgatccagaagcttgtcttgctgctgctaaccttgcgattcaatatcgcatgctgttcaaaaaagatttcctaatcgatttaattggttaccgccgctacggtcataacgaaatggatgatccagcagttacacaaccacaagtgtacaaaaagattaaaaatcacccaactgtaagagcaatttatgcagatcaattacaagctgctggtgttctaaatgcagatgaaattgaaacaattacacaatttacgcaagagcaattaaaatctgactatgcacaagtaccgccagctgatacgagcgatgcaacaattcacgttaaagtgccagatgttgttgcaaaaggtattcagccaattgatactggtgttgagcttgactcacttcgtgcaattaatgaaggtctactatcttggccagaaggctttaacgtatatccgaaagtgaagaaaattcttgagcgccgtaaagatgctcttgaagagaacggtaaaattgaatgggcacttgctgagtcattagcattcgcttctattttacaagaaggtacgccaattcgtttaactggtcaagattcacagcgtggtacattcgcgcaccgtcacatcgtattacatgatactgacacaaatgaaacatattcaccattacatcgcttaccaaatatcaacgcttcattctctgttcataacagtccgttatcagaagctgctgttgttggttacgagtatggttataacgtattcgctccggaaacgcttgttatgtgggaagcgcaatatggtgacttctcaaatactgcgcaagcattatttgatcaatatgtttcagctggaagagcaaaatggggtcaaaaatctggtttagttcttctattaccacacggttatgaaggtcaaggaccagagcactctagtgcgcgtcctgaacgtttcttacagttagctgctgagaacaactggacagttgcaaacttaacgagcgcggcacaatacttccatatcctgcgtcgtcaagcatctatcttaggaacagaagctgttcgaccattagtattgatgacgccgaaaagtttattacgtcacccacttacgctttcaactgctaatcagttaagcgaaggacgtttccaacctgctttagaacaagaaaaccttggtacaaaaccaaacaaagtaaaacgtcttgttttaagtacaggtaaaatggcgattgacttagcagcagaaatcgagtctggtaggcatgagtacaacttagatgaaattcatatcgttcgtattgaacagttgtacccattccctgctgaaaaagttcaatctattattaaacgctttaaaaacttagaagaaattatttgggttcaagaagagcctcgtaatatgggcgcatggcattacatggctccaattctgttcgaactagctggagataaagtgaaaacaggttacatcggacgtccagatcgctctagcccatctggcggcgatccattcgctcacaaagctgagcaagaactgattgtttcacacgctttagatgtaaagtataacttccgtcaagataaactagaaattgaagttttcagcaactaa

SEQ ID NO: 6242 - protein, 955 aa, Bacillus anthracis
MTRKNTTTNPWAKFHGPNLGYVIEQYDLYVTGAGSVDPELQELFEIFGAPSFQDDVVTGDNTATHFSPQNTGNIEKILKVVQLVEQIRSFGHTLAHINPMEDAANGQSLLEKAMNELSDADLKAIPAKTVWQDAPEGIHTALDVIHRLKEVYTQSLAYEFSHIQDSEERAWLHQMVESNSLRQPLSNKKRTALLKRLTAVEGFEQFLHKTFVGQKRFSIEGVDMLVPVLDEIVLEGAKNGVEDVMIGMAHRGRLSVLAHVLEKPYSHMFAEFKHAKIEGAVANSGWTGDVKYHLGREQVVSNEEVSTRVTLANNPSHLEFVNPVVEGFARAAQENRKKSGLPEQDTSKSFVILVHGDAAFPGQGIVSETLNLSRLNAYQTGGTIHVIANNAVGFTTDSYDSRSTKYSSDLAKGFDIPIVHVNADDPEACLAAANLAIQYRMLFKKDFLIDLIGYRRYGHNEMDDPAVTQPQVYKKIKNHPTVRAIYADQLQAAGVLNADEIETITQFTQEQLKSDYAQVPPADTSDATIHVKVPDVVAKGIQPIDTGVELDSLRAINEGLLSWPEGFNVYPKVKKILERRKDALEENGKIEWALAESLAFASILQEGTPIRLTGQDSQRGTFAHRHIVLHDTDTNETYSPLHRLPNINASFSVHNSPLSEAAVVGYEYGYNVFAPETLVMWEAQYGDFSNTAQALFDQYVSAGRAKWGQKSGLVLLLPHGYEGQGPEHSSARPERFLQLAAENNWTVANLTSAAQYFHILRRQASILGTEAVRPLVLMTPKSLLRHPLTLSTANQLSEGRFQPALEQENLGTKPNKVKRLVLSTGKMAIDLAAEIESGRHEYNLDEIHIVRIEQLYPFPAEKVQSIIKRFKNLEEIIWVQEEPRNMGAWHYMAPILFELAGDKVKTGYIGRPDRSSPSGGDPFAHKAEQELIVSHALDVKYNFRQDKLEIEVFSN

SEQ ID NO: 6243 - DNA, 2868 bp, Bacillus thuringiensis subsp
  CDS (1)..(2868): transl_table=11
atgacgaggaagaatacaacgacaaacccttgggccaagttccatggtccgaaccttggttatgttattgaacagtatgatctttacgtaactggagcaggttctgttgatccggaattacaagagctttttgaaatttttggagctccttcgtttcaagatgatgtcgtaacaggggacaacacagcaacacatttttctcctcaaaacacaggtaacattgaaaagattcttaaagtcgttcaacttgttgaacagattcgttctttcgggcatacgttggctcacatcaatccgatggaggatggtgcaaatggacaatctcttcttgagaaagcaatgaacgaactgagcgatgctgatttgaaagcgattccagcgaaaacagtatggcaagatgcaccagaaggtattcacactgcacttgatgtaattcatagattaaaagaagtgtatacacaatctttagcttatgaattttctcatatacaagatagtgaagaacgcgcgtggttgcatcaaatggtggaatcaaattcattgcgtcaaccactatcaaataaaaaacgaactgctcttttaaaacgtttgacagctgttgaaggtttcgagcaattcttgcataaaacattcgttgggcaaaagcgtttctctatcgagggcgttgatatgcttgtacctgttctagatgaaattgtgctagaaggagctaaaaacggcgtagaagatgtcatgattggtatggctcaccgcggtcgtctaagcgtacttgctcacgtattagaaaaaccatatagtcacatgtttgctgagttcaaacatgcaaaaatagaaggcgcagtggcaaattctggctggactggcgacgtgaaataccatttaggtagagaacaagtcgttagtaacgaagaagttagcactcgcgttacattagcaaataacccaagtcaccttgagttcgttaatcccgttgtggaaggtttcgcacgtgcggctcaagaaaaccgtaaaaaatctggtcttccagaacaagatacttcaaaatcattcgtaattttagttcatggtgatgctgcattccctggtcaaggtattgtatctgagacattgaacttaagcagattgaacgcgtatcaaacgggcggaacaattcatgttatcgcaaacaatgcagttggttttacgactgatagctatgactctcgttctacgaaatattcaagtgaccttgcaaaaggtttcgatattccgattgttcacgtgaacgctgatgatccagaagcttgtcttgctgctgctaaccttgcgattcaatatcgcatgctgttcaaaaaagatttcctaatcgatttaattggttaccgccgctacggtcataacgaaatggatgatccagcagttacacaaccacaagtgtacaaaaagattaaaaatcacccaactgtaagagcaatttatgcagatcaattacaagctgctggtgttctaaatgcagatgaaattgaaacaattacacagtttacgcaagagcaattaaaatctgactatgcacaagtaccgccagctgatacgagcgatgcaacaattcacgttaaagtgccagatgttgttgcaaaaggtattcagccaattgatactggtgttgagcttgactcacttcgtgcaattaatgaaggtctactctcttggccagaaggctttaacgtatatccgaaagtgaagaaaattcttgagcgccgtaaagatgctcttgaagagaacggtaaaattgaatgggcacttgctgagtcattagcattcgcttctattttacaagaaggtacgccaattcgtttaactgggcaagattcacagcgtggtacattcgcgcatcgtcacatcgtattacacgatactgatacaaatgaaacatattcaccattacaccgcttaccaaacatcaacgcttcattctctgttcataacagtccgttatcagaagctgctgttgttggttacgagtatggttataacgtattcgctccggaaacgcttgttatgtgggaagcgcaatatggtgacttctcaaatactgcgcaagcattatttgatcaatatgtttcagctggaagagcaaaatggggtcaaaaatctggtttagttcttctattaccacacggttatgaaggtcaagggccagagcactctagtgcacgtccagagcgattcttacagttagctgctgagaacaactggacagttgcaaacttaacgagcgcggcacaatacttccatatcctgcgtcgtcaagcatctatcttaggaacagaagctgttcgaccattagtactgatgacgccgaaaagtttattacgtcacccacttacgctttcaactgctagtcagttaagcgaaggacgtttccaacctgctttagaacaagaaaaccttggtacaaaaccaaacaaagtaaaacgtcttgttttaagtacaggtaaaatggcgattgacttagcagcagaaatcgagtctggtaagcatgagtacaacttagatgaaattcatatcgttcgtattgaacagttgtacccattccctgctgagaaagttcaatctattattaaacgctttaaaaacttagaagaaattatttgggttcaagaagagcctcgtaatatgggcgcatggcattatatggctccaattctgttcgaactagctggagataaagtaaaaacaggttacatcggacgtccagatcgctctagcccatctggcggcgatccattcgctcacaaagctgagcaagaactaattgttgcacacgctttagatgtaaagtataacttccgtcaagataaactagaaattgaagttttcagcaactaa

SEQ ID NO: 6244 - protein, 955 aa, Bacillus thuringiensis subsp
MTRKNTTTNPWAKFHGPNLGYVIEQYDLYVTGAGSVDPELQELFEIFGAPSFQDDVVTGDNTATHFSPQNTGNIEKILKVVQLVEQIRSFGHTLAHINPMEDGANGQSLLEKAMNELSDADLKAIPAKTVWQDAPEGIHTALDVIHRLKEVYTQSLAYEFSHIQDSEERAWLHQMVESNSLRQPLSNKKRTALLKRLTAVEGFEQFLHKTFVGQKRFSIEGVDMLVPVLDEIVLEGAKNGVEDVMIGMAHRGRLSVLAHVLEKPYSHMFAEFKHAKIEGAVANSGWTGDVKYHLGREQVVSNEEVSTRVTLANNPSHLEFVNPVVEGFARAAQENRKKSGLPEQDTSKSFVILVHGDAAFPGQGIVSETLNLSRLNAYQTGGTIHVIANNAVGFTTDSYDSRSTKYSSDLAKGFDIPIVHVNADDPEACLAAANLAIQYRMLFKKDFLIDLIGYRRYGHNEMDDPAVTQPQVYKKIKNHPTVRAIYADQLQAAGVLNADEIETITQFTQEQLKSDYAQVPPADTSDATIHVKVPDVVAKGIQPIDTGVELDSLRAINEGLLSWPEGFNVYPKVKKILERRKDALEENGKIEWALAESLAFASILQEGTPIRLTGQDSQRGTFAHRHIVLHDTDTNETYSPLHRLPNINASFSVHNSPLSEAAVVGYEYGYNVFAPETLVMWEAQYGDFSNTAQALFDQYVSAGRAKWGQKSGLVLLLPHGYEGQGPEHSSARPERFLQLAAENNWTVANLTSAAQYFHILRRQASILGTEAVRPLVLMTPKSLLRHPLTLSTASQLSEGRFQPALEQENLGTKPNKVKRLVLSTGKMAIDLAAEIESGKHEYNLDEIHIVRIEQLYPFPAEKVQSIIKRFKNLEEIIWVQEEPRNMGAWHYMAPILFELAGDKVKTGYIGRPDRSSPSGGDPFAHKAEQELIVAHALDVKYNFRQDKLEIEVFSN

SEQ ID NO: 6245 - DNA, 2826 bp, Bacillus subtilis
  CDS (1)..(2826): transl_table=11
atgtttcaaaatagtatgaaacaacgaatgaattgggaagatttttacggtccgaacctcggctatgcgctggagctttacgatcagtatacccaggatccgtacagcattgacccggatttgaaggaaatgttcgacgagctcggtgctccgccaagcgatataaaagaggcctcgggaacaaaagaaaagggacgtgttacagccgatctgattcaaaagatcgcatccgcagtcagacttgcagaagatatccgaacctatggccatttgaacgcttccgtcaatccgctcagaaaggatgagaaaaagagcgaactttttccattatccgattacgggctaacagaagaggaaataaaagcaatacctgcgtctgtcatctgcaaagacgctcctaaaaacatttcgaacggtttagaagccattcagtatttacgaaatacgtataaaagaaccatctcttttgaatttgaccatgtgcatgacttcaaagagcgcgagtggctgacaagaaagattgaatctggcgagctgttccagaagaactcagctgaaaagctgtcagctgtgctggaaagattgacagaagtagagggctttgagcagtttttgcaccgcacattcgtcgggcagaagcgcttttccattgagggtctggacgctcttgttccagtgcttgatgacattattgcacaatctgtcaaatcaggcacgacaagtgtcaacatcgggatggcgcacaggggacgcctgaatgtcttggcacatgtgctcggcaaaccgtatgaaatcatcttctctgaattccagcatgcgccgagaagtcttgtaccgtctgaggatccattggaatcagctacggatggacgggggatgtcaaataccatttgggggcgaatcgggagcttcaagacgctgaaacaaaatcagcccgcattaccgttagcgaacaacccgagccacttggaatttatcaatccgattgttgaaggcagcacaagagcggcacaggaaacgcgaacacaaagcggatacccggtacaagatgaaacaaaatcgctggccattttaatccatggagacgctgcattccctggggaaggaattgtagctgaaacattgaatttaagctctttaaaagggtatcaagtaggcggtgcgattcatattatcgccaataacatgatcggattcacaacagaaagcgctgaatccagatcgacaaaatatgccagcgacctggccaagggttatgaaattccgattgttcacgtgaatgcggacgatcctgaagcttgtctttcagctgttaagtttgcggtcgaataccgaaaaacattcaacaaggattttctgattgatttgatcgggtacagacgctatggacacaacgaaatggatgaaccgtcaaccactcagccaatgctgtatgatgctgtcagaaagcatccgacgtcaaacaaattttcgctgaaaaagctggtaaaagaaggcgtggttaccgaggaagtcgttcaaaacatcgaaaaatcggtaacgaagcgcattgaggtagctatacagaaagttccgtctaaaaaggaacacactgcttgtgaaattgaacttccagagcctgtatcaaacggtttcccagatgtggacacttcgattcattttcatgtgctccgcaagctgaatggcgaattgatcactggcgagtcatttatgttttcgcaagctaaagcgcattttagaaagacggccaaggcgttcgatgatgacagaaaagtggaatggtctttggcagaatcactcgcgtttgcttcaattttgaaagacggaacaccgattcgtttaacaggacaggattccgagcgcggaacgttcgcccaaagaaaccttgtgcttcatgacagtgagacgggcaaagaatttgtgccgcttcatcacttatctgactgcagcacatcatttgctgttcataacagcccgctgtctgaaggatcggttctcggttttgaatacggctataacgtgcattcaccggaaacgcttgttttgtgggaagcacagtacggagattttgccaacgctgctcaagtgtattttgaccaatttatttctgccggacgcgcgaaatggggccaaaaatccggattagtcatgctgctcccgcacggttacgagggacaggggcctgagcactcaagcggaagaattgagcgattcctgcagcttgcagcggaaaacaactggacggttgccaacctgacaagcgcggcacagtatttccatattttaagaagacaggctaaaatgctgcttcgtgaagaaatcagaccgctcgtcattatgacgccgaagagccttcttcgcaacccaaatacggtgtcggaagtgcaggagctcagcgaaagccgcttccagcctgtttatgaacagtcgggactttctcatgactatgaaaaagtaaccagacttgtattatccagcggtaaagtgtctatagacattagcgtacattttaataagttagaagacggtaaagagtggcttcacattgcgagaatcgaacagctgtatccattcccggcaaaaggagtcaaagaattatttgcaaaacttccgaacctgaaagaaatcgtttgggtgcaggaagagccgcagaacatgggggcttggggttatatcagcccgtatttgacagagattgcaccagagggagtaagcgttcaatatattggacgaagaagacgatccagccctgcagagggagatccgacagttcataaaaaagaacaggaacgtattgtatctgatagcttgactcgcaaaaactaa

SEQ ID NO: 6246 - protein, 941 aa, Bacillus subtilis
MFQNSMKQRMNWEDFYGPNLGYALELYDQYTQDPYSIDPDLKEMFDELGAPPSDIKEASGTKEKGRVTADLIQKIASAVRLAEDIRTYGHLNASVNPLRKDEKKSELFPLSDYGLTEEEIKAIPASVICKDAPKNISNGLEAIQYLRNTYKRTISFEFDHVHDFKEREWLTRKIESGELFQKNSAEKLSAVLERLTEVEGFEQFLHRTFVGQKRFSIEGLDALVPVLDDIIAQSVKSGTTSVNIGMAHRGRLNVLAHVLGKPYEIIFSEFQHAPRSLVPSEDPLESATDGRGMSNTIWGRIGSFKTLKQNQPALPLANNPSHLEFINPIVEGSTRAAQETRTQSGYPVQDETKSLAILIHGDAAFPGEGIVAETLNLSSLKGYQVGGAIHIIANNMIGFTTESAESRSTKYASDLAKGYEIPIVHVNADDPEACLSAVKFAVEYRKTFNKDFLIDLIGYRRYGHNEMDEPSTTQPMLYDAVRKHPTSNKFSLKKLVKEGVVTEEVVQNIEKSVTKRIEVAIQKVPSKKEHTACEIELPEPVSNGFPDVDTSIHFHVLRKLNGELITGESFMFSQAKAHFRKTAKAFDDDRKVEWSLAESLAFASILKDGTPIRLTGQDSERGTFAQRNLVLHDSETGKEFVPLHHLSDCSTSFAVHNSPLSEGSVLGFEYGYNVHSPETLVLWEAQYGDFANAAQVYFDQFISAGRAKWGQKSGLVMLLPHGYEGQGPEHSSGRIERFLQLAAENNWTVANLTSAAQYFHILRRQAKMLLREEIRPLVIMTPKSLLRNPNTVSEVQELSESRFQPVYEQSGLSHDYEKVTRLVLSSGKVSIDISVHFNKLEDGKEWLHIARIEQLYPFPAKGVKELFAKLPNLKEIVWVQEEPQNMGAWGYISPYLTEIAPEGVSVQYIGRRRRSSPAEGDPTVHKKEQERIVSDSLTRKN

SEQ ID NO: 6247 - DNA, 3045 bp, Saccharomyces cerevisiae
  CDS (1)..(3045)
atgctaaggttcgtgtcttcgcaaacctgccggtatagttcaagaggactattaaaaacatctttacttaaaaatgcatctactgtcaaaattgtcggaagagggttagccaccactggtacagataattttctatcgacatcaaatgccacctatatcgatgaaatgtaccaagcttggcaaaaagacccatcttcagtccatgtttcatgggacgcatatttcaagaatatgtctaacccaaagattccagctacaaaggcttttcaggctcctcccagtatcagtaactttccccagggtaccgaagcagctcccttagggaccgcaatgactggttcagtagatgagaacgtctccattcatctaaaagtgcaattgctatgtagagcttaccaagttagaggtcatttaaaagcccatatagatcctttagggatctcatttggtagtaataaaaataaccctgttcctccggaattgactctagactactacggctttagcaaacacgatcttgataaagaaatcaacctaggacctggtatcctgccaaggtttgcaagggacgggaaatctaaaatgtctctgaaagagattgtggatcatctagaaaagttatattgttcctcttatggggtacaatacacacatattccatctaagcaaaagtgtgattggttaagagagagaattgagattcctgaaccttaccaatatacagtggaccaaaagagacaaatcttagatagattaacatgggccacttcttttgagtcattcttatctacaaaatttccaaatgataagaggttcggtttagaaggtttggaaagtgttgttccaggtattaaaactttggttgatcgttctgttgaattgggtgtagaagatattgttttgggtatggctcaccgtggtagattgaacgttttatccaatgtggtccgtaaaccaaatgaatctattttttctgaatttaagggttcgagcgctcgcgatgatattgaaggatcgggtgatgtcaagtaccatttgggtatgaactaccaaagaccaactacgtctggtaagtacgtcaatttatcgctggtggcaaatccttctcatttagaatcccaagatccagttgttcttggtagaactagagctttattgcatgccaagaacgatttgaaggaaaaaacaaaggccttaggtgtgttattacatggtgatgctgcttttgctgggcagggtgttgtttatgaaaccatgggtttcttgaccctaccagaatactctactggtggtactattcatgttattacaaacaaccagatcggattcactacggatccaagatttgcaaggtccacaccatatccttccgatttggctaaggccattgatgccccaattttccatgttaacgctaatgacgtggaagctgtgacctttattttcaatttagccgcagaatggagacataagttccacacagatgccataattgatgtcgttggttggagaaaacatggacataatgaaaccgatcagccatcgtttactcaaccattaatgtacaaaaaaattgcaaaacaaaaatctgtcattgacgtctatacggaaaaattgataagtgaaggcacattttctaaaaaagatattgatgagcacaagaaatgggtatggaacttatttgaagatgctttcgaaaaggcaaaggattacgtcccatctcaaagagaatggttaactgctgcctgggaaggattcaaatccccaaaggaattggccactgagatattaccacatgaaccaactaatgttccagagagtactttgaaagaactaggtaaggtactctcttcgtggccagaaggttttgaagtgcacaaaaatctaaagagaattttgaaaaatagaggaaaatctattgagacaggtgaaggcatcgattgggccaccggtgaagcattagcgttcggtacattggttttggatggtcagaacgttagggtttccggtgaagatgtagaaagaggtacattttctcaacgtcatgcagtcttgcatgaccaacaatctgaagccatttacacaccgctaagcactctgaataatgaaaaggcagacttcaccattgcaaattcctcgttatctgagtacggtgtaatgggtttcgaatatggttattcgctaacctccccagattatctagtcatgtgggaggctcaattcggtgactttgcaaatacagcacaggttattattgaccaatttattgccggtggtgaacaaaaatggaagcaacgctctggtttagttttgtctttaccccatggttatgatggccaggggccagaacattcgtctggtagattggaaagattcttgcaactagccaatgaagacccaagatatttcccatctgaagaaaagctacagagacaacatcaggattgtaatttccaggttgtttatccaactacgcctgctaatttattccacattctaaggagacagcaacatcgtcaattccgtaaaccattggcgttattcttttctaaacagctgctgcgtcacccattggccagatcatctctttccgaattcactgaaggcggattccaatggattatcgaagatattgaacatggaaaaagtattggtacgaaagaggaaaccaagagattagttttgctgagtggccaagtgtacactgccctacataaaagacgtgaaagtttgggtgataagaccactgctttcttaaagattgaacagctgcacccattcccatttgctcagctacgtgattcattaaattcttatccaaacttggaagaaattgtttggtgccaggaagagccattgaacatgggttcgtgggcatacacagaaccacgcttacacacaacattaaaagaaacggataaatataaggatttcaaggtcagatactgtggtagaaacccaagtggtgctgttgctgccggtagcaaatcactacatttggccgaagaagatgcctttttgaaagatgttttccaacaatcctaa

SEQ ID NO: 6248 - protein, 1014 aa, Saccharomyces cerevisiae
MLRFVSSQTCRYSSRGLLKTSLLKNASTVKIVGRGLATTGTDNFLSTSNATYIDEMYQAWQKDPSSVHVSWDAYFKNMSNPKIPATKAFQAPPSISNFPQGTEAAPLGTAMTGSVDENVSIHLKVQLLCRAYQVRGHLKAHIDPLGISFGSNKNNPVPPELTLDYYGFSKHDLDKEINLGPGILPRFARDGKSKMSLKEIVDHLEKLYCSSYGVQYTHIPSKQKCDWLRERIEIPEPYQYTVDQKRQILDRLTWATSFESFLSTKFPNDKRFGLEGLESVVPGIKTLVDRSVELGVEDIVLGMAHRGRLNVLSNVVRKPNESIFSEFKGSSARDDIEGSGDVKYHLGMNYQRPTTSGKYVNLSLVANPSHLESQDPVVLGRTRALLHAKNDLKEKTKALGVLLHGDAAFAGQGVVYETMGFLTLPEYSTGGTIHVITNNQIGFTTDPRFARSTPYPSDLAKAIDAPIFHVNANDVEAVTFIFNLAAEWRHKFHTDAIIDVVGWRKHGHNETDQPSFTQPLMYKKIAKQKSVIDVYTEKLISEGTFSKKDIDEHKKWVWNLFEDAFEKAKDYVPSQREWLTAAWEGFKSPKELATEILPHEPTNVPESTLKELGKVLSSWPEGFEVHKNLKRILKNRGKSIETGEGIDWATGEALAFGTLVLDGQNVRVSGEDVERGTFSQRHAVLHDQQSEAIYTPLSTLNNEKADFTIANSSLSEYGVMGFEYGYSLTSPDYLVMWEAQFGDFANTAQVIIDQFIAGGEQKWKQRSGLVLSLPHGYDGQGPEHSSGRLERFLQLANEDPRYFPSEEKLQRQHQDCNFQVVYPTTPANLFHILRRQQHRQFRKPLALFFSKQLLRHPLARSSLSEFTEGGFQWIIEDIEHGKSIGTKEETKRLVLLSGQVYTALHKRRESLGDKTTAFLKIEQLHPFPFAQLRDSLNSYPNLEEIVWCQEEPLNMGSWAYTEPRLHTTLKETDKYKDFKVRYCGRNPSGAVAAGSKSLHLAEEDAFLKDVFQQS

SEQ ID NO: 6249 - DNA, 3027 bp, Oryza sativa
  CDS (1)..(3027)
atggcgtggctccgcgccgcctcgggcctcgcccgccacgccctccgccgccgcgtgcccgtcgcttcccgtttcttccactcggcgcggccggcctggaggtcctccgccccggtgccccgcgccgtcccgctgtccaggcttaccgacagcttcctcgacggcaccagcagcgtctacctcgaggagctccagcgcgcatgggaggccgacccctcctccgtcgacgaatcctgggacaacttcttccgcaacttcctcggccaggccgcgccctcctccgccggcctctccggccagaccatccaggagagcatgcagctcctcctcctcgtccgtgcctaccaggttaacggccacatgaaggccaagctcgacccgctccgactcgacgaccgcgccgtcccggacgacctcgacctttccctctacggcttcaccgaagctgacctcgaccgcgagttcttcctcggcgtttggaggatggccggtttcctctccgacaaccgccccgtcctcaccctccgcgagatcctcagcaagctcgagcaggcctactgcggccccatcggctacgagtacatgcacatccctgacagggacaagtgcaactggctaagggacaagatcgagaccgccaagctcaaggagtacaacaaggaccgccgcctcgtcatgctggacaggctcatctggagcacccagtttgagaacttcctcgccaccaagtgggccactgccaagcgctttggcctcgagggcggcgagaccctcatccctggcatgaaagagatgtttgacagggctgccgaccttggcgtcgagaacattgtaatcggcatgccacacaggggaaggcttaatgtgcttggcaatgttgtccgcaagcccttgtcgcagattttcagtgagttcaccggtgggactaggcccgtcgaaggcgaggatggcctctacactggaaccggtgatgtcaagtaccatctgggcacctcctatgacaggccaactcgaggtggaaagaggatccacctatcgttggttgcgaatcccagtcacctcgaggctgtcgatcctgttgtcataggcaagacgcgggcaaagcaattttactccaatgatcttgacaggacaaagaacatgggcattctcatccatggagatggcagctttgctgggcagggtgttgtctatgagacacttcatctgagtgcccttccaagctatacaactggaggaaccatccacatcgttgtcaataaccaagttgccttcacaacagatccaagagccggcagatcttcgcagtattgtacggatgttgccaaagccttgaacgctcctatattccatgtaaacggtgatgatctggaggcagttgtacgagtttgtgagcttgcagctgagtggcgccagactttccattctgatgtggtagtcgatctgatctgttaccgacgatttggacataatgaaatcgatgagccctccttcacacagccaaagatgtatcaggttattaagaaccatcctagttcattaaagctttatgaacagaaactgctaggaacaggcgaagtctcaaaagaagacgttcagaagatccacgagaaagtcaacagaatcctgaatgaagagtttgcaaaaagcaaagattatgttcccaataagagggactggctttcggcttactggactggcttcaagtctcctgagcagatttcacgcgtccgcaacactggggttaatccaggggtgctgaaacgtgttggacaggcaattactactttacctgaagacttcaagccccacagggcagtgaagaagatttttgagcagcgtgcagcaatgatcgagagcggtgaaggaattgattgggccgttgctgaagcccttgcctttgcaacactcattgtggaaggcaaccatgttaggctgagtggacaggacgtggaaagaggaacttttagccaccgtcatgcagttctgcatgaccaggaaaacgggaggaaacattgcccacttgaccatgttgtgatgaatcaaaacgaggagctgtttaccgttagcaacagttcactttcagaatttgctgttcttggttttgaaatggggtactccatggagaaccctaattcactagtgctctgggaagctcagtttggtgacttttccaatggtgcacaagtgatgtttgaccagtttttgagtagtggagaggcaaaatggctgcgtcaaactggccttgtcgttctactgcctcatggttatgatggccaaggcccagagcattccagtgcccgtttggagcgctttcttcagatgagtgatgataatccttttgtcatacctgagatggaaccaacactccgcaagcagatccaggagtgtaattggcaagttgtgaacgtgacaacgcctgcaaactatttccatgtgctgcgtcgtcagatacatagggagttccggaagcccctgattgtaatggcccccaagaacctacttcggcacaaggattgcaagtcaaatctctctgagtttgatgatgttgaaggccatccaggtttcgataagcaaggaacacgcttcaagcggttgataaaggaccggaatgaccacaagcaagtcgaggagggtatcaaacgccttgtattgtgttctgggaaggtgtactatgagcttgatgaagaacggaagaagactgaacgcagtgatgttgcaatttgcagagttgaacaactttgtccattcccatatgatcttatccagagagagctaaaaagatatccaaatgcggagattgtctggtgccaagaggaacccatgaatatgggcgcatatagttacatctcccctcgcctgtacgcctctatgaagactcttgggcgtggttcattcgatgacatcaagtatgtgggcagggcgccttcagctgcgacagctactggcttcctgtcggttcatgcgcaggagcagacagagctggtaaagaaagcactgcaggcagagcctatcaagttcccctga

SEQ ID NO: 6250 - protein, 1008 aa, Oryza sativa
MAWLRAASGLARHALRRRVPVASRFFHSARPAWRSSAPVPRAVPLSRLTDSFLDGTSSVYLEELQRAWEADPSSVDESWDNFFRNFLGQAAPSSAGLSGQTIQESMQLLLLVRAYQVNGHMKAKLDPLRLDDRAVPDDLDLSLYGFTEADLDREFFLGVWRMAGFLSDNRPVLTLREILSKLEQAYCGPIGYEYMHIPDRDKCNWLRDKIETAKLKEYNKDRRLVMLDRLIWSTQFENFLATKWATAKRFGLEGGETLIPGMKEMFDRAADLGVENIVIGMPHRGRLNVLGNVVRKPLSQIFSEFTGGTRPVEGEDGLYTGTGDVKYHLGTSYDRPTRGGKRIHLSLVANPSHLEAVDPVVIGKTRAKQFYSNDLDRTKNMGILIHGDGSFAGQGVVYETLHLSALPSYTTGGTIHIVVNNQVAFTTDPRAGRSSQYCTDVAKALNAPIFHVNGDDLEAVVRVCELAAEWRQTFHSDVVVDLICYRRFGHNEIDEPSFTQPKMYQVIKNHPSSLKLYEQKLLGTGEVSKEDVQKIHEKVNRILNEEFAKSKDYVPNKRDWLSAYWTGFKSPEQISRVRNTGVNPGVLKRVGQAITTLPEDFKPHRAVKKIFEQRAAMIESGEGIDWAVAEALAFATLIVEGNHVRLSGQDVERGTFSHRHAVLHDQENGRKHCPLDHVVMNQNEELFTVSNSSLSEFAVLGFEMGYSMENPNSLVLWEAQFGDFSNGAQVMFDQFLSSGEAKWLRQTGLVVLLPHGYDGQGPEHSSARLERFLQMSDDNPFVIPEMEPTLRKQIQECNWQVVNVTTPANYFHVLRRQIHREFRKPLIVMAPKNLLRHKDCKSNLSEFDDVEGHPGFDKQGTRFKRLIKDRNDHKQVEEGIKRLVLCSGKVYYELDEERKKTERSDVAICRVEQLCPFPYDLIQRELKRYPNAEIVWCQEEPMNMGAYSYISPRLYASMKTLGRGSFDDIKYVGRAPSAATATGFLSVHAQEQTELVKKALQAEPIKFP

SEQ ID NO: 6251 - DNA, 3090 bp, Glycine max
  CDS (1)..(3090)
atggcatggtttagagctggagctagcatagcaaaacatgcaattaggagaactctttctaagggtggatccacacaccttgtgtcaagggcaagggtccttccatcgataccatcatcaccgtcatcaccatatagcagaagcttccacagcacggttttcaaggaacaagctgcacctgttccacgtgcggttcctctttcaaagctaacagatagtttcttagatggcacaagcagtgtgtatttggaagagcttcaaagggcttgggaggctgatcccaacagtgtggatgagtcatgggacaatttcttcaggaactttgtggggcaggcaacaacctcacctggaatttctggtcaaacaattcatgaaagcatgaggttgttgttgctggtgagggcgtaccaggttaatggccacatgaaggccaagttggatcccttgaatctggaaccaaggcaaatccctgaggatttggaccctgcactttatggcttcactgaggctgatcttgatagagagttcttcttgggggtgtggaggatggctggtttcttatctgagaaccgccccgtgcaaacccttagatccattttgacaaggcttgagcaggcttattgtggaagcattggatatgagtatatgcacattgctgatcgtcacaagtgtaattggcttagggataggattgagacccccacccctacacagtttaatagggagaggcgtgaggctatctttgataggcttgcttggagttccttgtttgagaacttcttggccaccaagtggacctctgcaaagaggtttggtcttgagggtggagagactcttattcccggaatgaaggaaatgtttgatagggcatctgatcttggggttgagagcatagttataggaatggcacatcgagggaggctgaatgttttggggaatgtggtaaggaagcccctgcggcagattttctgcgagtttagcggtggtcttcagcctgagggggaagttggactctacactggaactggagatgttaagtatcatttggggacatcgtatgatcgccctactaggggtggcaagaggattcatttgtctttggtggcaaatcctagtcacttggaagctgtcaatccgcttgttattgggaaaactcgagccaagcagtattacgcaaatgacgtggatagaacgaagaacatgggtgtgttgattcatggagatggaagttttgctggacagggtgtggtctatgaaaccctgcatttaagtgctcttccaaattacactactggtgggacgattcacatcgtgtttaacaatcaggttgcatttacaactgatccgacttctggcaggtcttcacaatattgcactgatgttgccaaggctttggatgctcccatctttcacgtgaatggtgatgatgttgaagcagttgttcatgcctgtgaacttgctgcagagtggcgccagactttccactctgatgtggttgtcgacttggtgtgttaccgtcgatttggccacaatgagattgatgaaccatctttcactcagcctaaaatgtacaaggtaatccgaagccatccatcaactcttgagatctatgagaagaaccttttggaatcaggggagttgacacaagaagaaattgataggatccacaagaaggtcacatcaattctaaatgaagaatttttggctagcaaagaatacattccaaaaagaagagattggctttcagcatattggcttggtttcaagtcacctgaacagctttcacgtatccgaaacactggtgtgaaaccagagatcttgaaaactgttggaaaagcaatcacaaccatccctgaaaatttcacacctcatagagcagtgaagaggatttatgaacaacgggcccaaatgattgaaactggggaagatattgactggggatttgcagaggcgcttgcttatgctaccttgcttattgaaggtaaccatgttcgattaagtggtcaggatgttgaaagaggaacttttagtcaccgccatgctgtagttcacgatcagacaacaggagagaaatattgtcccctggacaatgttataatgaaccaagatgaagagatgtttaccgttagcaatagttcactttctgagtttggtgttcttggatttgaattgggttactcaatggaaaatcccaattcattgataatttgggaggctcagtttggtgattttgctaatggtgctcatgtcatatttgacaatttcttggcttctggtgaggctaagtggctccgtcagactggtcttgttgtgttacttcctcatggttatgatggccagggcccagagcattcaagtgcaagattggaacgctttcttcagatggctgatgacaaccctcatgttatccctgagatggatccaactcttcggaagcagattcaggagtgtaatttgcagattgtgaatgttacaactcctgctaattttttccatgttctaaggaggcaggtacatagagattttcgcaaacctctcattgtaatgtcccctaagaacctgcttcgtagcaaggcttgcagatcaaatttatctgagtttgatgatgtccaaggccacccaggctttgacaaacagggaaccagattcaagcgcctcataaaagaccaaaatgcccacaaagatgttgaggagggtattagacgtttagtactttgctctggaaaggtttactatgaacttgatgaacaacgaacaaaggttgatgcaaaggatgttgcaatatgtagggtggaacagctttgtcctttcccttatgaccttgtccaacgagagcttaaacgatatccaaatgctgaggttgtttggtgtcaagaagagccaatgaacatgggtggatacacttatgttttaccccgacttatatcttcaatgaaagctgtgaataggggaggttacgacgatgtcaaatatattggtcgtgctccatccgcggccacagccactggcttcctcaaggttcaccagaaggagcagactgagattgctgaaaaagccgttcaacaagaaccaatcgacttcccattttga

SEQ ID NO: 6252 - protein, 1029 aa, Glycine max
MAWFRAGASIAKHAIRRTLSKGGSTHLVSRARVLPSIPSSPSSPYSRSFHSTVFKEQAAPVPRAVPLSKLTDSFLDGTSSVYLEELQRAWEADPNSVDESWDNFFRNFVGQATTSPGISGQTIHESMRLLLLVRAYQVNGHMKAKLDPLNLEPRQIPEDLDPALYGFTEADLDREFFLGVWRMAGFLSENRPVQTLRSILTRLEQAYCGSIGYEYMHIADRHKCNWLRDRIETPTPTQFNRERREAIFDRLAWSSLFENFLATKWTSAKRFGLEGGETLIPGMKEMFDRASDLGVESIVIGMAHRGRLNVLGNVVRKPLRQIFCEFSGGLQPEGEVGLYTGTGDVKYHLGTSYDRPTRGGKRIHLSLVANPSHLEAVNPLVIGKTRAKQYYANDVDRTKNMGVLIHGDGSFAGQGVVYETLHLSALPNYTTGGTIHIVFNNQVAFTTDPTSGRSSQYCTDVAKALDAPIFHVNGDDVEAVVHACELAAEWRQTFHSDVVVDLVCYRRFGHNEIDEPSFTQPKMYKVIRSHPSTLEIYEKNLLESGELTQEEIDRIHKKVTSILNEEFLASKEYIPKRRDWLSAYWLGFKSPEQLSRIRNTGVKPEILKTVGKAITTIPENFTPHRAVKRIYEQRAQMIETGEDIDWGFAEALAYATLLIEGNHVRLSGQDVERGTFSHRHAVVHDQTTGEKYCPLDNVIMNQDEEMFTVSNSSLSEFGVLGFELGYSMENPNSLIIWEAQFGDFANGAHVIFDNFLASGEAKWLRQTGLVVLLPHGYDGQGPEHSSARLERFLQMADDNPHVIPEMDPTLRKQIQECNLQIVNVTTPANFFHVLRRQVHRDFRKPLIVMSPKNLLRSKACRSNLSEFDDVQGHPGFDKQGTRFKRLIKDQNAHKDVEEGIRRLVLCSGKVYYELDEQRTKVDAKDVAICRVEQLCPFPYDLVQRELKRYPNAEVVWCQEEPMNMGGYTYVLPRLISSMKAVNRGGYDDVKYIGRAPSAATATGFLKVHQKEQTEIAEKAVQQEPIDFPF

SEQ ID NO: 6253 - DNA, 3078 bp, Zea mays
  CDS (1)..(3078)
atggggctgttccgggcggcgtccggcctggcccgtttggctctgcgaaggaacctcttgcgcgccgcggcaagcccctttgccgccggcggtggcgccgtcccaggtgccgcgccggcgcgctacttccactccacctgcccgcgccggttcgctgcgcccacgccccgtgctgtgccgctctcgcgcctcaccgacagcttccttgatgggaccagcagcgtctacctcgaggagctgcagcgggcctgggaggccgaccccagctctgtcgatgagtcctgggacaactttttccgcaacttcgtcggccaggctgccaccacctcacccggcctctctgggcagaccatccaggagagcatgaggctgctgctgctcgtcagggcataccaggtgagcggccacctgaaagccaagctcgacccgctcgggcttgaggagcgtccggtcccggatgtgttggacccggcgttctatgggttctccgaggcggacttagaccgcgagttctttcttggggtgtggatgatggctgggttcttgtctgaaaaccggccagtgcagacgctgcgctcggtgctggagcggctcgagcaggcctattgcggtaccattgggtatgagtacatgcacatacctgacagggagaagtgcaactggctcagggataggattgagacagttaacccaatggattacacttatgaccgtcgtcaggtcatgcttgataggcttatctggagcacacagtttgagagtttcttggcgaccaagtggacaactgcaaaacggttcggtcttgaaggtgctgagactctgatccctggcatgaaggagatgtttgacagggcagctcatcttggtgtagagagtattgtcattgggatgccacacagaggcaggttaaatgtcttgggaaatgttgtgaggaagcccttgcgacagatatttagcgagttcagtggtggcaccaagcctgtcaatgaaggcgaggggttgtatacagggactggtgatgtcaagtaccatcttggaacttcacatgataggcctaccaggggtgggaaacatatccatctgtcactggttgcaaacccgagtcatttggaagcagttgatcctgttgttgctgggaaaacaagagcgaagcagtactattctaatgaccgtgacaggaccaagaatttgggagtgttgctgcatggtgatggtagtttctcagggcagggcgttgtgtatgagacgctgcatctcagtgcccttgaaaactacaccactggtgggacaatacatatcgtggtcaataatcaggttgctttcactactgatccaaggtcagggagatcctcacaatattgcacagatgtagcaaaagcattggatgctcctattttccatgttaacggtgatgatttggaggctgttgttcatgtctgtgagctcgccgcagaatggcgtcagacatttcattcagatgtagtggtggacattgtatgctaccggcgatttggccataatgaaattgatgagccgtccttcacccaacctaagatgtacaaggtgattaggaaccatccaagtgcgctagagatttatcaaaggaagttgttagagtctgggaagatctcaaaggaagatattgataggttaaacaaaaaggtcagcactatacttaatgaggaatttcagaacagcaaagactatgttcccaacaagagggactggctttcagcttactggactgggttcaagtcaccagagcagatttcgcgtatccgaaacaccggtgtcaagccagagattctaaaacgtgttggagaagccatgactactctgccagaaaatttcaagcctcacagggctgtgaagaagatttttgatctacggcgtcagatgatcgagactggagaaggcattgattgggcagttggtgaagcacttgcttttgctactcttataattgaggggaaccatgtcaggttaagtggtcaggatgttgagaggggtacatttagccatcgacactctgtcatccatgaccaagaaactggagagcagtactgcccgctggatcatcttgttatgaaccaagatgcggagctttttactgtgagcaacagttccctgtcagaatttgctgttttgggctttgaattgggttactccatggagaacccaaactcattggtcttatgggaagctcagtttggtgatttttcaaatggagctcaagtgatatttgatcagttcctgagtagtggggagtcaaaatggctccgccagactggccttgtcgtttgccttcctcatggatatgatggtcaggggcctgaacattctagtgcaagattggaacgctttcttcagatgagtgatgacaacccttatgttatacccgagatggatccaacactgcggaagcaaatccagcagtgcaattggcaggtcgttaatgtaacaactcctgcaaattatttccatgttctgcgtcgccagatacaccgggacttcaggaagcctttgattgtgatgtccccaaagaacctccttcgccacaaggactgcaagtcgaacctatctgaatttgatgatcttgcgggccaccctggattcgacaaacaggggacacgcttcaagcgtctcattaaggaccagaataatcacaaggacctcgaggagggaatcaaccgcctagttctttgctctggaaaggtgtactatgaactggatgaagaaagaaggaagtcggagcgcactgatgttgctatatgtagagttgagcagctctgcccgttcccctatgacctcatccagcgcgagttgaagagatatccaaatgccgagatcgtgtggtgccaagaggagccgatgaacatgggagcatacagctacatcaacccgcggttgctgacggcgatgaaggttctgggccggggtggcatcgaggacatcaagtacgtcggcagggccccgtcggctgctaccgcgacgggcttctactcggtgcacgtgcaggagcagacggagctggtgcagaaggcgctgcagcgcgaccccctcaactaccctttctga

SEQ ID NO: 6254 - protein, 1025 aa, Zea mays
MGLFRAASGLARLALRRNLLRAAASPFAAGGGAVPGAAPARYFHSTCPRRFAAPTPRAVPLSRLTDSFLDGTSSVYLEELQRAWEADPSSVDESWDNFFRNFVGQAATTSPGLSGQTIQESMRLLLLVRAYQVSGHLKAKLDPLGLEERPVPDVLDPAFYGFSEADLDREFFLGVWMMAGFLSENRPVQTLRSVLERLEQAYCGTIGYEYMHIPDREKCNWLRDRIETVNPMDYTYDRRQVMLDRLIWSTQFESFLATKWTTAKRFGLEGAETLIPGMKEMFDRAAHLGVESIVIGMPHRGRLNVLGNVVRKPLRQIFSEFSGGTKPVNEGEGLYTGTGDVKYHLGTSHDRPTRGGKHIHLSLVANPSHLEAVDPVVAGKTRAKQYYSNDRDRTKNLGVLLHGDGSFSGQGVVYETLHLSALENYTTGGTIHIVVNNQVAFTTDPRSGRSSQYCTDVAKALDAPIFHVNGDDLEAVVHVCELAAEWRQTFHSDVVVDIVCYRRFGHNEIDEPSFTQPKMYKVIRNHPSALEIYQRKLLESGKISKEDIDRLNKKVSTILNEEFQNSKDYVPNKRDWLSAYWTGFKSPEQISRIRNTGVKPEILKRVGEAMTTLPENFKPHRAVKKIFDLRRQMIETGEGIDWAVGEALAFATLIIEGNHVRLSGQDVERGTFSHRHSVIHDQETGEQYCPLDHLVMNQDAELFTVSNSSLSEFAVLGFELGYSMENPNSLVLWEAQFGDFSNGAQVIFDQFLSSGESKWLRQTGLVVCLPHGYDGQGPEHSSARLERFLQMSDDNPYVIPEMDPTLRKQIQQCNWQVVNVTTPANYFHVLRRQIHRDFRKPLIVMSPKNLLRHKDCKSNLSEFDDLAGHPGFDKQGTRFKRLIKDQNNHKDLEEGINRLVLCSGKVYYELDEERRKSERTDVAICRVEQLCPFPYDLIQRELKRYPNAEIVWCQEEPMNMGAYSYINPRLLTAMKVLGRGGIEDIKYVGRAPSAATATGFYSVHVQEQTELVQKALQRDPLNYPF

SEQ ID NO: 6255 - DNA, 21 bp, Artificial sequence
  primer
atgcaagatagcgttatgcag

SEQ ID NO: 6256 - DNA, 21 bp, Artificial sequence
  primer
ttaaacagtgaaagcgtcctg

SEQ ID NO: 6257 - protein, 1136 aa, Artificial sequence
  consensus sequence
  Variant (2)..(2): Xaa in position 2 is any amino acid
  Variant (4)..(7): Xaa in position 4 to 7 is any amino acid
  Variant (9)..(15): Xaa in position 9 to 15 is any amino acid
  Variant (16)..(18): Xaa in position 16 to 18 is any or no amino acid
  Variant (21)..(22): Xaa in position 21 to 22 is any amino acid
  Variant (24)..(26): Xaa in position 24 to 26 is any amino acid
  Variant (28)..(29): Xaa in position 28 to 29 is any amino acid
  Variant (30)..(30): Xaa in position 30 is any or no amino acid
  Variant (32)..(52): Xaa in position 32 to 52 is any amino acid
  Variant (53)..(114): Xaa in position 53 to 114 is any or no amino acid
  Variant (116)..(117): Xaa in position 116 to 117 is any amino acid
  Variant (120)..(122): Xaa in position 120 to 122 is any amino acid
  Variant (125)..(126): Xaa in position 125 to 126 is any amino acid
  Variant (128)..(129): Xaa in position 128 to 129 is any amino acid
  Variant (133)..(139): Xaa in position 133 to 139 is any amino acid
  Variant (140)..(156): Xaa in position 140 to 156 is any or no amino acid
  Variant (158)..(164): Xaa in position 158 to 164 is any amino acid
  Variant (165)..(167): Xaa in position 165 to 167 is any or no amino acid
  Variant (169)..(185): Xaa in position 169 to 185 is any amino acid
  Variant (186)..(193): Xaa in position 186 to 193 is any or no amino acid
  Variant (195)..(200): Xaa in position 195 to 200 is any amino acid
  Variant (202)..(204): Xaa in position 202 to 204 is any amino acid
  Variant (207)..(209): Xaa in position 207 to 209 is any amino acid
  Variant (210)..(210): Xaa in position 210 is any or no amino acid
  Variant (212)..(212): Xaa in position 212 is any amino acid
  Variant (214)..(215): Xaa in position 214 to 215 is any amino acid
  Variant (218)..(224): Xaa in position 218 to 224 is any amino acid
  Variant (226)..(230): Xaa in position 226 to 230 is any amino acid
  Variant (232)..(245): Xaa in position 232 to 245 is any amino acid
  Variant (246)..(247): Xaa in position 246 to 247 is any or no amino acid
  Variant (249)..(250): Xaa in position 249 to 250 is any amino acid
  Variant (252)..(257): Xaa in position 252 to 257 is any amino acid
  Variant (259)..(260): Xaa in position 259 to 260 is any amino acid
  Variant (262)..(263): Xaa in position 262 to 263 is any amino acid
  Variant (265)..(268): Xaa in position 265 to 268 is any amino acid
  Variant (272)..(272): Xaa in position 272 is any amino acid
  Variant (276)..(280): Xaa in position 276 to 280 is any amino acid
  Variant (282)..(293): Xaa in position 282 to 293 is any amino acid
  Variant (295)..(298): Xaa in position 295 to 298 is any amino acid
  Variant (300)..(300): Xaa in position 300 is any amino acid
  Variant (303)..(303): Xaa in position 303 is any amino acid
  Variant (310)..(310): Xaa in position 310 is any amino acid
  Variant (312)..(312): Xaa in position 312 is any amino acid
  Variant (314)..(316): Xaa in position 314 to 316 is any amino acid
  Variant (318)..(322): Xaa in position 318 to 322 is any amino acid
  Variant (324)..(324): Xaa in position 324 is any amino acid
  Variant (327)..(327): Xaa in position 327 is any amino acid
  Variant (329)..(333): Xaa in position 329 to 333 is any amino acid
  Variant (334)..(348): Xaa in position 334 to 348 is any or no amino acid
  Variant (350)..(350): Xaa in position 350 is any amino acid
  Variant (357)..(357): Xaa in position 357 is any amino acid
  Variant (359)..(366): Xaa in position 359 to 366 is any amino acid
  Variant (367)..(368): Xaa in position 367 to 368 is any or no amino acid
  Variant (370)..(371): Xaa in position 370 to 371 is any amino acid
  Variant (372)..(373): Xaa in position 372 to 373 is any or no amino acid
  Variant (375)..(378): Xaa in position 375 to 378 is any amino acid
  Variant (385)..(387): Xaa in position 385 to 387 is any amino acid
  Variant (391)..(391): Xaa in position 391 is any amino acid
  Variant (393)..(394): Xaa in position 393 to 394 is any amino acid
  Variant (397)..(397): Xaa in position 397 is any amino acid
  Variant (399)..(407): Xaa in position 399 to 407 is any amino acid
  Variant (408)..(423): Xaa in position 408 to 423 is any or no amino acid
  Variant (427)..(427): Xaa in position 427 is any amino acid
  Variant (429)..(430): Xaa in position 429 to 430 is any amino acid
  Variant (434)..(434): Xaa in position 434 is any amino acid
  Variant (436)..(436): Xaa in position 436 is any amino acid
  Variant (439)..(449): Xaa in position 439 to 449 is any amino acid
  Variant (453)..(455): Xaa in position 453 to 455 is any amino acid
  Variant (457)..(457): Xaa in position 457 is any amino acid
  Variant (461)..(461): Xaa in position 461 is any amino acid
  Variant (466)..(470): Xaa in position 466 to 470 is any amino acid
  Variant (471)..(471): Xaa in position 471 is any or no amino acid
  Variant (474)..(475): Xaa in position 474 to 475 is any amino acid
  Variant (477)..(478): Xaa in position 477 to 478 is any amino acid
  Variant (480)..(480): Xaa in position 480 is any amino acid
  Variant (483)..(485): Xaa in position 483 to 485 is any amino acid
  Variant (489)..(489): Xaa in position 489 is any amino acid
  Variant (493)..(493): Xaa in position 493 is any amino acid
  Variant (496)..(496): Xaa in position 496 is any amino acid
  Variant (500)..(505): Xaa in position 500 to 505 is any amino acid
  Variant (507)..(509): Xaa in position 507 to 509 is any amino acid
  Variant (511)..(512): Xaa in position 511 to 512 is any amino acid
  Variant (514)..(515): Xaa in position 514 to 515 is any amino acid
  Variant (518)..(519): Xaa in position 518 to 519 is any amino acid
  Variant (521)..(521): Xaa in position 521 is any amino acid
  Variant (523)..(523): Xaa in position 523 is any amino acid
  Variant (527)..(527): Xaa in position 527 is any amino acid
  Variant (532)..(532): Xaa in position 532 is any amino acid
  Variant (534)..(534): Xaa in position 534 is any amino acid
  Variant (536)..(537): Xaa in position 536 to 537 is any amino acid
  Variant (541)..(541): Xaa in position 541 is any amino acid
  Variant (544)..(545): Xaa in position 544 to 545 is any amino acid
  Variant (547)..(555): Xaa in position 547 to 555 is any amino acid
  Variant (557)..(559): Xaa in position 557 to 559 is any amino acid
  Variant (561)..(581): Xaa in position 561 to 581 is any amino acid
  Variant (583)..(601): Xaa in position 583 to 601 is any amino acid
  Variant (602)..(604): Xaa in position 602 to 604 is any or no amino acid
  Variant (606)..(624): Xaa in position 606 to 624 is any amino acid
  Variant (625)..(630): Xaa in position 625 to 630 is any or no amino acid
  Variant (632)..(641): Xaa in position 632 to 641 is any amino acid
  Variant (643)..(645): Xaa in position 643 to 645 is any amino acid
  Variant (647)..(659): Xaa in position 647 to 659 is any amino acid
  Variant (660)..(662): Xaa in position 660 to 662 is any or no amino acid
  Variant (664)..(673): Xaa in position 664 to 673 is any amino acid
  Variant (674)..(674): Xaa in position 674 is any or no amino acid
  Variant (676)..(678): Xaa in position 676 to 678 is any amino acid
  Variant (680)..(681): Xaa in position 680 to 681 is any amino acid
  Variant (683)..(685): Xaa in position 683 to 685 is any amino acid
  Variant (687)..(689): Xaa in position 687 to 689 is any amino acid
  Variant (691)..(693): Xaa in position 691 to 693 is any amino acid
  Variant (694)..(694): Xaa in position 694 is any or no amino acid
  Variant (696)..(697): Xaa in position 696 to 697 is any amino acid
  Variant (701)..(702): Xaa in position 701 to 702 is any amino acid
  Variant (707)..(707): Xaa in position 707 is any amino acid
  Variant (711)..(711): Xaa in position 711 is any amino acid
  Variant (713)..(713): Xaa in position 713 is any amino acid
  Variant (715)..(715): Xaa in position 715 is any amino acid
  Variant (717)..(721): Xaa in position 717 to 721 is any amino acid
  Variant (722)..(722): Xaa in position 722 is any or no amino acid
  Variant (724)..(724): Xaa in position 724 is any amino acid
  Variant (727)..(740): Xaa in position 727 to 740 is any amino acid
  Variant (741)..(768): Xaa in position 741 to 768 is any or no amino acid
  Variant (770)..(770): Xaa in position 770 is any amino acid
  Variant (774)..(775): Xaa in position 774 to 775 is any amino acid
  Variant (778)..(778): Xaa in position 778 is any amino acid
  Variant (781)..(781): Xaa in position 781 is any amino acid
  Variant (784)..(787): Xaa in position 784 to 787 is any amino acid
  Variant (789)..(790): Xaa in position 789 to 790 is any amino acid
  Variant (792)..(793): Xaa in position 792 to 793 is any amino acid
  Variant (802)..(802): Xaa in position 802 is any amino acid
  Variant (804)..(804): Xaa in position 804 is any amino acid
  Variant (807)..(809): Xaa in position 807 to 809 is any amino acid
  Variant (813)..(814): Xaa in position 813 to 814 is any amino acid
  Variant (818)..(818): Xaa in position 818 is any amino acid
  Variant (821)..(824): Xaa in position 821 to 824 is any amino acid
  Variant (827)..(829): Xaa in position 827 to 829 is any amino acid
  Variant (835)..(835): Xaa in position 835 is any amino acid
  Variant (844)..(844): Xaa in position 844 is any amino acid
  Variant (846)..(846): Xaa in position 846 is any amino acid
  Variant (849)..(849): Xaa in position 849 is any amino acid
  Variant (852)..(856): Xaa in position 852 to 856 is any amino acid
  Variant (857)..(880): Xaa in position 857 to 880 is any or no amino acid
  Variant (882)..(882): Xaa in position 882 is any amino acid
  Variant (885)..(888): Xaa in position 885 to 888 is any amino acid
  Variant (892)..(894): Xaa in position 892 to 894 is any amino acid
  Variant (896)..(896): Xaa in position 896 is any amino acid
  Variant (901)..(902): Xaa in position 901 to 902 is any amino acid
  Variant (903)..(905): Xaa in position 903 to 905 is any or no amino acid
  Variant (907)..(908): Xaa in position 907 to 908 is any amino acid
  Variant (910)..(910): Xaa in position 910 is any amino acid
  Variant (913)..(916): Xaa in position 913 to 916 is any amino acid
  Variant (919)..(919): Xaa in position 919 is any amino acid
  Variant (924)..(927): Xaa in position 924 to 927 is any amino acid
  Variant (929)..(937): Xaa in position 929 to 937 is any amino acid
  Variant (938)..(948): Xaa in position 938 to 948 is any or no amino acid
  Variant (950)..(952): Xaa in position 950 to 952 is any amino acid
  Variant (954)..(964): Xaa in position 954 to 964 is any amino acid
  Variant (965)..(974): Xaa in position 965 to 974 is any or no amino acid
  Variant (976)..(978): Xaa in position 976 to 978 is any amino acid
  Variant (982)..(982): Xaa in position 982 is any amino acid
  Variant (985)..(986): Xaa in position 985 to 986 is any amino acid
  Variant (988)..(990): Xaa in position 988 to 990 is any amino acid
  Variant (992)..(999): Xaa in position 992 to 999 is any amino acid
  Variant (1000)..(1003): Xaa in position 1000 to 1003 is any or no amino acid
  Variant (1006)..(1006): Xaa in position 1006 is any amino acid
  Variant (1008)..(1008): Xaa in position 1008 is any amino acid
  Variant (1012)..(1012): Xaa in position 1012 is any amino acid
  Variant (1016)..(1025): Xaa in position 1016 to 1025 is any amino acid
  Variant (1026)..(1026): Xaa in position 1026 is any or no amino acid
  Variant (1028)..(1028): Xaa in position 1028 is any amino acid
  Variant (1029)..(1033): Xaa in position 1029 to 1033 is any or no amino acid
  Variant (1036)..(1036): Xaa in position 1036 is any amino acid
  Variant (1041)..(1041): Xaa in position 1041 is any amino acid
  Variant (1043)..(1043): Xaa in position 1043 is any amino acid
  Variant (1045)..(1064): Xaa in position 1045 to 1064 is any amino acid
  Variant (1065)..(1109): Xaa in position 1065 to 1109 is any or no amino acid
  Variant (1112)..(1113): Xaa in position 1112 to 1113 is any amino acid
  Variant (1116)..(1117): Xaa in position 1116 to 1117 is any amino acid
  Variant (1119)..(1119): Xaa in position 1119 is any amino acid
  Variant (1121)..(1124): Xaa in position 1121 to 1124 is any amino acid
  Variant (1126)..(1135): Xaa in position 1126 to 1135 is any amino acid
LXGXXXXYXXXXXXXXXXDPXXVXXXWXXXFXXXXXXXXXXXXXXXXXXXXXXXXXXXXXXXXXXXXXXXXXXXXXXXXXXXXXXXXXXXXXXXXXXXXXXXXXXXXXXXXXXXLXXAYXXXGHXXAXXDPLXXXXXXXXXXXXXXXXXXXXXXXXLXXXXXXXXXXDXXXXXXXXXXXXXXXXXXXXXXXXXLXXXXXXLXXXYCXXXXGXEXXHIXXXXXXXWXXXXXEXXXXXXXXXXXXXXXXLXXLXXXXXXEXXLXXKXXXXKRFXLEGXXXXXPXXXXXXXXXXXXGXXXXVXGMXHRGRLNXLXNXXXKXXXXXFXEFXGXXXXXXXXXXXXXXXXXXXXGXGDVKYHXGXXXXXXXXXXGXXXXLXXXXNPSHLEXXXPVVXGXXRAXQXXXXXXXXXXXXXXXXXXXXXXXXXHGDXAXXGQGXVXETXXXXXXXXXXXGGTXXXVXNNQXGFTTXXXXXXRSXXYXXDXAKXXXAPIXHVNXDDXEAVXXXXXXAXXXRXXFXXDVXXDXVXYRRXGHNEXDXPXXTQPXMYXXIXXXXXXXXXYXXXLXXXXXXXXXXXXXXXXXXXXXLXXXXXXXXXXXXXXXXXXXXXXWXXXXXXXXXXXXXXXXXXXXXXXXXLXXXXXXXXXXPXXXEXXXXXXXXXXXXXXXXRXXXXXXXXXXXWXXXEXXAXXXLXXXGXXXXRXXGQDXXRGTFXHRHXVXHXQXXXXXXYXPLXXXXXXXXXXXXXXXXXXXXXXXXXXXXXXXXXXXXXXXXXXSXLSEXXVLXFEXGYXXXXPXXLXXWEAQFGDFXNXAQXXXDQFXXSGEXKWXXXXGLXXXLPHGYXGQGPEHSSXRXERXLQXXXXXXXXXXXXXXXXXXXXXXXXXXXXXNXQVXXXXTPAXXXHXLRRQXXXXXRXXRXPLXXXXPKXLLRHXXXXSXXXXXXXXXXXXXXXXXXXXFXXXIXXXXXXXXXXXXXXXXXXXXXRXXXCSGXVYXXLXXXRXXXXXXXXXXXXAIXRXEQLXPFPXXXXXXXXXXXYXXXXXXVWXQEEPXNXGXXXXXXXXXXXXXXXXXXXXXXXXXXXXXXXXXXXXXXXXXXXXXXXXXXXXXXXXXXXXXXXXXGRXXSAXXAXGXXXXHXXXXXXXXXXA

SEQ ID NO: 6258 - protein, 59 aa, Artificial sequence
  protein pattern
  Variant (2)..(5): Xaa in position 2 to 5 is any amino acid
  Variant (8)..(8): Xaa in position 8 is any amino acid
  Variant (10)..(10): Xaa in position 10 is Ala, Cys, Gly, Asn or Thr
  Variant (13)..(13): Xaa in position 13 is Cys, Ser or Val
  Variant (14)..(14): Xaa in position 14 is any amino acid
  Variant (15)..(15): Xaa in position 15 is Phe, Ile, Met or Val
  Variant (19)..(19): Xaa in position 19 is Ile, Leu or Val
  Variant (20)..(20): Xaa in position 20 is Ala, Cys, Ser or Thr
  Variant (21)..(21): Xaa in position 21 is Ala, Cys, Gly or Ser
  Variant (23)..(23): Xaa in position 23 is Glu, Gln or Arg
  Variant (24)..(24): Xaa in position 24 is any amino acid
  Variant (27)..(30): Xaa in position 27 to 30 is any amino acid
  Variant (33)..(33): Xaa in position 33 is Thr or Val
  Variant (34)..(35): Xaa in position 34 to 35 is any amino acid
  Variant (40)..(40): Xaa in position 40 is any amino acid
  Variant (41)..(41): Xaa in position 41 is Asp or Glu
  Variant (43)..(43): Xaa in position 43 is any amino acid
  Variant (46)..(46): Xaa in position 46 is Glu or Lys
  Variant (50)..(50): Xaa in position 50 is Ala, Cys or Gly
  Variant (52)..(52): Xaa in position 52 is any amino acid
  Variant (55)..(55): Xaa in position 55 is Phe, Trp or Tyr
  Variant (56)..(56): Xaa in position 56 is Leu or Met
  Variant (57)..(57): Xaa in position 57 is Gln or Ser
  Variant (58)..(58): Xaa in position 58 is any amino acid
  Variant (59)..(59): Xaa in position 59 is Ala, Cys, Gly, Ser or Thr
EXXXXDFXNXAQXXXDQFXXXGXXKWXXXXGLXXXLPHGXXGXGPXHSSXRXERXXXXX

SEQ ID NO: 6259 - protein, 40 aa, Artificial sequence
  protein pattern
  Variant (3)..(3): Xaa in position 3 is Ala, Gly or Ser
  Variant (4)..(4): Xaa in position 4 is Ala or Ser
  Variant (5)..(5): Xaa in position 5 is Phe, Ile or Val
  Variant (6)..(6): Xaa in position 6 is Ala, Cys, Ser or Thr
  Variant (10)..(10): Xaa in position 10 is any or no amino acid
  Variant (12)..(12): Xaa in position 12 is any amino acid
  Variant (14)..(14): Xaa in position 14 is any amino acid
  Variant (15)..(15): Xaa in position 15 is Phe, Leu or Met
  Variant (16)..(16): Xaa in position 16 is any amino acid
  Variant (17)..(17): Xaa in position 17 is Phe, Leu or Met
  Variant (18)..(21): Xaa in position 18 to 21 is any amino acid
  Variant (22)..(22): Xaa in position 22 is Ala, Asp, Glu, Gly, Asn or Ser
  Variant (23)..(23): Xaa in position 23 is Phe, His or Tyr
  Variant (24)..(26): Xaa in position 24 to 26 is any amino acid
  Variant (28)..(28): Xaa in position 28 is Ser, Thr or Val
  Variant (29)..(29): Xaa in position 29 is Ile, Leu, Met or Val
  Variant (30)..(30): Xaa in position 30 is His or Arg
  Variant (31)..(31): Xaa in position 31 is Phe, Ile, Leu or Val
  Variant (32)..(32): Xaa in position 32 is Ile or Val
  Variant (33)..(33): Xaa in position 33 is any amino acid
  Variant (36)..(36): Xaa in position 36 is Gln or Arg
  Variant (37)..(37): Xaa in position 37 is Ile or Val
  Variant (38)..(38): Xaa in position 38 is Ala, Gly or Val
GDXXXXGQGXVXEXXXXXXXXXXXXXGXXXXXXNNXXXFT

SEQ ID NO: 6260 - protein, 57 aa, Artificial sequence
  protein pattern
  Variant (2)..(3): Xaa in position 2 to 3 is any amino acid
  Variant (5)..(5): Xaa in position 5 is Phe, Trp or Tyr
  Variant (6)..(6): Xaa in position 6 is Ala, Pro, Ser or Thr
  Variant (7)..(7): Xaa in position 7 is Ala, Gly, Asn, Ser or Thr
  Variant (8)..(8): Xaa in position 8 is any amino acid
  Variant (12)..(12): Xaa in position 12 is Gly or Ser
  Variant (16)..(16): Xaa in position 16 is any amino acid
  Variant (17)..(17): Xaa in position 17 is Asp or Glu
  Variant (18)..(19): Xaa in position 18 to 19 is any amino acid
  Variant (20)..(20): Xaa in position 20 is Ile or Val
  Variant (22)..(24): Xaa in position 22 to 24 is any amino acid
  Variant (25)..(25): Xaa in position 25 is Ala, Asp, Glu, Gln or Thr
  Variant (26)..(26): Xaa in position 26 is any amino acid
  Variant (27)..(27): Xaa in position 27 is Phe, Ile, Leu or Val
  Variant (28)..(29): Xaa in position 28 to 29 is any amino acid
  Variant (30)..(30): Xaa in position 30 is Ala, Cys, Ser or Val
  Variant (31)..(31): Xaa in position 31 is Ala, Gly, Ser, Thr or Val
  Variant (32)..(33): Xaa in position 32 to 33 is any amino acid
  Variant (34)..(34): Xaa in position 34 is Asp or Gly
  Variant (35)..(36): Xaa in position 35 to 36 is any amino acid
  Variant (37)..(37): Xaa in position 37 is Asp, Glu, Asn or Ser
  Variant (38)..(39): Xaa in position 38 to 39 is any amino acid
  Variant (40)..(40): Xaa in position 40 is Ile, Leu, Met or Val
  Variant (43)..(43): Xaa in position 43 is Ala, Pro or Ser
  Variant (50)..(50): Xaa in position 50 is any amino acid
  Variant (52)..(52): Xaa in position 52 is any amino acid
  Variant (54)..(56): Xaa in position 54 to 56 is any amino acid
LXXKXXXXKRFXLEGXXXXXPXXXXXXXXXXXXXXXXXXXGMXHRGRLNXLXNXXXK

SEQ ID NO: 6261 - protein, 30 aa, Artificial sequence
  protein pattern
  Variant (2)..(2): Xaa in position 2 is any amino acid
  Variant (4)..(7): Xaa in position 4 to 7 is any amino acid
  Variant (8)..(8): Xaa in position 8 is any or no amino acid
  Variant (10)..(10): Xaa in position 10 is any or no amino acid
  Variant (12)..(12): Xaa in position 12 is Ala or Ser
  Variant (13)..(14): Xaa in position 13 to 14 is any amino acid
  Variant (15)..(15): Xaa in position 15 is Phe or Tyr
  Variant (16)..(17): Xaa in position 16 to 17 is any amino acid
  Variant (18)..(18): Xaa in position 18 is Ile or Leu
  Variant (22)..(23): Xaa in position 22 to 23 is any amino acid
  Variant (25)..(26): Xaa in position 25 to 26 is any amino acid
  Variant (28)..(28): Xaa in position 28 is Lys or Arg
NXQXXXXXTXPXXXXXXXRRQXXRXXRXPL

SEQ ID NO: 6262 - protein, 19 aa, Artificial sequence
  protein pattern
  Variant (2)..(2): Xaa in position 2 is Ala, Cys, Thr or Val
  Variant (7)..(7): Xaa in position 7 is any amino acid
  Variant (9)..(9): Xaa in position 9 is any amino acid
  Variant (11)..(11): Xaa in position 11 is Ala, Gly or Ser
  Variant (12)..(12): Xaa in position 12 is Trp or Tyr
  Variant (13)..(18): Xaa in position 13 to 18 is any amino acid
  Variant (19)..(19): Xaa in position 19 is Phe, Ile, Leu or Met
WXQEEPXNXGXXXXXXXXX

SEQ ID NO: 6263 - protein, 17 aa, Artificial sequence
  protein pattern
  Variant (6)..(7): Xaa in position 6 to 7 is any amino acid
  Variant (8)..(8): Xaa in position 8 is Asp, Asn or Ser
  Variant (9)..(9): Xaa in position 9 is Gly, Pro or Ser
  Variant (12)..(12): Xaa in position 12 is any amino acid
  Variant (14)..(14): Xaa in position 14 is any amino acid
  Variant (15)..(15): Xaa in position 15 is Ala, Thr or Val
PSHLEXXXXVVXGXXRA

SEQ ID NO: 6264 - protein, 23 aa, Artificial sequence
  protein pattern
  Variant (2)..(2): Xaa in position 2 is any amino acid
  Variant (6)..(6): Xaa in position 6 is any amino acid
  Variant (7)..(7): Xaa in position 7 is Ala or Gly
  Variant (8)..(8): Xaa in position 8 is any amino acid
  Variant (9)..(9): Xaa in position 9 is Leu, Met or Val
  Variant (10)..(10): Xaa in position 10 is Ala, Gly or Ser
  Variant (13)..(13): Xaa in position 13 is any amino acid
  Variant (16)..(16): Xaa in position 16 is Ala or Ser
  Variant (17)..(19): Xaa in position 17 to 19 is any amino acid
  Variant (21)..(22): Xaa in position 21 to 22 is any amino acid
SXLSEXXXXXFEXGYXXXXPXXL

SEQ ID NO: 6265 - protein, 9 aa, Artificial sequence
  protein pattern
  Variant (2)..(2): Xaa in position 2 is Ile, Leu or Val
  Variant (5)..(5): Xaa in position 5 is Ile or Leu
  Variant (6)..(6): Xaa in position 6 is any amino acid
RXEQXXPFP

SEQ ID NO: 6266 - protein, 11 aa, Artificial sequence
  protein pattern
  Variant (2)..(2): Xaa in position 2 is Asn or Ser
  Variant (7)..(8): Xaa in position 7 to 8 is any amino acid
  Variant (9)..(9): Xaa in position 9 is Ala, Cys or Thr
  Variant (10)..(10): Xaa in position 10 is any amino acid
KXLLRHXXXXS

SEQ ID NO: 6267 - protein, 10 aa, Artificial sequence
  protein pattern
  Variant (2)..(2): Xaa in position 2 is Ser or Thr
  Variant (9)..(9): Xaa in position 9 is any amino acid
GXGDVKYHXG

SEQ ID NO: 6268 - DNA, 1374 bp, Azotobacter vinelandii
  CDS (1)..(1374): transl_table=11
atgcggctcttttctctgcggtcggggcatatccggccgctctctgcggtgaagatggggagtttcagcgtgaaaccggtcaaagtaggcatctgtggactgggtaccgtcggcggcggcaccttcaatgtgctcaagcgcaatgccgaggagatcgcccgccgcgccgggcgtgacatcgagatcgcccagatcgccatgcgcagctccaacccgaaatgcgatatcgccggcacccccatcgccgccgatgtcttcgaactggtcgacaatccggaggtcgaggtcgtcgtcgaactgatcggcggttgcagtctggcccgcgagttggtgctcaaggccatcgacaacggcaagcacgtggtcaccgcgaacaaggcgctgatcgccgtgcatggcgacgaactcttcgccaaggcccgcgagaagggcgtgatcgtcgccttcgaggcggcggtggccggcggcattccagtgatcaaggcgatccgcgagggtctggccggcaaccgcatcaactgggtggccggcatcatcaacggtaccggcaacttcattctcagcgaaatgcgcgagaagggccgggccttcgccgacgtgctcaaggaggcccaggcgctgggctacgccgaggccgatccgaccttcgacgtggagggcatcgatgccgcccacaagctgaccatcctcgcctccatcgccttcggcattccgctgcaattcgacaaggcctacaccgaaggcatttccaggctcaccagcgccgacgtcggctacgccgaggcgctgggttaccgcatcaagcacctgggcatcgcacggcgcaccgccgaaggcttcgagctgcgcgtgcacccgacgctgatcccggccgaccgcctgatcgccaacgtcaacggcgtgatgaacgcggtgatggtcaacggcgatgccgtgggctcgaccctgttctgcggcgccggcgccggtatggagccgaccgcctcggcggtggtggccgatctggtggacgtggtccgcgccatgacttccgacccggagaaccgcgtgccgcacctggccttccagcccgatgcgctgtccgcccacccgattctgccgatttcgtcctgcgagagcgcctactacctgcgcatccaggccaaggaccatccgggcgtgctggcccaggtggcgaccatcctttccgagcgtggcatcaacatcgagtcgatcatgcaaaaggaggccgaggagcacgacggcctggttcccatgatcctggtcacccaccgggtccgggagcgctgtatcgacgaagccatcgccgccatggaggcgctcgagggcgtggtcggcaaggtcgtccgcatccgcgtcgaacagctcaactaa

SEQ ID NO: 6269 - protein, 457 aa, Azotobacter vinelandii
MRLFSLRSGHIRPLSAVKMGSFSVKPVKVGICGLGTVGGGTFNVLKRNAEEIARRAGRDIEIAQIAMRSSNPKCDIAGTPIAADVFELVDNPEVEVVVELIGGCSLARELVLKAIDNGKHVVTANKALIAVHGDELFAKAREKGVIVAFEAAVAGGIPVIKAIREGLAGNRINWVAGIINGTGNFILSEMREKGRAFADVLKEAQALGYAEADPTFDVEGIDAAHKLTILASIAFGIPLQFDKAYTEGISRLTSADVGYAEALGYRIKHLGIARRTAEGFELRVHPTLIPADRLIANVNGVMNAVMVNGDAVGSTLFCGAGAGMEPTASAVVADLVDVVRAMTSDPENRVPHLAFQPDALSAHPILPISSCESAYYLRIQAKDHPGVLAQVATILSERGINIESIMQKEAEEHDGLVPMILVTHRVRERCIDEAIAAMEALEGVVGKVVRIRVEQLN

SEQ ID NO: 6270 - DNA, 1287 bp, Xanthobacter autotrophicus Py2
  CDS (1)..(1287): transl_table=11
atgagcgaactgaaagtgggccttgccggcctcggcaccgtcggggcggcggtgttccgcatgctcgaacgccgcaaggccgagcttgaggcccgcaccggccgcaccctcagggtgacggcggtggcggcccgcgaccgcagccgcgaccgtgggctcgaccttggcggcgtgatctggttcgaggatcccgtggcgctggcccgcgacggcgacatcgatgtgttcgtagagctgatgggcggcgacggcgaccccgccaaagccgcggtggccgcagccctcgaccggggcatcccggtggtgaccgccaacaaggcgctgctggccaaatgcggcgtggaactcgcccaacgggcggaagcttcccgggccggcctgcatttcgaggcggcggtggcgggcggcatccctatcgtgaagaccctgcgcgaatcgctggccggcaacaccatcgagcgggtgtcgggcatcctcaacgggacctgcaactacatcctcacccgcatggcggaggagaaactctccttccacgtctgcctcggcgaggcgcagcggctgggctatgcggaggcggacccgaccttcgacatcgacggcttcgacaccgcccacaagctcgccatcctcacgtcgctggccttcggcacccaggtggatgcggattccatatacgtggagggcattcgccagctgaccctcgccgacctcgaggcggcggacgacctcggctaccgggtgaagctgctgggcgtcgccgtgcgcaccgagaccggcatcgagcagcgagtgcatcccaccatggtgcccaagcactggcccatcgcccaggtgtccggcgtcaccaatgctgtggcggtggacggcgatgcggtggcgctgacactggtcggccccggcgccggcggcgcggccacagcctccgccgtggtgggcgacctgttcgacgtggctcgcggcgccaggggctacaccttcggcctgcccgtggccgagctgaccaaggccgagcgcgccgccatgcagcgccacgagggcggctactacatccgcctcgcggtggtgaacaagcccggcaccgccgccaccatcgcccgccgcatggcggacgagcagatctcgctcgaatccatcatgcagcgccggcccgacggcgccgagaccgcgcgcgtcatcctcatcacctatgcgaccacggaagaagccgtgcgccgcgccattgccgccatcgaggccgacggggtcatctctgcattgccgcaggtgatccgaatcgagaaggattga

SEQ ID NO: 6271 - protein, 428 aa, Xanthobacter autotrophicus Py2
MSELKVGLAGLGTVGAAVFRMLERRKAELEARTGRTLRVTAVAARDRSRDRGLDLGGVIWFEDPVALARDGDIDVFVELMGGDGDPAKAAVAAALDRGIPVVTANKALLAKCGVELAQRAEASRAGLHFEAAVAGGIPIVKTLRESLAGNTIERVSGILNGTCNYILTRMAEEKLSFHVCLGEAQRLGYAEADPTFDIDGFDTAHKLAILTSLAFGTQVDADSIYVEGIRQLTLADLEAADDLGYRVKLLGVAVRTETGIEQRVHPTMVPKHWPIAQVSGVTNAVAVDGDAVALTLVGPGAGGAATASAVVGDLFDVARGARGYTFGLPVAELTKAERAAMQRHEGGYYIRLAVVNKPGTAATIARRMADEQISLESIMQRRPDGAETARVILITYATTEEAVRRAIAAIEADGVISALPQVIRIEKD

SEQ ID NO: 6272 - DNA, 1314 bp, Mesorhizobium loti MAFF303099
  CDS (1)..(1314): transl_table=11
atggctgaagctctgcgtgttggaattgccggacttggcacggtgggtgcagcggtggcgcgggtgctgcgcgacaaggcggcggagctgacccggcaatgcgggcgcgacatcgtcgtgtcggcggtttcggcgcgcgacccgaaacgcgaccgtggcgtcgatgtcagcgccgcaaaatggttcgacgatccggtcaagatggcgcagagcgccgagatcgatgtgttcatcgaactgatcggcggcgacgaggggccggcgcgcctgtcggtgaaggcggcgctcgaagccggccgccacgtcgttaccgccaacaaggcgctgcttgccaagcatggcgtggcgctggccgagatcgccgagaagaagggcgtgctgctcaactacgaggcggcggtggcgggcggcattcccgtcatcaagacgatgcgcgaggcgatggccggcaactcggtcacccgcgtgttcggcattctcaacggcacctgcaactacatcctgacccgcatggaggccgagggcatctcgttcgatgcctgcctgaaggatgcgcagcggctgggctacgccgaggccgatccgaccttcgacatcgagggccatgacaccgcgcacaagctgtcgatcctgaccagccttgccttcggcaccaagatcgccgccaacgacatctatatggaaggcatctccaacatcacacaggccgacatccgcgccgccggcgatctcggctaccggatcaagctgctcggcgttgcccagcgcaccgatagcggtatcgagcagcgcgtgcatccgaccatggtgccgaccgcctccgttatcgcgcaagtgcatggcgtcaccaatgcggtggcgatcgagaccgatatccttggcgaattgctgctctccggccctggcgccggcggcaacgccaccgcctctgccgtgatcggcgacatcgccgacatagccaagagccgccccggcttccagcatggtccggtctttggcctgccggcgaaggagctcaggccctacaagaaggcgcagatgcgcagccatgccggcggctacttcatccggctaaccgtgcatgatcgcattggcgtcttcgccgcgatcgccaagcgcatggccgacaacgatatttcactggaatcgatcgtccagcacgcagtcaacggcgaagcggcggcgcagaagacggtgatcctcgtcacccacgagaccaccgaggccgccgtgcgcaaggccgtcgacggcatcaccaaggacggtcacctgaccgacaagccgcaggtcatccgcatcgagcgggcagggtaa

SEQ ID NO: 6273 - protein, 437 aa, Mesorhizobium loti MAFF303099
MAEALRVGIAGLGTVGAAVARVLRDKAAELTRQCGRDIVVSAVSARDPKRDRGVDVSAAKWFDDPVKMAQSAEIDVFIELIGGDEGPARLSVKAALEAGRHVVTANKALLAKHGVALAEIAEKKGVLLNYEAAVAGGIPVIKTMREAMAGNSVTRVFGILNGTCNYILTRMEAEGISFDACLKDAQRLGYAEADPTFDIEGHDTAHKLSILTSLAFGTKIAANDIYMEGISNITQADIRAAGDLGYRIKLLGVAQRTDSGIEQRVHPTMVPTASVIAQVHGVTNAVAIETDILGELLLSGPGAGGNATASAVIGDIADIAKSRPGFQHGPVFGLPAKELRPYKKAQMRSHAGGYFIRLTVHDRIGVFAAIAKRMADNDISLESIVQHAVNGEAAAQKTVILVTHETTEAAVRKAVDGITKDGHLTDKPQVIRIERAG

SEQ ID NO: 6274 - DNA, 1308 bp, Aquifex aeolicus VF5
  CDS (1)..(1308): transl_table=11
atgggctttgtaagggtcggaataatcggttgcggtacggttggaacgggaaccgccaaactcctcatacagaatgcagacctaataaagaagaaaacgggtatagagttcaaactcgtgaaagttgcggacatagactgggagagaaagagggagtttgaagttccgaaagaactgagaaccacagattataaagaagttatagataattcggacgtggtcgttgaactcgtaggcggtaaaactttcgctaagaaggtaatactggaagctctggaagcgggaaagtgcgttgttacagcaaataaacacctcctcgcagaggaagggaaggagatttttgaagaggccaagaagagaaacttatttataggttttgaagcctcggtgggaggagggattcccgtgataaaagcgttaagggaaggacttgcggggaataaaattctcaacatcctcggtatcctcaacggaacgacaaattacatactcacgaggatgtttgaggaaaatcttgactttgaaacggctttaaaggaagcaaaagaaaaagggtatgcggaggcagatccaagtcttgacatagacgggtgggatgcggctcacaagattgctattctcgccatgctcgcctacggtgggtatctagactttaacgacgtttacgtagagggtataaggaacgttgataagctcgacgtagaactgggaaaggaactgggatacacactgaaactcctcgcaatcgcgaaaaaagttgactcggaggttgaggtgagggttcatcccacctttatacactccgaggaagcccttgcaaaggtctccggagtttacaacgcagtcatgatagagggagattttgtagggaaaaccatgttctatggtcagggggcgggttcacatccgaccgcttctgcggtggtggcggacgtgatagacgcggggaggttcttactctgtagctctaaggttcttcctcccgtgaactgggaagaaggagaactgaaggtcaggaagaacttttactccaggtactaccttaggtttgacgttcctgacaagcccggagttctggcaaagatagcgaatgtacttgcggattacaatataagcatagcctcggttctccagaaggaaatggtttgtaaaatcgcgggcagggagggtgaaactatagttcctctggttatcctgactcacaaagcttttgaagaggatatacagaacgctttaaaggagatacagaagctccccgtagttgttgataagcccgtgctgatacgtgtggaagaggaggcttactga

SEQ ID NO: 6275 - protein, 435 aa, Aquifex aeolicus VF5
MGFVRVGIIGCGTVGTGTAKLLIQNADLIKKKTGIEFKLVKVADIDWERKREFEVPKELRTTDYKEVIDNSDVVVELVGGKTFAKKVILEALEAGKCVVTANKHLLAEEGKEIFEEAKKRNLFIGFEASVGGGIPVIKALREGLAGNKILNILGILNGTTNYILTRMFEENLDFETALKEAKEKGYAEADPSLDIDGWDAAHKIAILAMLAYGGYLDFNDVYVEGIRNVDKLDVELGKELGYTLKLLAIAKKVDSEVEVRVHPTFIHSEEALAKVSGVYNAVMIEGDFVGKTMFYGQGAGSHPTASAVVADVIDAGRFLLCSSKVLPPVNWEEGELKVRKNFYSRYYLRFDVPDKPGVLAKIANVLADYNISIASVLQKEMVCKIAGREGETIVPLVILTHKAFEEDIQNALKEIQKLPVVVDKPVLIRVEEEAY

SEQ ID NO: 6276 - DNA, 1272 bp, Methanothermobacter thermautotrophicus str. Delta H
  CDS (1)..(1272): transl_table=11
gtgaacattggactcataggatttggaacaataggggcaggtgtggtggaaatattcaacaccaaccctgatatcataatgaaaaagacagggatggagctcaggctcaggagggtggttgaccttgacattgaaaccgaccgtggcgttgaaatagatccggggatcctgtcaaccgacgcagatgacattctcgaggatcctgaaatagacatcgtcatagaactcataggtggctatgaaccggcgcgtagcttcatcctgaaggccatagaaaatggtaaacatgttgtaacagccaacaaggcactccttgcaaggcactgggatgagataatggatgctgccagggagcatggcgtgagggttgcatttgaggccagtgttggtggtggtatacccgtcctcagggccctcaacgagtccctcgcagccaacagaatagaatccatatatggaataataaacggtaccgccaattacatactgaccaggatggcctcagagggcatggaatttgatgatgttctgcgggaggcccagaggctcggatatgctgaaagggatcccaccttcgacatagagggccatgacaccgcacagaagctaataatactcacactgcttggttttggtgtccatgtaccggaggatgaactccatgttgagggtataagcagtataaggagggatgacattgaatatgccactgcagagcttggatgcagtgtgaagctccttgcaacagccaggctcaatgatggtgaactggagctgggtgttacaccaacccttgtaccacaccatcacctcctctcctctgtgaacggtgtcttcaacgggatatacatcacaggggacttcacagggccagtcatgttctatgggaagggtgcaggcaggagggccactgcaagtgcagttgtcgcagactgcatggatattgcagttaaccctgagggatcaatgcccacaggtccgggcatcagggttgttgagtcagtgcgggacttctccaggacatcctcaaggtactacataaggcttgatgccgtagacagggcaggggtgctccatgaaatagccggagccttcagcaggcacggtataagtatagaatcagtgacccagaagggcgcccatgagggtgaaactgtgccgatctacatcgtaacccatgaggcaagtgagggggccatccagggggccctctctgagatatcagagatcaggtgggtgaggggtgaacccctgcgcctccggatactctga

SEQ ID NO: 6277 - protein, 423 aa, Methanothermobacter thermautotrophicus str. Delta H
MNIGLIGFGTIGAGVVEIFNTNPDIIMKKTGMELRLRRVVDLDIETDRGVEIDPGILSTDADDILEDPEIDIVIELIGGYEPARSFILKAIENGKHVVTANKALLARHWDEIMDAAREHGVRVAFEASVGGGIPVLRALNESLAANRIESIYGIINGTANYILTRMASEGMEFDDVLREAQRLGYAERDPTFDIEGHDTAQKLIILTLLGFGVHVPEDELHVEGISSIRRDDIEYATAELGCSVKLLATARLNDGELELGVTPTLVPHHHLLSSVNGVFNGIYITGDFTGPVMFYGKGAGRRATASAVVADCMDIAVNPEGSMPTGPGIRVVESVRDFSRTSSRYYIRLDAVDRAGVLHEIAGAFSRHGISIESVTQKGAHEGETVPIYIVTHEASEGAIQGALSEISEIRWVRGEPLRLRIL

SEQ ID NO: 6278 - DNA, 1248 bp, Campylobacter jejuni subsp. jejuni NCTC 11168
  CDS (1)..(1248): transl_table=11
atgaaagtagcgattcttggttatggcactgttggaagtgcggtggttaaatttcttttagaaaatgataaactcattcgtgcaagatgtgggcaaagcataactcctgtgatcgctcttgctagaagtcctaaaaaaaatgctttaattccaattactcatagcgttgcagaaattttaaatgctgatgtagatgtttttgtagaattaatgggtggggtggatgaagcttttaaaatagtgagtgaaattttaaaaaagaaaaaagctgttgttactgcaaataaagctatgcttgcttatcatcgttatgaacttgaaaatttggctaaaaatttagcttttggttatgaagcaagtgtggctggaggaattcctattatcaaggttttaaaagaaggtttaagtgcaaataatattttggctataaaagggattttaaatggtacgagtaattatattttaagttctatgagtcaaaaaaatatgagttttaaacaagctttgcaaatagctcaaaatttaggttatgcagaggctgatccaacttttgacatagaagggcaagatgcagcacataaactgcttgttttatcaagtatcgcttataatcttaaagctaaacctgaagatattttgatcgagggtattagtgaaattgcacctgaagatatgtattttgctaatgagtttgaatttaccataaaacttttaggtatagctaaggtgcgtgaaaataaagtagaattaagggtgcatcctactatgatagataaagaaaaaatgcttgcaaaagttgatggagtgatgaatgctataagcattaatggagatttgttgggtgaaagtttgtattatggagcaggagcaggaggagaggccactgcaagtgctgtgatttcagatcttatggatatagcaagagatcaggtaaaagcaccaatgcttggttttgtgaatactttagaatacaagcttttaagcaaagatgaaatttatacaaaatattatttaagggtgaaagttgaagataaaatagggattttatctaaaatcacacaattgatgagtgaaaataatatttctatcgatagttttttacaaaaacctaaaaaaaatgatgaaaattacagtactttgttttttactacacatttaacttatgaaaaaagcatacaaaatttgcttgaaattttacgcaaacaagattttataaaaaccaagccttttatgatgcgtatagaataa

SEQ ID NO: 6279 - protein, 415 aa, Campylobacter jejuni subsp. jejuni NCTC 11168
MKVAILGYGTVGSAVVKFLLENDKLIRARCGQSITPVIALARSPKKNALIPITHSVAEILNADVDVFVELMGGVDEAFKIVSEILKKKKAVVTANKAMLAYHRYELENLAKNLAFGYEASVAGGIPIIKVLKEGLSANNILAIKGILNGTSNYILSSMSQKNMSFKQALQIAQNLGYAEADPTFDIEGQDAAHKLLVLSSIAYNLKAKPEDILIEGISEIAPEDMYFANEFEFTIKLLGIAKVRENKVELRVHPTMIDKEKMLAKVDGVMNAISINGDLLGESLYYGAGAGGEATASAVISDLMDIARDQVKAPMLGFVNTLEYKLLSKDEIYTKYYLRVKVEDKIGILSKITQLMSENNISIDSFLQKPKKNDENYSTLFFTTHLTYEKSIQNLLEILRKQDFIKTKPFMMRIE

SEQ ID NO: 6280 - DNA, 1287 bp, Streptococcus pneumoniae TIGR4
  CDS (1)..(1287): transl_table=11
atgacagttaaaattgctttactaggatttggtaccgttgcaagtggtgtgcctttcctcctaaaggaaaatggaggaaaaatcaatcaatcagcacattcagatatcaaagttgctaaggtattggtcaaggatgaagatgaaaaaaatcgcttgcttgcagcagggaatgactttaactttgtaaccaatgtggatgatattttatcagaccaggatattactatcgtagtggaattgatggggcgtattgagcctgctaaaacctttatcactcgtgccttggaagctggaaaacacgttgttactgctaacaaggaccttttagctgtccatggcgcagaattgctagaaatcgctcaagctaacaaggtagcactttactacgaagcagcagttgctggtgggattccaattcttcgtactttagcaaattccttggcttctgataaaattacgcgcgtgcttggagtagtcaacggaacttccaacttcatggtgaccaagatggtggaagaaggctggtcttacgatgatgctcttgcggaagcacaacgtctaggatttgcagaaagcgatccgacgaatgacgtagatgggattgatgcagcctacaagatggttattttgagccaatttgcctttggcatgaagattgcctttgatgatgtagcccacaagggaatccgcaatatcacaccagaagacgtagctgtagctcaagagcttggttacgtagtgaaattggttggttctattgaggaaacttcttcaggtattgctgcagaagtgactccaaccttcctacctaaagcgcacccacttgctagtgtgaatggcgtaatgaacgctgtctttgtagaatctatcggtattggtgagtctatgtactacggaccaggtgcgggtcaaaaaccaactgcaacaagtgttgtagctgatattgtccgtatcgttcgtcgtttgaatgatggtactattggcaaagacttcaacgaatatagccgtgacttggtcttggcaaatcctgaagatgtcaaagcaaactactatttctcaatcttggctctagactcaaaaggtcaggtcttgaagttggctgaaatcttcaatgctcaagatatttcctttaagcaaatccttcaagatggcaaagagggtgacaaggcgcgtgtcgttatcatcacacacaagattaataaagcccagcttgaaaatgtctcagctgaattgaagaaggtttcagaattcgacctcttgaataccttcaaggtgctaggagaataa

SEQ ID NO: 6281 - protein, 428 aa, Streptococcus pneumoniae TIGR4
MTVKIALLGFGTVASGVPFLLKENGGKINQSAHSDIKVAKVLVKDEDEKNRLLAAGNDFNFVTNVDDILSDQDITIVVELMGRIEPAKTFITRALEAGKHVVTANKDLLAVHGAELLEIAQANKVALYYEAAVAGGIPILRTLANSLASDKITRVLGVVNGTSNFMVTKMVEEGWSYDDALAEAQRLGFAESDPTNDVDGIDAAYKMVILSQFAFGMKIAFDDVAHKGIRNITPEDVAVAQELGYVVKLVGSIEETSSGIAAEVTPTFLPKAHPLASVNGVMNAVFVESIGIGESMYYGPGAGQKPTATSVVADIVRIVRRLNDGTIGKDFNEYSRDLVLANPEDVKANYYFSILALDSKGQVLKLAEIFNAQDISFKQILQDGKEGDKARVVIITHKINKAQLENVSAELKKVSEFDLLNTFKVLGE

SEQ ID NO: 6282 - DNA, 1290 bp, Clostridium acetobutylicum ATCC 824
  CDS (1)..(1290): transl_table=11
atggataaaattaagataggaattttggggcttggtaatgtaggcagaggagttttaaaaatactcaatacaaataaagaagaaatacaaaaaaggtcggggtatgatatagaaattggaaaaattcttgtaagaaatatagataagaataggggaatagatgtacctcgtgaattgcttacagtagaccctgatgacatacttgaagatgagtctataaaaatagttattgaggtaataggtggaataaatccagctaaggactatatattaagagctatgaaaaacaaaaagcatgttgtaactgcaaataaaatgcttcttgcaacagaaggcgatgagttatttgatactgctgaagaagagggagttatgttttattatgaagcaagtgttgctggaggaattccaataatacatgccataaatgaaagtcttactgccaataaaattgaacaattaataggaataataaatggaactacaaattatattttaactaaaatgactcttgaaaaaatgaattttcatgatgcactaagagaagcacaggagaaaggatttgcagaggctgacccaacttctgatatagaggcttatgatgctatgtataagcttgctatattaagctcactttcatttggtactaagataaatgtagatgatgtatatagagaaggaataacaaaaatagaacctatagatatagaatttgcgagagagtttggatatgtaataaaattagtagctattgtaaaagaaactgagacgggacttgagatgagggttcatcctactatgataccagaaaggcatcctcttgcaaatgttaatgattcgtttaatgcaatatttataaaaggaaatgctgttggggatataatgctttacggaagaggagcaggtgatttgccaactggaagcgcagttgttgcagatgtaatatctatacttagaggaaatgttgatttatcagctataagcacagtcaaaaagaactactggaatagagaaattaatcctatggacaaaacaagaagtgagtactatgtgagaataacagtcaaggatttgccgggtgttcttggagaaatttcaatgatctttggagaagagggggtaagtcttctttctgttatgcaaaagggaaagagagaagagtgtgttactgtagtgtactttacccattcggccaatgaaggaatgataaagagtgctatagatagaattaaaagttctaagtatacaaagagcgtggataatatcataagaatagaaaatatacaataa

SEQ ID NO: 6283 - protein, 429 aa, Clostridium acetobutylicum ATCC 824
MDKIKIGILGLGNVGRGVLKILNTNKEEIQKRSGYDIEIGKILVRNIDKNRGIDVPRELLTVDPDDILEDESIKIVIEVIGGINPAKDYILRAMKNKKHVVTANKMLLATEGDELFDTAEEEGVMFYYEASVAGGIPIIHAINESLTANKIEQLIGIINGTTNYILTKMTLEKMNFHDALREAQEKGFAEADPTSDIEAYDAMYKLAILSSLSFGTKINVDDVYREGITKIEPIDIEFAREFGYVIKLVAIVKETETGLEMRVHPTMIPERHPLANVNDSFNAIFIKGNAVGDIMLYGRGAGDLPTGSAVVADVISILRGNVDLSAISTVKKNYWNREINPMDKTRSEYYVRITVKDLPGVLGEISMIFGEEGVSLLSVMQKGKREECVTVVYFTHSANEGMIKSAIDRIKSSKYTKSVDNIIRIENIQ

SEQ ID NO: 6284 - DNA, 1422 bp, Agrobacterium tumefaciens str. C58
  CDS (1)..(1422): transl_table=11
gtgctgacgaaacgatgcacaatgtcgtttcgctcaacgcccacagataagggcaaccgaaggcggccgggcctcggccgccaccatcaccagcaaatcaggaacatacccatggcagattcattgagaatcggcatagcggggctcggcactgtcggcgcttcgctcgtgcgcatcctccagcagagaagcaacgaacttgcgattacctgcggacgcgcgattgagattattgcggtgagcgcgcgcgaccgttcgcgcgaccgcggcatcgatctcaagggtattacctggttcgacacgcccgagcagatggcgagcgaagccgatatcgatgtgttcgtcgaactggtcggcggtgcttccggacaggcagaaaatgcggtgcgggcagcgctttcgcgtggtctccatgtagtgacagccaacaaggcactgcttgccaagcatggcgtcgaactggcgaccattgccgaggacaagggcgcgctgctcaatttcgaggcggcggtggctggcggtatcccggtcatcaaggcgctgcgtgaatccttgaccggcaaccatgtgtcgcgcatctacggcatcatgaacggcacctgcaactacatcctcaccaagatggagaaggaaggcctgtcgttcgaggtgtgcctgaaggaagcgcagcggctcggttatgccgaagcggatccggccttcgatatcgaaggcaacgacaccgcgcacaagctctcgattctgaccacgcttgccttcggcaataagatcgctgccgacgacatctatctcgaaggcatcaccaatatctccatcgaggatattcaggcggctgccgagcttggttaccgcatcaagcttctcggcgtggcgcaggtgacggactccggcatcgaacagcgcgtgcacccgaccatggtgccgctcgactccgttatcgcccaggtggatggcgtgaccaatgcggtggcgatcgaatccgacattctcggcgaattgctgatggtcggcccgggtgccggcggcaacgccacggcgtctgccgtacttggtgacatcgccgatatcgccaagagccgtccaggcacccagcaggtgcccgtactcggccgtccggccaagtcgctgacggagtaccgccgcgccaagatgaagagccatgagggcggttatttcatccgtctgacggtgaaggatcaggcgggcgtcttcgcctccatcgccacccgcatggctgacaataacatctcgctggaatccatcgtgcagcgccagcgcgtgcatgtggaaggcgcgccgcagaccatcatcctggtcacccatgcgacgatggaagatgcgatccgcaaggccgtgaaggcgatcaagaacgagaaatatctcgtcagcgaaccgcaggtcatccgcatcgagcggacctga

SEQ ID NO: 6285 - protein, 473 aa, Agrobacterium tumefaciens str. C58
MLTKRCTMSFRSTPTDKGNRRRPGLGRHHHQQIRNIPMADSLRIGIAGLGTVGASLVRILQQRSNELAITCGRAIEIIAVSARDRSRDRGIDLKGITWFDTPEQMASEADIDVFVELVGGASGQAENAVRAALSRGLHVVTANKALLAKHGVELATIAEDKGALLNFEAAVAGGIPVIKALRESLTGNHVSRIYGIMNGTCNYILTKMEKEGLSFEVCLKEAQRLGYAEADPAFDIEGNDTAHKLSILTTLAFGNKIAADDIYLEGITNISIEDIQAAAELGYRIKLLGVAQVTDSGIEQRVHPTMVPLDSVIAQVDGVTNAVAIESDILGELLMVGPGAGGNATASAVLGDIADIAKSRPGTQQVPVLGRPAKSLTEYRRAKMKSHEGGYFIRLTVKDQAGVFASIATRMADNNISLESIVQRQRVHVEGAPQTIILVTHATMEDAIRKAVKAIKNEKYLVSEPQVIRIERT

SEQ ID NO: 6286 - DNA, 1323 bp, Sinorhizobium meliloti 1021
  CDS (1)..(1323): transl_table=11
atggcagatgccctcaaaatcggcattgcgggcttggggaccgtcggtgcctcgctcgtgcggattctccaggatcgtcatgagacgatggcgaccacatgcggcagggcgatcgaaattacggccgtagcggcaagggaccggtcgaaagatcggggagtgaagcttacgggaattgcctggttcgaggacgctgtttcgctggcgtcggaagcagacgtcgacgtctttgtcgaactgatgggcggtgccggagatccggcctattcctgcgtgaaggcggcgctcacgcgcggcgttcatgtggtgaccgccaataaggcacttctggcagcacatggtattgaactggcggaaattgccgagcagcatggcgcgcttctgaattacgaagctgcggtcgccggcggcattcccgtcatcaaggcgcttcgcgagtcgatgaccggcaacacgatctcgcgcgtctacgggatcatgaacggcacgtgcaactacatcctgacgaaaatggagaaggaggggctctccttcgaggagtgcctcaaggaggctcagcgtctcggctatgccgaggccgatccggccttcgacatcgagggcaacgacaccgcgcacaagctctcgatcctgacgagccttgccttcggcaccgcgattgctgccgacgacatctatctcgagggcatcaccaacatctcgatcgaagatattcaggcggcttccgacctcggttaccgcatcaagcttctcggagtggcccagcgaaccgatagcggcatagagcagcgcgtccatccgaccatggtaccccacgacaccgtcatcgcgcaggtcgacggggtgacaaatgcggttgcgatcgaatccgacattcttggcgagctcctgatggtgggcccgggcgccggcggggacgcgaccgcatcggccgtgcttggcgatatcgccgacattgccaagagccggcccggcgcgcagcacgtgccggcattcggccgtccggcgaaggcgctgctgccctataagcgcgcccggatgcagagccatgagggcggctacttcatccggttgaaagtggtcgaccgcaccggcgtcttcgccaatgtggcgaagcacatggcggagaacgacatctcgctggaatccatcatgcagcattccaagcactatgccgacccggccgagccgaagacgatcatcctcgtcacgcatgcgacatcagaggcctccgtgcgcaaggcgatcgtctcgatcaagggcgagggctatctcgtcggcgagccgcaggtcatccggatcgagcgtccgaaggcctggtga

SEQ ID NO: 6287 - protein, 440 aa, Sinorhizobium meliloti 1021
MADALKIGIAGLGTVGASLVRILQDRHETMATTCGRAIEITAVAARDRSKDRGVKLTGIAWFEDAVSLASEADVDVFVELMGGAGDPAYSCVKAALTRGVHVVTANKALLAAHGIELAEIAEQHGALLNYEAAVAGGIPVIKALRESMTGNTISRVYGIMNGTCNYILTKMEKEGLSFEECLKEAQRLGYAEADPAFDIEGNDTAHKLSILTSLAFGTAIAADDIYLEGITNISIEDIQAASDLGYRIKLLGVAQRTDSGIEQRVHPTMVPHDTVIAQVDGVTNAVAIESDILGELLMVGPGAGGDATASAVLGDIADIAKSRPGAQHVPAFGRPAKALLPYKRARMQSHEGGYFIRLKVVDRTGVFANVAKHMAENDISLESIMQHSKHYADPAEPKTIILVTHATSEASVRKAIVSIKGEGYLVGEPQVIRIERPKAW

SEQ ID NO: 6288 - DNA, 1290 bp, Caulobacter crescentus CB15
  CDS (1)..(1290): transl_table=11
atgacgaacaagacctggcgcgtcggcgtcgcgggcctgggtacggttggcggcggtctcctgcagttcctggcggaacggcccggcttcgcgccggccggcgacctggccgtcgtgacggcagtgtccgcccgctcgaagtcgcgcccgcgcacggtcgacatctccaacctcgtctggttcgacgaccccgtggccctggccgcctcgccggagatcgacatcttcgtcgagctggtcggcggctcggatggtccggccaaggccgccgtcgagaccgcgctgaaggcgggcaagccggtcgtcaccgccaacaaggccctgatcgccgagcacggcgccgagttggccgccctggccgaagccaccaacaccccgctgctgttcgaggcggcggtgatgggtggcgttcccgccgtgaagatgatgcgcgaggccctggtgggcgacgacatcatctcggtggccggcatcctcaacggcacctgcaacttcatcctgtcggagatggagaagaccggtcgctcgttcgccgacgtgctgcgcgaggctcaaggcctaggctatgccgaggccgatccgaccatggatgtcggcggcttcgacgccggtcacaaggtcagcatcctggccgcgctggcgttcggttgcgcgcccaacttcgccgccgccgagatagagggcatcagcgaggttgatctgctcgacatcaagctggccaaggacctgggctaccggatcaagctgatcgccggcgcggccaagtccgaggatggcgtagcggtgaaggtgcatccgtcgctggtgccgctggatcatccgctggcccaggccggtggggcgctcaacgccctgttcatcgagggcaagcgcatcggccggatcttcctgcaagggccgggcgcgggcgcgggtcctacggctgcggcggtcgcggccgacatcgccgacgtgatgaccaaggctgtgcgcccggtgttccaggcgccggccggcgacctgaagcccttcgtctcgatcgatccgtccaaggcggtgggcaaggcctatctgcgcgtgatggtgcaggaccagcccggggtgatcgcggcgatctcggaaaccctggccgaatgcggcgtgtcgatcgacagcttcctgcaaaagcctgtcgaaggggcgggtggggtgccgatcgtgctcgttacccatgcgacgccagaatcaaacctcctggacgcgattagccgcatcgaaaagctgcagaccgtgctagagcgtccgcgccttctgcgcgtcgcgcgcatctaa

SEQ ID NO: 6289 - protein, 429 aa, Caulobacter crescentus CB15
MTNKTWRVGVAGLGTVGGGLLQFLAERPGFAPAGDLAVVTAVSARSKSRPRTVDISNLVWFDDPVALAASPEIDIFVELVGGSDGPAKAAVETALKAGKPVVTANKALIAEHGAELAALAEATNTPLLFEAAVMGGVPAVKMMREALVGDDIISVAGILNGTCNFILSEMEKTGRSFADVLREAQGLGYAEADPTMDVGGFDAGHKVSILAALAFGCAPNFAAAEIEGISEVDLLDIKLAKDLGYRIKLIAGAAKSEDGVAVKVHPSLVPLDHPLAQAGGALNALFIEGKRIGRIFLQGPGAGAGPTAAAVAADIADVMTKAVRPVFQAPAGDLKPFVSIDPSKAVGKAYLRVMVQDQPGVIAAISETLAECGVSIDSFLQKPVEGAGGVPIVLVTHATPESNLLDAISRIEKLQTVLERPRLLRVARI

SEQ ID NO: 6290 - DNA, 1287 bp, Listeria monocytogenes EGD-e
  CDS (1)..(1287): transl_table=11
gtggaagcaaagttacaagtaggtgtgttaggatttggaacggtaggtagcggtgttattcatattttagaagagcatcaagaaaaaattagtcaagtaactggatacaatatttctgttaagaaagtgctagttcgtgacttagaaaaaaatcgccgttatgaaacaaaaggttttgaactaaccaccaatccgtctgatgtactggatgatccagagattgctgttgttgttgaggttatgggcagcatcacaactgcgcgggaatacattttgcaggccttgaaagctggaaaacatgtagtaactgcgaataaggatttgattgcgctacacggcgacgaattagtggcagttgcacaagctaataattgtgatttgttttatgaagcgagcgttgcaggtggaattccgattttacgtactatcgtaaacagcctagcggcggataaaattcaaaaagtaatgggtatcgtcaacgggacaaccaatttcatgctaacaaaaatgacgacagagaaaaagtcatacgaagatgttttagcagaagcccaagcactaggctttgccgagtctgacccaacgaatgacgtggacggaatcgatgcagctagaaaaatggttattatgacaagactcgcatttggaatgaatgtgaatttagataatgtagaaacaaacggtattcgtgggatttctcctgaagatatcgaagtagcgtaccaattaggctataaaattaaactagtaggtactgccgaagaaacgaatggcacagttaacgtcaatgtcggaccagtgttattaccaaaagcacatccacttgccggcgttaactatgaaaataatgccgtatttgtaacaggtgcagctgtcggagaaacaatgttttatggtcccggagccggcgaattaccaacagcgacaagtgttgttagtgatttgattactgttgcgaaaaatagccgtctaggtacaaacggtaatgctttcaacagctacaaacacgaaacaaaacatacaccaaaggaacaagttttctctaaatactatcttcgtctaacaatggacgataaaacaggaaccttccttaagttgacgcaaatttttgcagaagccggcgttggttttgataaaattttacaacaaccgtatgatgatttcacggcgaccgttgttatcgtgacacactcaacaagtcaagcgcaattagaacaagcaatcgctagggtcaaagatgagccagaaatgcaaatgctcgcaaaatattccgttgtggagggttaa

SEQ ID NO: 6291 - protein, 428 aa, Listeria monocytogenes EGD-e
MEAKLQVGVLGFGTVGSGVIHILEEHQEKISQVTGYNISVKKVLVRDLEKNRRYETKGFELTTNPSDVLDDPEIAVVVEVMGSITTAREYILQALKAGKHVVTANKDLIALHGDELVAVAQANNCDLFYEASVAGGIPILRTIVNSLAADKIQKVMGIVNGTTNFMLTKMTTEKKSYEDVLAEAQALGFAESDPTNDVDGIDAARKMVIMTRLAFGMNVNLDNVETNGIRGISPEDIEVAYQLGYKIKLVGTAEETNGTVNVNVGPVLLPKAHPLAGVNYENNAVFVTGAAVGETMFYGPGAGELPTATSVVSDLITVAKNSRLGTNGNAFNSYKHETKHTPKEQVFSKYYLRLTMDDKTGTFLKLTQIFAEAGVGFDKILQQPYDDFTATVVIVTHSTSQAQLEQAIARVKDEPEMQMLAKYSVVEG

SEQ ID NO: 6292 - DNA, 1290 bp, Nostoc sp. PCC 7120
  CDS (1)..(1290): transl_table=11
gtgggtgtaaagctgggaatcttaggattaggtacggtaggaacgggaacggtgcaactgctacaagatacagttggtcgtcaccctttgctgcaagaaatagaaatatatcgggtgggagtacgatcgcttgataaatcccgcgatgtacaattacagccggaagttataactacagatttagagtcaattgtcaatgacccagcagtagatattgttgttgaggtcatggggggattagaaccggcgcgatcgctcattctccaagccatacataatggtaagcacgtagtcacagctaataaagcggcgatcgctcgtttcggggcagaaatttttacggctgctaatcaagccggagtttatgtgatgctggaagccgccgttggtggtggtattcctgtaattcaaccattgaagcaggctttaagtgtcaacagactgcatactgttacaggcattgttaatggtactactaactacatcctcacccggatgcaaacagagggtagcgaatttgctgatgtcttagctgatgcccagcgcttgggttacgcagaagccgaccctacggcggatgtagagggtttagatgcggcagataaaattgctattctcgcgtcattggcttttgatgggcgaattaacttgcaggatgtctactgtgaggggattcgtcaagtcagtaaaacagatatcgcctatgccgaaaaattgggatttgtgattaaattactagcgatcgctaaaaatcaggctcaagatgccactaaactatcggtcagagttcaccccaccttcgtacccaaaacacatcccctagctagtattaacggcgtgtataacgccattcttgtagaaggagaacccataggtcaggtgatgttttttggccctggtgcaggtgcaggagcaaccgccagcgccgtcacctcggatatattgagtttggtagcagccctgaagagtaatacgacagcccccaatcccctattaacctgtagacacgaagaatatagccaagttgctcccattagcgaccttttaaccagattttacgcccgattcctcaccaaagaccaagctggcgtcattggtcaattaggtacttgctttggaaatcatggggtgagtatagaatcaattgtccaaactggctttcaaggggaactagtagagattgtagttgtgacgcacgatgtcagagaaggtgaatttcgccaagccctagcagaaattcaaaatttaccggcgattgatagcattcctagcatattgcgggtgttgtag

SEQ ID NO: 6293 - protein, 429 aa, Nostoc sp. PCC 7120
MGVKLGILGLGTVGTGTVQLLQDTVGRHPLLQEIEIYRVGVRSLDKSRDVQLQPEVITTDLESIVNDPAVDIVVEVMGGLEPARSLILQAIHNGKHVVTANKAAIARFGAEIFTAANQAGVYVMLEAAVGGGIPVIQPLKQALSVNRLHTVTGIVNGTTNYILTRMQTEGSEFADVLADAQRLGYAEADPTADVEGLDAADKIAILASLAFDGRINLQDVYCEGIRQVSKTDIAYAEKLGFVIKLLAIAKNQAQDATKLSVRVHPTFVPKTHPLASINGVYNAILVEGEPIGQVMFFGPGAGAGATASAVTSDILSLVAALKSNTTAPNPLLTCRHEEYSQVAPISDLLTRFYARFLTKDQAGVIGQLGTCFGNHGVSIESIVQTGFQGELVEIVVVTHDVREGEFRQALAEIQNLPAIDSIPSILRVL

SEQ ID NO: 6294 - DNA, 1320 bp, Ralstonia solanacearum GMI1000
  CDS (1)..(1320): transl_table=11
atgaaacccatcaagatcggcctgctcgggctcggtaccgtcggtggcggtacgctcaaggttctgcaacggaaccaggaagaaatccggcgccgcgccgggcgcggcatcgaggtcgccctgattgcggtgcgcaacgtcgagcgcgcccgcgccatcgtgcaggaaaccggcgcgagcgtgccggtggtggacgacccggttgcggtggtggattcgcccgagatcgacatcgtggtggagctgatcggcggctatgacctgacgcgcgaactggtgctgcgcgccatcgccaacggcaagcacgtggtcacggccaacaaggcgctgctggcggtgcacggcaacgagatcttcaaggccgcccaggacaagggcgtgatggtggcgttcgaggccgcggtggccggcggcatccccatcatcaaggcgctgcgcgaggggctgacgggtaaccgcatcgagtggatcgccggcatcatcaacggcaccaccaacttcatcctgtcggagatgcgcgacaagggcctggacttcggcacggtgctcgcggaggcccagcgcctgggctatgccgaggccgatccgaccttcgacatcgagggcttcgatgcagcccacaagctcacgctgatgagcgccatcgccttcggcgtgccggtgcagttcgagcgcgcctatgtggagggcatcaccaagctggaggcggtcgatatccgctacgcggaggagctcggctaccgcatcaagctgctcggcctgacgcgccgcgccgaggcgggcatcgagctgcgcgtgcacccgacgctggtgccggccacgcgcctgatcgccaacgtggaaggcgcgatgaacgccgtggtggtgcagggcgatgccgtcggcccgacgctgtactacggcaagggtgccggcgccgagccgaccgcttcggccgtggtggccgatctggtggacgtgacgcgcctgcacaccgccgatccggagcaccgcgtgccgcacttggcgttccagccggatgcgctgtccaacacgccgctgctgccgatcgaagaagtgcgctcggcctactacctgcgcatgcgcgtggccgacgagaccggtgtgctggccgacatcacccgcatcctggccgagtccggcatctcgatcgacgcgatgctgcagaaggaatcgcgcgagggcgagccgcagaccgacatcatcatgctgtcgcacgtggtggtggagaagcaggtcaatgccgccatcgccgccatcgaggcgctgccgaccgtgctgtccaaggtcacgcgtctgcgcatggaagaattgaactga

SEQ ID NO: 6295 - protein, 439 aa, Ralstonia solanacearum GMI1000
MKPIKIGLLGLGTVGGGTLKVLQRNQEEIRRRAGRGIEVALIAVRNVERARAIVQETGASVPVVDDPVAVVDSPEIDIVVELIGGYDLTRELVLRAIANGKHVVTANKALLAVHGNEIFKAAQDKGVMVAFEAAVAGGIPIIKALREGLTGNRIEWIAGIINGTTNFILSEMRDKGLDFGTVLAEAQRLGYAEADPTFDIEGFDAAHKLTLMSAIAFGVPVQFERAYVEGITKLEAVDIRYAEELGYRIKLLGLTRRAEAGIELRVHPTLVPATRLIANVEGAMNAVVVQGDAVGPTLYYGKGAGAEPTASAVVADLVDVTRLHTADPEHRVPHLAFQPDALSNTPLLPIEEVRSAYYLRMRVADETGVLADITRILAESGISIDAMLQKESREGEPQTDIIMLSHVVVEKQVNAAIAAIEALPTVLSKVTRLRMEELN

SEQ ID NO: 6296 - DNA, 1320 bp, Brucella melitensis 16M
  CDS (1)..(1320): transl_table=11
atgagtgatgcattgcggatcggtgttgccggcctgggcaccgttggtgcttcggtgttacgtattctgcgtgacaagtccgagatgctcacgcgccagtgcggcaagcctgtaacggttacggcggttagcgcccgtgaccgcaatcgggatcgcggcatcgacctttcaggcattgcatggttcgatgacccggtggaacttgccaaatctgccgagatcgatctttttatcgagctgatcggcggcgaggatggcccggccaaggcgtctgtggaagcggccttgcgcgctggccgccatgtggtcacggccaacaaggcgctgcttgcgcgccatggcgttgcacttgccaggatcgccgaggagaagggcgtcctgctcaattttgaagcggctgtcgcaggcggcattcccgtcatcaaggccatgcgtgaatcgctgaccggaaacacggtttcgcgcgtttacggcatcatgaacggcacctgtaactatatcctgacccggatgtgggaagaggggatttcgtttgaatcctgcctcaaggatgcgcagcgcctgggatatgccgaggccgacccgaccttcgatattgaaggcaacgacacagcgcacaagctggcgcttctcaccagtcttgccttcggcacgcagatcgccgccgacgatatctatctggaaggtatcagcaatatttcgctggctgacattcgtgccgctgacgaacttggctaccgcatcaagcttcttggtgttgcacagaagaccgataccggcatcgaacagcgcgtacatccgaccatggtgccaacctcttcggttattgcgcaggttcatggtgtgaccaatgctgtcgccatcgagaccgatcttttgggtgagcttctgctttcaggtcccggtgcgggtggcaatgccacggcttcggcggtgatcggcgatgtggccgatatcgccaagagccgtccgggtttccagcatgggccggtattcggcacgcctgccaaggccttgcagccctataatcgcgccaagatgcgcaaacatgcgggcggctatttcattcgcctcacggtacatgaccgcattggcgcttttgcggcgattgcccggcgcatggcggaaaacgacatttcgctggaatcgatcgtgcagcgcccgcccatggatgacgcgccgcgcgaaggtgtcaagacggtgattctggtgacacatgagacaaccgaatctgcggtcaagaaggctctggaagccattctgaaagacgatcatctggtggacaagccgcagatgatccgcattgaacgcgctggctga

SEQ ID NO: 6297 - protein, 439 aa, Brucella melitensis 16M
MSDALRIGVAGLGTVGASVLRILRDKSEMLTRQCGKPVTVTAVSARDRNRDRGIDLSGIAWFDDPVELAKSAEIDLFIELIGGEDGPAKASVEAALRAGRHVVTANKALLARHGVALARIAEEKGVLLNFEAAVAGGIPVIKAMRESLTGNTVSRVYGIMNGTCNYILTRMWEEGISFESCLKDAQRLGYAEADPTFDIEGNDTAHKLALLTSLAFGTQIAADDIYLEGISNISLADIRAADELGYRIKLLGVAQKTDTGIEQRVHPTMVPTSSVIAQVHGVTNAVAIETDLLGELLLSGPGAGGNATASAVIGDVADIAKSRPGFQHGPVFGTPAKALQPYNRAKMRKHAGGYFIRLTVHDRIGAFAAIARRMAENDISLESIVQRPPMDDAPREGVKTVILVTHETTESAVKKALEAILKDDHLVDKPQMIRIERAG

SEQ ID NO: 6298 - DNA, 1257 bp, Thermoanaerobacter tengcongensis MB4
  CDS (1)..(1257): transl_table=11
atgaaaattggactgatgggactaggtactgtaggaacaggtgtagttcacttgatagatcagaatggaagaaatattgaaaaaaagataggcgaaaaaattgagataaagaaaatacttgtaaaagaccccaataaaaaaagaactcctcttgcagaagggaagataacttttaatgcagaagatattttggaagacgaggaaatagacgttgtggtagaagtgatggggaaagagcatcccgctttagaatatataacaaaagcattacaaaaaggcaaacatgtggtaactgccaataaagaagttatagcaaagcacggaaaagaacttataaagcttgcgacagaaaagaaggtacatcttctttatgaagcctcagtagggggcggtatccccatcataaggcctttgaagcagtgccttgctgcgaacaaaatatacgagataaaaggaattttaaacggtacgactaattatatccttacagaaatgaaggagaaaggccttgacttcgatgatgttttaaaagatgcgcagcaaaaagggtatgcagaggcagatcccacagacgatatagaaggctttgatgcagcaaggaagcttgccattttgtgcatgctggcttttaacaaatttgttcttccagagaaaatctacacaaaagggataagttttatttctaaatcagatatacagtatgcagaagagatgggttataccataaagcttctggcctatgccagaattgacgagaaagaacgcttagaagcctgggttcatcccgtcatgataagaaagaccaaccctttaaacggagtcaatggcgtttttaatgcaatacttgtggatggaaatgcggtaggagaagttatgttttacgggcagggcgccggcatgatgcctactgccagcgcagtggttgccgacataatggatgtgaaaaatcacatagtaatacaaaatggctgtgaagaggtagacttaatacctattgaagatactttttccaaatactatataaggcttatcgcttttgacaggcctggtgtcatgagcaaaatcacaggagttttgggaaataaaggaataagccttctttcagtagttcaaaaagggtctttgggagagacagcggaaattgtattggtgactcacattgcaaatacaggtaaggttttggaagctttaaaggagatagaggagctaaaggaagtagaaaaaatagaaagtgtgataaaagtgagggaagattaa

SEQ ID NO: 6299 - protein, 418 aa, Thermoanaerobacter tengcongensis MB4
MKIGLMGLGTVGTGVVHLIDQNGRNIEKKIGEKIEIKKILVKDPNKKRTPLAEGKITFNAEDILEDEEIDVVVEVMGKEHPALEYITKALQKGKHVVTANKEVIAKHGKELIKLATEKKVHLLYEASVGGGIPIIRPLKQCLAANKIYEIKGILNGTTNYILTEMKEKGLDFDDVLKDAQQKGYAEADPTDDIEGFDAARKLAILCMLAFNKFVLPEKIYTKGISFISKSDIQYAEEMGYTIKLLAYARIDEKERLEAWVHPVMIRKTNPLNGVNGVFNAILVDGNAVGEVMFYGQGAGMMPTASAVVADIMDVKNHIVIQNGCEEVDLIPIEDTFSKYYIRLIAFDRPGVMSKITGVLGNKGISLLSVVQKGSLGETAEIVLVTHIANTGKVLEALKEIEELKEVEKIESVIKVRED

SEQ ID NO: 6300 - DNA, 1290 bp, Streptomyces coelicolor A3(2)
  CDS (1)..(1290): transl_table=11
atgcgtacgcgtccgctgaaggtggcgctgctgggctgtggagtggtcggctcaaaggtggcgcgcatcatgacgacgcacgccgccgacctcgccgcccggatcggggccccggtggagctcgcgggcgtcgccgtacggcggcccgacaaggtgcgggaggggatcgacccggccctcgtcaccaccgacgccaccgcgctcgtcaagcgcggggacatcgacgtcgtcgtcgaggtcatcggggggatcgagcccgcgcggacgctcatcaccaccgccttcgcgcacggcgcctccgtggtctccgccaacaaggcgctcatcgcccaggacggcgccgccctgcacgccgccgccgacgagcacggcaaggacctgtactacgaggccgccgtcgccggtgccatcccgctgatccggccgctgcgcgagtccctcgccggcgacaaggtcaaccgggtgctcggcatcgtcaacgggaccaccaacttcatcctcgacgccatggactcgaccggggccggctatcaggaagcgctcgacgaggccacggccctcgggtacgccgaggccgacccgaccgccgacgtcgagggcttcgacgccgcagccaaggccgccatcctcgccgggatcgccttccacacgcgcgtacgcctcgacgacgtctaccgcgagggcatgaccgaggtcaccgccgccgacttcgcctccgccaaggagatgggctgcaccatcaagctgctcgccatctgcgagcgggcggcggacggagggtcggtcaccgcacgcgtgcatcccgcgatgatcccgctcagccatccgctggccaacgtgcgcgaggcgtacaacgccgtgttcgtggagtccgacgccgccggtcagctcatgttctacgggcccggcgccggcggttcgccgaccgcgtccgccgtgctcggcgacctggtggccgtgtgccgcaaccggctgggcggagcgaccggacccggtgagtccgcgtacgccgccctgcccgtctccccgatgggcgacgtcgtcacgcgctaccacatcagcctcgacgtggccgacaaaccgggcgtgctcgcccaggtcgcgaccgtgttcgcggagcacggtgtctccatcgacaccgtgcggcagtccggcaaggacggcgaggcatccctcgtcgtcgtcacccatcgcgcgtccgacgccgccctcggcggtacggtcgaggcgctgcgcaagctcgacaccgtgcggggtgtcgccagcatcatgcgggttgaaggagagtaa

SEQ ID NO: 6301 - protein, 429 aa, Streptomyces coelicolor A3(2)
MRTRPLKVALLGCGVVGSKVARIMTTHAADLAARIGAPVELAGVAVRRPDKVREGIDPALVTTDATALVKRGDIDVVVEVIGGIEPARTLITTAFAHGASVVSANKALIAQDGAALHAAADEHGKDLYYEAAVAGAIPLIRPLRESLAGDKVNRVLGIVNGTTNFILDAMDSTGAGYQEALDEATALGYAEADPTADVEGFDAAAKAAILAGIAFHTRVRLDDVYREGMTEVTAADFASAKEMGCTIKLLAICERAADGGSVTARVHPAMIPLSHPLANVREAYNAVFVESDAAGQLMFYGPGAGGSPTASAVLGDLVAVCRNRLGGATGPGESAYAALPVSPMGDVVTRYHISLDVADKPGVLAQVATVFAEHGVSIDTVRQSGKDGEASLVVVTHRASDAALGGTVEALRKLDTVRGVASIMRVEGE

SEQ ID NO: 6302 - DNA, 1287 bp, Thermosynechococcus elongatus BP-1
  CDS (1)..(1287): transl_table=11
atgtatcacattggtttactagggttgggcactgtcggtggcggtgtggcgcaaattttggcggatccagtggggcgccatccgctgctcaaggaactggcgatcgctcaagtgggcgtacgggatccccataagccccgcgccgttgcccttgatcggcagcttttgacaacggatttggaaagcattgtcactaacccagccattgacattgtggtggaggtcctcggcggtattgaaccggcgcgatcgctcatcctcaaagccattgcctatggcaagcacattgttaccgccaacaaggccgttattgcccgtcatggtgccgaaatttttgatgctgccaatgcccaaggggtctatgtcatgctcgaagctgccgtagccggtggcattcccgtgattcaagccctgagacagagcctaggggccaatcgtatccacagtatcagcggcattctcaacggtactaccaactatattttgacccgcatgcagcaggagcagggggattttgctcccatccttgccgatgcccagcgcctaggctatgctgaagctgatcccagtgccgacattgaaggttgggatgcagcggataaaattgccattttggccagccttgcctttggaggacggattcgccgcgaggaagtgtatgcggagggcattggtgggatcacagcggtggatattgcctacgccgaaaaactggggtttcgcattaaactgctggcgatcgcccgccaactcagcggtcagcccctggaggtgcgcgttcatcccaccctcgtgcccctcgatcatcccctggcgggtgtcaatggcgtctataatgccattctcctagaggcagaacctttaggacaagtgatgttctatggtccgggtgccggtgccggtgccaccgctagtgccgtcgtggccgatttaattaatattgcggccctgctaccccaaggacgggcgacgcatcctttgctcacctgccagcatgaggagtttgtccccctgttgcctatggcagaggtggatagtcgcttctatgcccgtgtccatgcccaggatcatccgggggtactggggaaactgggcacgtgctttggcaaccacaatgtcagcttggaatcccttgtccaaattggcagccacaatgagctggcagaaattgtgatcgtcacccaccacgtgcgcgagggcgagtttcgccaagcgatggctgagattgcccagatggcagatattgaagctgtgccctcgattttgcgagttttgggcacttcctaa

SEQ ID NO: 6303 - protein, 428 aa, Thermosynechococcus elongatus BP-1
MYHIGLLGLGTVGGGVAQILADPVGRHPLLKELAIAQVGVRDPHKPRAVALDRQLLTTDLESIVTNPAIDIVVEVLGGIEPARSLILKAIAYGKHIVTANKAVIARHGAEIFDAANAQGVYVMLEAAVAGGIPVIQALRQSLGANRIHSISGILNGTTNYILTRMQQEQGDFAPILADAQRLGYAEADPSADIEGWDAADKIAILASLAFGGRIRREEVYAEGIGGITAVDIAYAEKLGFRIKLLAIARQLSGQPLEVRVHPTLVPLDHPLAGVNGVYNAILLEAEPLGQVMFYGPGAGAGATASAVVADLINIAALLPQGRATHPLLTCQHEEFVPLLPMAEVDSRFYARVHAQDHPGVLGKLGTCFGNHNVSLESLVQIGSHNELAEIVIVTHHVREGEFRQAMAEIAQMADIEAVPSILRVLGTS

SEQ ID NO: 6304 - DNA, 1299 bp, Oceanobacillus iheyensis HTE831
  CDS (1)..(1299): transl_table=11
atgaaagagaaagtgtctgttggtttattaggtttaggagttgttgggtctggtgttattcaattaattaatgaccaccgtgaaaaattaactcatcaacttggttgtgaagtagaagtatcgaaagtgttagtaaaaaatttagataaaacaagaaatatacatattaatggtgatttgctcacgacaaatccaagtgatgtattagatcatccatcaattgacattatagtagaagtaatgggtggcattgatcaagcaaaagaatatattttacgtgcttttaataataaaaaacatgtcgtatccgccaataaagacttagtcgctctgcatggacctgagcttcaagaagctgctaccaaaaatcgttgcgacttctattatgaggcaagcgttgctggaggcattccaattctaagaggtatttcggaaggattgtctacggaccatattcaacgtgttatggggattgtgaatggtactacaaactatatcctaactaaaatggatgaagaaggaatgagttacgaagacgctctattagaagcgcaacggttaggatttgcagaagcagaccctacttcagatgttgacggattagacgctgctcgaaaaatggccatccttggtcgacttgctttctcgactcctgttgaattaagcgatgtagaagtaaacggtattcgagggattgaattagaagatttacgttacggaaaacaactcggttatacaatgaaacttattggttttgcgaactttaacgatcaagagctggaagtaaatgtacaacctacactcttatcaaaaaaccacccattatctagtgtgaagaacgaatataatgcagtttatgtatatggcgaggctgtaggtgaaaccatgttttatggacctggggccggtagtttgcctactgctacagcaatactatctgatgtcagtgcagcgataaaaggattacgtcttggtgtatccggcagtcaatcaaatgaaatgcagttcactaaaacgttaaccccaattaataagcgacatagccagtattatattaggctctgtgtaaaggatgaatctggagttctttctaaaatatcatcattattccatgaacaagatataagcttccaacgtatcgtacaaacacctgttaatgattatgaagcagctgaaattgttgttgtaactcatgatacatctttgtctaatttccaacatacgttagagaagttgaaaagttttgaagcagttatggaaatcaaaagctattataaagtggaaggagaagtgatgtaa

SEQ ID NO: 6305 - protein, 432 aa, Oceanobacillus iheyensis HTE831
MKEKVSVGLLGLGVVGSGVIQLINDHREKLTHQLGCEVEVSKVLVKNLDKTRNIHINGDLLTTNPSDVLDHPSIDIIVEVMGGIDQAKEYILRAFNNKKHVVSANKDLVALHGPELQEAATKNRCDFYYEASVAGGIPILRGISEGLSTDHIQRVMGIVNGTTNYILTKMDEEGMSYEDALLEAQRLGFAEADPTSDVDGLDAARKMAILGRLAFSTPVELSDVEVNGIRGIELEDLRYGKQLGYTMKLIGFANFNDQELEVNVQPTLLSKNHPLSSVKNEYNAVYVYGEAVGETMFYGPGAGSLPTATAILSDVSAAIKGLRLGVSGSQSNEMQFTKTLTPINKRHSQYYIRLCVKDESGVLSKISSLFHEQDISFQRIVQTPVNDYEAAEIVVVTHDTSLSNFQHTLEKLKSFEAVMEIKSYYKVEGEVM

SEQ ID NO: 6306 - DNA, 1290 bp, Leptospira interrogans serovar Lai str. 56601
  CDS (1)..(1290): transl_table=11
atggaacgcattcgtattggattgatcggtgccggaactgtcggctcaggagtcatcgaaattttaaaaaaagaaagtaacaagtatcttgaaaaattcggaatagagctgatcctttcctccgtttgtactcgaactccagaaaaaatcaaaaaagaacttcaaagtttccctaactgcaaattagaatccgattatcaaaaattagtcacagatcccgaaattgacatgatcttagaactcgtaggtggaacggatatagcttattcaatcgtaaaagatgcgttaaagttcggtaaaactgtaattactgcaaacaaagccttactttcacaaaaaggagacgagttgttttcttttgctcaagaaaagggtttggaaatcggaatggaagcttcagttgcaggtgccattccagtaattcgttccatcaagtccagtttgggttccgattcttttctttctttatacggtattctcaatggaactacaaattttattctttccaaaatggaattggaaaatctggattattcagaggctcttcgtatcgctcaagatttgggttttgcggaaaaagatcctaccttcgacgtggaaggtattgatacggctcacaaaatcagcatattaggaagtttagctttctccgaaaaaattcctttacagagtgtacaaatcgaaggtataacaaagattagcggattggatattcgatttgcgagcgaacttggttatagaattaaacttcttggtttggtacggaagttatctcataaaatcgaggcccgagttcaacccgtgatgattcccattaaacatccgttcgcaaatattatgaacgagatgaatgcagtctattatcaaaccgcttatgcgggaacgggtatgtttgtaggtaagggagccggatctttaccaacggcttcttcagttgtctccgatattctttattatggagcgagaagaaacaaaggtatttttcaggaaaaaaatatttttccgcaagctatgatttcggaagccaatgtttctttggtacgctactacctcagatttactaccgtggatttacctggagttctttctgaaatttctaaagtactaggggaccacggagtttcgatctcttcggtaaggcaaaatgagacagaaaaagagccggttgaagttgtagtaattacacatccagcaacggaagaaagtattaaaaattcattgaagatcatagacgggttgtctctaatccgacatacttcggttgcaattcgtttagaggataaactctga

SEQ ID NO: 6307 - protein, 429 aa, Leptospira interrogans serovar Lai str. 56601
MERIRIGLIGAGTVGSGVIEILKKESNKYLEKFGIELILSSVCTRTPEKIKKELQSFPNCKLESDYQKLVTDPEIDMILELVGGTDIAYSIVKDALKFGKTVITANKALLSQKGDELFSFAQEKGLEIGMEASVAGAIPVIRSIKSSLGSDSFLSLYGILNGTTNFILSKMELENLDYSEALRIAQDLGFAEKDPTFDVEGIDTAHKISILGSLAFSEKIPLQSVQIEGITKISGLDIRFASELGYRIKLLGLVRKLSHKIEARVQPVMIPIKHPFANIMNEMNAVYYQTAYAGTGMFVGKGAGSLPTASSVVSDILYYGARRNKGIFQEKNIFPQAMISEANVSLVRYYLRFTTVDLPGVLSEISKVLGDHGVSISSVRQNETEKEPVEVVVITHPATEESIKNSLKIIDGLSLIRHTSVAIRLEDKL

SEQ ID NO: 6308 - DNA, 1338 bp, Corynebacterium efficiens YS-314
  CDS (1)..(1338): transl_table=11
atgacctcagcacctgcccccagcttcaaccccggtaagggaatcggctcaccagtcggtatcgcccttcttggttacggcaccgtcggctcggaggttatgcgtctgatgaccgaatacgccgatgagctcgagcaccgtatcggtggtccccttcagatccgtggtgtcgcggtgtcagataagagcaagccgcgcccgggtgtgccggacgagctgctcaccgatgatgccttctcgctggtcaagcgcgatgatgtggatatcgtcgtcgaggttatcggtggcatcgactacccacgcaaggtggtgctcgcggcgctgaaggccggcaagtccgtggtcaccgcgaacaaggccctcgtcgcggcccacgccgccgagcttgccgacgccgccgatgaggccaacgtcgatctctacttcgaggccgccgtcgcagccgccatccccgtggtcggcccgctgcgccgttcgctggccggtgaccagatccagtccgtcatgggcatcgtcaacggcaccaccaacttcatcctcgacgccatggactccagcggtgccggttatgacgaatccctcgccgaggccacccgcctcggatacgcggaggcggatcccaccgccgacgtcgagggtcatgatgccgcctccaaggccgccatcctcgcctccctggccttccacacccgggtcacctccgatgatgtctactgcgagggcatcaccaacatcagcgcggaggacatccgcgccgccaagcaggccgatcacaccatcaagctgctggccatctgcgagaagatcaccgacagcaacggcgagaccgccatctccgtcggagtgcatcccaccctgatcccacgcagccatccgctcgccgcggtcaacaagtccttcaacgccatcttcgtcgaggcggaggccgccgggcgcctgatgttctacggcaacggtgccggtggcgcacccaccgcgtcggctgtgcttggcgacgtcgtcggtgccgcccgcaacaaggtccacggtgggcgtgcgccgggcgagtccacctacgccaacctgccgatagccgattacggtgagacccccacccgctaccacgtggacatggaggtcgaggaccgcgtcggcgtgctcgccgatctggcacagctcttcgccgaccgtggtatctccctgcgcaccatccgccaggaggagagcggtgagggtgcccgtctgatcgtggtgacccaccaggcccgtgagaactccctggctgctaccgttgaagcactcaaggaccacccggcggtgaagtccatcaacagcgttatccgtctcgaaaggggctag

SEQ ID NO: 6309 - protein, 445 aa, Corynebacterium efficiens YS-314
MTSAPAPSFNPGKGIGSPVGIALLGYGTVGSEVMRLMTEYADELEHRIGGPLQIRGVAVSDKSKPRPGVPDELLTDDAFSLVKRDDVDIVVEVIGGIDYPRKVVLAALKAGKSVVTANKALVAAHAAELADAADEANVDLYFEAAVAAAIPVVGPLRRSLAGDQIQSVMGIVNGTTNFILDAMDSSGAGYDESLAEATRLGYAEADPTADVEGHDAASKAAILASLAFHTRVTSDDVYCEGITNISAEDIRAAKQADHTIKLLAICEKITDSNGETAISVGVHPTLIPRSHPLAAVNKSFNAIFVEAEAAGRLMFYGNGAGGAPTASAVLGDVVGAARNKVHGGRAPGESTYANLPIADYGETPTRYHVDMEVEDRVGVLADLAQLFADRGISLRTIRQEESGEGARLIVVTHQARENSLAATVEALKDHPAVKSINSVIRLERG

SEQ ID NO: 6310 - DNA, 1305 bp, Pseudomonas putida KT2440
  CDS (1)..(1305): transl_table=11
gtgaaaccggtcaaagtaggcatctgtgggttggggaccgtcggtggcggaaccttcaatgtacttcagcgcaacgccgaggagattgcccgccgtgccgggcgcggtattgaagtggcacagatcgccatgcgctcgcagaacccgaactgccagattaccggtacccccattaccgctgacgtgttcgaagttgcaagcaacccggagatcgacattgtcatcgagctgatcggtggctataccatcgcccgcgacctggtgctgaaggccatcgaaaacggcaagcacgtggtcaccgccaacaaggcgctgattgccgtgcatggcaacgaaatcttcgccaaagcccgcgagaaaggcgtgattgttgcgttcgaggcggccgtagccggtggcatcccggtgatcaaggccatccgcgaaggcctgtcggccaaccgcatcaactggctggccggcatcatcaacggcaccggcaacttcatcctcaccgaaatgcgtgagaagggccgtgccttcccggacgtgctggctgaagcccaggcgctgggctacgccgaagccgacccgaccttcgacgtggaaggcatcgacgctgcgcacaagctgacgattctggcgtccatcgcgttcggtatcccgctgcagttcgacaaggcctacaccgaaggtatcacccagctgacaacggcagacgtgaactacgccgaagccttgggttaccgcatcaagcacctgggcgtggcgcgtcgcaccgccgaaggtatcgagttgcgcgtgcacccgacgctgatcccggccgaccgtctgatcgccaacgtcaacggcgtgatgaacgctgtcatggtcaacggtgatgctgccggctccaccctgtactacggtgctggcgcgggtatggagcctaccgcttcgtcagtggtcggcgacctggtcgacgtggtccgtgccatgacctccgacccggagaaccgtgtgccgcacctggcattccagccagactcgctgtcggcccacccgatcctgccgatcgaagcctgcgaaagcgcctactacctgcgcatccaggccaaggatcacccgggcgtactggcccaggtcgccagcatcctctcggagcgcggtatcaacatcgagtcgatcatgcagaaggaagccgaggagcaggacggcctggtgccaatgatcctggtgacccatggcgtggtcgagcagcgtatcaatgacgccatcgtcgctctggaagccctgcaggacgtggtcggcaaggttgtgcgcattcgcgtcgagcagctcaactaa

SEQ ID NO: 6311 - protein, 434 aa, Pseudomonas putida KT2440
MKPVKVGICGLGTVGGGTFNVLQRNAEEIARRAGRGIEVAQIAMRSQNPNCQITGTPITADVFEVASNPEIDIVIELIGGYTIARDLVLKAIENGKHVVTANKALIAVHGNEIFAKAREKGVIVAFEAAVAGGIPVIKAIREGLSANRINWLAGIINGTGNFILTEMREKGRAFPDVLAEAQALGYAEADPTFDVEGIDAAHKLTILASIAFGIPLQFDKAYTEGITQLTTADVNYAEALGYRIKHLGVARRTAEGIELRVHPTLIPADRLIANVNGVMNAVMVNGDAAGSTLYYGAGAGMEPTASSVVGDLVDVVRAMTSDPENRVPHLAFQPDSLSAHPILPIEACESAYYLRIQAKDHPGVLAQVASILSERGINIESIMQKEAEEQDGLVPMILVTHGVVEQRINDAIVALEALQDVVGKVVRIRVEQLN

SEQ ID NO: 6312 - DNA, 1293 bp, Clostridium tetani E88
  CDS (1)..(1293): transl_table=11
atgaaggttataaaaatcggactattaggattaggtaatgtaggtaaaggagtatggaatatacttcaaataaataaagacattataaagagaagatctggctataatatagaaatcaaaaaagtattagtaaaagacattaataaaaaaagagatttaaagattcctgaagatttaataactacagatgtagatgaaatcttagaagatcctagcatagatatagtggttgaggtaattggaggagtagagccatcttttgactatatggtaaaggctatgaaaagtggcaagcatgtagttactgcaaataaaatggtattagctatgaagggaagagagttatctcaaatagcaaaacaaaatggagtactattttactatgaagccagcgtaggcggtggaatacctgttattcacggtttaacagaaagtttaactgctaataaaataaatgaagtaataggaataattaatggtacaacaaattatatactaacaaaaatgaccttagatggattaagctttgaggaggctctaaaagaagcacaacaaaagggttatgcagaagcagaccctacctccgatatagaggcctttgatgcagtatataaactatgtattttgacttctctaggctttgattcttttgtagatgtagaatcagtgtatagagaaggtataacaaatatagatcctatagacattaaatatgcagaagaatttggatatgtaataaaactattagctataataaaagaagaatttggagaacttgaattaagagtacatcctactatggttccagcagtgcaccctcttgccaatgtaaatgattctttcaatgctatttttataaagggaaatgcagttggagatcttatgctttatggaagaggtgctggagaattaccaacaggtagtgcagtagttggagatataatttcagtaataagaaataaagaaagagaagaaaatcattttgttcaatgtgataaaacttcaaagaatataaaaaatatgagcggagttaaaagtgaatattatataagaatcacagtaggagataagccaggagttttaggagaaattacaactatattaggagaaaataatgtaagcttactttctgtaatacaaaaaggtaagagacaagaacacgcctctttagtgttcgtaactcatagaacaaatgaaggtgatgtacaaaaagccattgaaaagataagtggacttagcgatgttttaaaagtagataatataataagaatagaaaacttaggaataatataa

SEQ ID NO: 6313 - protein, 430 aa, Clostridium tetani E88
MKVIKIGLLGLGNVGKGVWNILQINKDIIKRRSGYNIEIKKVLVKDINKKRDLKIPEDLITTDVDEILEDPSIDIVVEVIGGVEPSFDYMVKAMKSGKHVVTANKMVLAMKGRELSQIAKQNGVLFYYEASVGGGIPVIHGLTESLTANKINEVIGIINGTTNYILTKMTLDGLSFEEALKEAQQKGYAEADPTSDIEAFDAVYKLCILTSLGFDSFVDVESVYREGITNIDPIDIKYAEEFGYVIKLLAIIKEEFGELELRVHPTMVPAVHPLANVNDSFNAIFIKGNAVGDLMLYGRGAGELPTGSAVVGDIISVIRNKEREENHFVQCDKTSKNIKNMSGVKSEYYIRITVGDKPGVLGEITTILGENNVSLLSVIQKGKRQEHASLVFVTHRTNEGDVQKAIEKISGLSDVLKVDNIIRIENLGII

SEQ ID NO: 6314 - DNA, 1287 bp, Lactobacillus plantarum WCFS1
  CDS (1)..(1287): transl_table=11
atggaaacgattaaaattggtgtggtcggactaggcacagtcgggaccggcgttgtaaaaatgcttcaagcgcatcaggaaaagatttcagaaattaccggtcgtaagttggaactagcctgcgtagttgtccacaacttgaaaaagcacgaacaagttgatttgggggacgttcagatgaccgaccaaatcgcgaccctgcttgatgatccgtccattcaaattatggtcgaagtgatgggttcaattcatccggcgaaggaatatattacgcaagccttgcaagctggcaaacacgtggtgacggccaataaggacttgattgcgcaatatggccgggagttggttcagattgctcgtgaaaatcatcgcgacttattctatgaagctagtgttgctggtgggattccaattttacggacgattgataatagtttcgccgctgaccggattcaacgggtcatgggaatcgtcaacgggaccactaattacatcatgacgcagatgctgactaagcattggtcgtatgatcaagccttgagctcagcacaagacttggggtttgccgaaagtgatcccactaatgatgtcgaaggccttgatgcggcgttcaagatgattattttaacgcagtttgcctttgggatgagtctttccctcgaccacgttcaagttcagggaattacgaaaatcagcccagaggatattgcggaagctcatcagcttgggtatacgattaaattactcgggattgcggaagaaattgacgatcgcattgcggtatcagtcgggcctgtgctcgtttctgatcaacatccacttgccacggtacaaaatgagaataatgctgtaatggtaacgggaacggctgtggggaacacgatgttttacggtcccggcgctggagaactcccgaccgccaacagtgtgctgagtgatattacaacggttgcgaaaaatattgcgttgaatacgactggtaacacgtttaactcttatcgccaggagacagtcttagcaacgcctgaagatgttgtgtatcctcactttattgccttgaagatgcgtgatgtgccggggatgatgatgaaattgacggcgattatgacccgcgcagaagtttcatttagtcgaatcattcaaaatcaattaggtgacggcaacgctcgtgttgtgatcattacccatgccatgaatgatcaacagttagcagatatcactcgtgaaatcggtgaacaagagaatatgcaactattagcgagttataaagttttaaagaatgcgtag

SEQ ID NO: 6315 - protein, 428 aa, Lactobacillus plantarum WCFS1
METIKIGVVGLGTVGTGVVKMLQAHQEKISEITGRKLELACVVVHNLKKHEQVDLGDVQMTDQIATLLDDPSIQIMVEVMGSIHPAKEYITQALQAGKHVVTANKDLIAQYGRELVQIARENHRDLFYEASVAGGIPILRTIDNSFAADRIQRVMGIVNGTTNYIMTQMLTKHWSYDQALSSAQDLGFAESDPTNDVEGLDAAFKMIILTQFAFGMSLSLDHVQVQGITKISPEDIAEAHQLGYTIKLLGIAEEIDDRIAVSVGPVLVSDQHPLATVQNENNAVMVTGTAVGNTMFYGPGAGELPTANSVLSDITTVAKNIALNTTGNTFNSYRQETVLATPEDVVYPHFIALKMRDVPGMMMKLTAIMTRAEVSFSRIIQNQLGDGNARVVIITHAMNDQQLADITREIGEQENMQLLASYKVLKNA

SEQ ID NO: 6316 - DNA, 1470 bp, Tropheryma whipplei TW08/27
  CDS (1)..(1470): transl_table=11
atgcctcttcgaaactcaaagatttcgggtttaatcaccaaacaaagtagccttggatcagtatacatattgtataaccgggttttaggggcttgtgtggattataggagtctaaaacttgcactattcggtgctggtcgggttggctcctgcgttgcacgtttcctgctgagcaatgcagatgaactaaaaatacgcaccgggggactagatatagagctcattgggatcggcgtaaaggatttgagcaaaagccgtgagttggatgcttcgtactataccgatgatttagagggattaattctccgcgcggatgtagtgattgagttgataggtggcctccatcctgcaaaggagcttataacaagggctttacaagtaggtgcagatgttgtaagtgcaaataagacccttatctctgagcatggccgtgagcttctggcattggcatccagcgttggcgcacagtttctgtatgaagccgctgtttgtgcggcaattcctgttatacgccctcttaaagattctttgagtggtgatgttatacaaaaaatttcgggcattgtaaacgggacaaccaattttattcttgacagaatggaatcaacaggggattccctcgagaatgcactaaaagttgctcaggatttgggttacgcagagtctgatcccagcgcagatatagaggggcatgatgcagccgcaaaggcaacaatacttgcctctttagcttttcatgcagatataccaagaactttggtgtaccgcgaagggatatctaacatcacccaggaaaccataagcgcagcaagggcgagtaataaattcgtgaggcttttggcaatatgtgagcggatggcaaatgacactgatattagcgtccgtgtgcatccagcgcttatcgatcgcaagcaccccctagctgccgtgcgtggcaataaaaacgcaatttttgtacaggcaaagctggctggcccactcatgttttacggctccggcgcgggaggtctagaaactgcttctgccatccttggtgatgtagtgagtatagcccgtagatacaaggctggatctatcccaacctccgagatttggatagataatagacgcaagagatctgtgaaagtgagtccgatagatcttataaaaaccagatatcagtttgttttatttgctatacagtctcccgaggcgcttgctcagattgccaggacattcgcggaatgtaaggtgcttttggatagcctggtccagtcccgggtggattgttcgaatctacacacaaaactctctgagtctgatgtaataatgcgtctggtagttgtaactgaggttgttacagactccgccatatcctctgtaattgtggagttaaaaaattgctcgcatgttgtgagtatagtaagtgttatgcggattgaacagggcggttttgaagaaactggccttgcgttaccggaaacggcgtga

SEQ ID NO: 6317 - protein, 489 aa, Tropheryma whipplei TW08/27
MPLRNSKISGLITKQSSLGSVYILYNRVLGACVDYRSLKLALFGAGRVGSCVARFLLSNADELKIRTGGLDIELIGIGVKDLSKSRELDASYYTDDLEGLILRADVVIELIGGLHPAKELITRALQVGADVVSANKTLISEHGRELLALASSVGAQFLYEAAVCAAIPVIRPLKDSLSGDVIQKISGIVNGTTNFILDRMESTGDSLENALKVAQDLGYAESDPSADIEGHDAAAKATILASLAFHADIPRTLVYREGISNITQETISAARASNKFVRLLAICERMANDTDISVRVHPALIDRKHPLAAVRGNKNAIFVQAKLAGPLMFYGSGAGGLETASAILGDVVSIARRYKAGSIPTSEIWIDNRRKRSVKVSPIDLIKTRYQFVLFAIQSPEALAQIARTFAECKVLLDSLVQSRVDCSNLHTKLSESDVIMRLVVVTEVVTDSAISSVIVELKNCSHVVSIVSVMRIEQGGFEETGLALPETA

SEQ ID NO: 6318 - DNA, 1293 bp, Enterococcus faecalis V583
  CDS (1)..(1293): transl_table=11
atgaaggataccttaaagatcgggttactaggattagggactgtaggcactggcgttttaactctcttgaaagaacatcaagagaaaatttcacaagtgacaggaatgaatgtagtcattgaaaaagcatttgtccgaaatcttgaaacgaaacaagcgcaagcggaagaatacggtctgtctttaacaacttcaattgatgatattttagaagataaagagattcaaatcgttgtggaattaatgggaaccattgaaccagccaaaacgtatatcatgaaagctttagaaaagggcaaacatattgtgactgccaataaagatttactggcgcaacatgggagtgaattagtagcgttagcccaaaaacatcattgtgatttatattacgaagcaagtgttgctggcgggattccaattttaagaacaattgctaatagcttagcggcagacaatattcaacaagttttagggattgtgaacggtacgacgaattatatgcttacgcaaatggtttctgctgataaaagttatgaagaagctttagcagaagcgcaagcgttggggtttgctgaagcggatccgacaaatgatgtcgatggaattgacgcagcctataaaatggttattttaagtcaatttgcttttgggatgaatgtttcattaccacaagttgatattcgtggaattcgcggattgtctttagatgatgtcgctatggctaaacaactggggtatgaaatcaaattgattggctctgctgaacaaaatgagaatagtatctcggtggaagtggcgcctatgctagtcaatcaaaagcaccctattgcatctgttcggaatgagtacaatgcagtatttattaaaagtgcaggcgtgggggaatcaatgtattacggtccaggagctggagctaaaccgacagcaaccagtgtggtcagtgatttaattacgattgctaaaaacattcgcttggcaacgactggccatatgttcaattcgtatcaacataaaacacaattgacgagttccgaaaatgtatttgggcagtactatttttcattagatgttccagatacaccaggacaatttttgcagttgacgcaattaatgactaaagcagaagtcagctttgatcaattagttcaacagaaatcagatggacagcgagcaagaattgttgccattacacaccagatatcaaaagcacaaatgcaacaagttgtgatagctattcaaaatacggaagcctttcagttattgaatgtaatgaaggttataggagatgagtaa

SEQ ID NO: 6319 - protein, 430 aa, Enterococcus faecalis V583
MKDTLKIGLLGLGTVGTGVLTLLKEHQEKISQVTGMNVVIEKAFVRNLETKQAQAEEYGLSLTTSIDDILEDKEIQIVVELMGTIEPAKTYIMKALEKGKHIVTANKDLLAQHGSELVALAQKHHCDLYYEASVAGGIPILRTIANSLAADNIQQVLGIVNGTTNYMLTQMVSADKSYEEALAEAQALGFAEADPTNDVDGIDAAYKMVILSQFAFGMNVSLPQVDIRGIRGLSLDDVAMAKQLGYEIKLIGSAEQNENSISVEVAPMLVNQKHPIASVRNEYNAVFIKSAGVGESMYYGPGAGAKPTATSVVSDLITIAKNIRLATTGHMFNSYQHKTQLTSSENVFGQYYFSLDVPDTPGQFLQLTQLMTKAEVSFDQLVQQKSDGQRARIVAITHQISKAQMQQVVIAIQNTEAFQLLNVMKVIGDE

SEQ ID NO: 6320 - DNA, 1290 bp, Streptomyces avermitilis MA-4680
  CDS (1)..(1290): transl_table=11
atgcgtacgcgtccgctgaaggtggcgctgctgggctgtggggttgtcggctcagaggtggcgcgcatcatgacgacgcacgccgacgatctcgccgccaggatcggggccccggtggaactcgcgggcgtggccgtccgccggccctccaaggtgcgtgagggcatcgaccccgcactggtcaccaccgacgccaccgccctcgtcaaacggggcgacatcgacgtcgtcgtcgaggtcatcggcggtatcgagcccgcccgtgccctgatcaccacggccttcgagcacggcgcgtccgtcgtctccgccaacaaggcgctcctcgcccaggacggcgccgccctgcacgccgtcgccgaggagcacggccgcgacctctactacgaggccgccgtcgccggtgccatcccgctgatccggccgctgcgcgagtccctcgccggcgacaaggtcaaccgtgtgctcggcatcgtcaacggcaccaccaacttcatcctcgacaagatggactcgacgggcgccggctaccaggaagccctcgacgaggccaccgcgctcgggtacgccgaggccgacccgaccgccgacgtcgaggggttcgacgccgccgccaaggccgccatcctcgccggaatcgccttccacacgcgcgtgcgtctcgacgacgtctaccgcgagggcatggccgaggtcaccgccgccgacttcgcctcggcgaagaacatgggctgcaccatcaagctgctcgccatctgtgagcgggccgcggacgggggttccgtcaccgcgcgcgtgcaccccgcgatgattccgctcacccacccgctcgcctccgtgcgcggcgcgtacaacgccgtcttcgtcgagtcggacgcgtccgggcagctcatgttctacgggccgggtgcgggcggctcgccgaccgcctccgccgtgctcggcgacctggtcgccgtgtgtcgcaacaagctcagcggcacgaccgggcccggcgagtccgcgtacgccgccctgcccgtgtcgcccatgggcgaggtcgtcacgcgctaccacatcagccttgacgtggccgacaaaccgggtgttctcgcccaggttgccaccgtcttcgccgagcacggggtgtcgatcgataccgtgcgtcagcagggcaaggacggcgaggcctccctcgtcgtcgtcacccaccgtgcgtccgacgcgtccctgagcgggaccgtcgaggcactgcgcagcctcgacaccgtgcggggtgtcgccagcatcatgcgggttgaaggagagtaa

SEQ ID NO: 6321 - protein, 429 aa, Streptomyces avermitilis MA-4680
MRTRPLKVALLGCGVVGSEVARIMTTHADDLAARIGAPVELAGVAVRRPSKVREGIDPALVTTDATALVKRGDIDVVVEVIGGIEPARALITTAFEHGASVVSANKALLAQDGAALHAVAEEHGRDLYYEAAVAGAIPLIRPLRESLAGDKVNRVLGIVNGTTNFILDKMDSTGAGYQEALDEATALGYAEADPTADVEGFDAAAKAAILAGIAFHTRVRLDDVYREGMAEVTAADFASAKNMGCTIKLLAICERAADGGSVTARVHPAMIPLTHPLASVRGAYNAVFVESDASGQLMFYGPGAGGSPTASAVLGDLVAVCRNKLSGTTGPGESAYAALPVSPMGEVVTRYHISLDVADKPGVLAQVATVFAEHGVSIDTVRQQGKDGEASLVVVTHRASDASLSGTVEALRSLDTVRGVASIMRVEGE

SEQ ID NO: 6322 - DNA, 1296 bp, Bacillus cereus ATCC 14579
  CDS (1)..(1296): transl_table=11
atgaaagaaattcaagttgggttattaggtcttgggacagttggcagtggtgtggttcgtattattacggatcatcaagaacgactcatacaccaagtaggctgtccagtgaaggtaacgaaagtattagtgcaaaacattgagaaagagagagaggtagaggtaccttctactctattaacacaagatgcaaatgaaattttagataatccaaatattgatgttgtcattgaagtgatgggtggcattgatgatgcaaaatcatatattttacaagctttaaaaagcggaaagcatgttgtaactgcaaataaagacttaatggcattacatggagctgaattattagcgacagcaaaagataataaggctgatttattctatgaggcgagtgtggcagggggaattccaattttacgcagtatcgtagaaggactttcttcagatcttattacgaaagtaatgggaattgtaaatggaacaacaaattttattttgacgaaaatgtcagacgaagggagagcatataacgacgtgttaaaagaagcccaacaacttggatttgcagaagcagatccaacatcagatgtagaaggtttagatgcagcaagaaaaatgacgattttagctaccctcggtttctctacaaatgtagagcttggagatgtgaaagtaaaagggattacctctattacagaggaagatattgaatacagtaagagcttaggttatacaattaaattaatcggtcttgcaaaacgagatggtgaaaaattggaggttacagttgaaccaactttacttccaaatacacatcctcttgcggcagtacaaaatgaatataacgctgtgtatgtgtacggtgaagcagttggagaaacgatgttttatggaccaggcgcaggaagtttaccgacagcgacagctgttgtttcggatttagttgctgtaatgcaaaatattagattaggggtaacaggaaatagtgctgtagtcccacaatatcaaaaagtattaaaagagccagacgaaattgtcgtgaaaaagtttttaagactgcatgtaaaagacgaaattggtgtatttgcaaaaattacttcattgttctctgagcgcggagttagctttgagaaaattattcaaatgccgcttgaagagaaaggaaaggctgaaattgtaattgtaacgcatcgtgcgtctcttgctgattatgattatattctacatacgttgcaagggtatgaagaaatagattgtttgaaagcgaactatcgaattgaaggggatgctaagtag

SEQ ID NO: 6323 - protein, 431 aa, Bacillus cereus ATCC 14579
MKEIQVGLLGLGTVGSGVVRIITDHQERLIHQVGCPVKVTKVLVQNIEKEREVEVPSTLLTQDANEILDNPNIDVVIEVMGGIDDAKSYILQALKSGKHVVTANKDLMALHGAELLATAKDNKADLFYEASVAGGIPILRSIVEGLSSDLITKVMGIVNGTTNFILTKMSDEGRAYNDVLKEAQQLGFAEADPTSDVEGLDAARKMTILATLGFSTNVELGDVKVKGITSITEEDIEYSKSLGYTIKLIGLAKRDGEKLEVTVEPTLLPNTHPLAAVQNEYNAVYVYGEAVGETMFYGPGAGSLPTATAVVSDLVAVMQNIRLGVTGNSAVVPQYQKVLKEPDEIVVKKFLRLHVKDEIGVFAKITSLFSERGVSFEKIIQMPLEEKGKAEIVIVTHRASLADYDYILHTLQGYEEIDCLKANYRIEGDAK

SEQ ID NO: 6324 - DNA, 1317 bp, Nitrosomonas europaea ATCC 19718
  CDS (1)..(1317): transl_table=11
atgaagccaatttatgtaggactgctcggtgtcggcactgttggcggcggcacttataccgttctgaaacgcaaccagcaggaaatcactcgcagaaccggtcgcaatatcgtcatccgcatgattgccgatctggatcaggaaaaagtgcgtcatctgacagcaggtgatgatgtcatcgtaacttccgatgcgcttgaggttgcccgacaccccgaaatcgatatcgtcatcgaactgatggggggacaaaccattgccaagcaggcgatccttgaagccatcgctcatggcaagcatgtcattaccgccaacaaggcactgctggcaatccatggcaatgaaatcttcgcagccgcacaacagcgcaatgtcatcgttgcgttcgaagctgccgtggcaggtggcattcccatcatcaaggccttgcgtgaaggtctggcagccaaccatatcgaatggatcgccggcatcatcaatggaaccagcaatttcattctgtctgaaatgcgttccaaaggactggatttcactaccgttctggctgaagcacagcaactgggctatgccgaagctgatccgacctatgacatcgaaggcatcgatgcagcgcataaaattaccatcatgtctgcccttgccttcggtatcccggtccggttcgatcaaacctacatcgagggaattacgaaactggccaatgacgatatccgctatgctgaagaactggggtatcgcatcaagctgctgggtattaccaggcgcaccgccaacgggatcgagctgcgtgtccatccggcactgatcccggtcaaacggctaatcgccaacgttgaaggcgtgatgaacgcgatcatcgtcaagggagatgctgtcggcccgacactgtactacggtgccggagccggagcagaacctactgccagtgcagtcattgccgacctggtcgatgtgacccgtctgctcacttccggcccggaacaccgggtaccggtgctggcattcctgccggaactgctgtccgatactcccattgtgccgatggaagcagtcgaaacggcttattatctgcgactccaggttctggataaacccggtgtgctggctgacatcacccgtatcctggcagacaaccatatctccatcaacgccatgatccagaaagaacatgcggacaaggaggacaaggtcaacatcatcatgctgctgcacaaaacacgggaaaagaacgtcaacaccgccattgaaaaaattcagaacctcccggccatgactgataaaatcatccggatccggcttgaggagctcggcagttaa

SEQ ID NO: 6325 - protein, 438 aa, Nitrosomonas europaea ATCC 19718
MKPIYVGLLGVGTVGGGTYTVLKRNQQEITRRTGRNIVIRMIADLDQEKVRHLTAGDDVIVTSDALEVARHPEIDIVIELMGGQTIAKQAILEAIAHGKHVITANKALLAIHGNEIFAAAQQRNVIVAFEAAVAGGIPIIKALREGLAANHIEWIAGIINGTSNFILSEMRSKGLDFTTVLAEAQQLGYAEADPTYDIEGIDAAHKITIMSALAFGIPVRFDQTYIEGITKLANDDIRYAEELGYRIKLLGITRRTANGIELRVHPALIPVKRLIANVEGVMNAIIVKGDAVGPTLYYGAGAGAEPTASAVIADLVDVTRLLTSGPEHRVPVLAFLPELLSDTPIVPMEAVETAYYLRLQVLDKPGVLADITRILADNHISINAMIQKEHADKEDKVNIIMLLHKTREKNVNTAIEKIQNLPAMTDKIIRIRLEELGS

SEQ ID NO: 6326 - DNA, 1347 bp, Rhodopirellula baltica SH 1
  CDS (1)..(1347): transl_table=11
atgaacgctacatccaccaagcaaaaatcatcggaccggaccaacgttgccatcatcggaatggggaccgtcggtgccggtgtggctcgtttgttgatcgatcacggcgatcgaaccgctcgtcacgcgggcaaaaccatttggttgtccaaggctgtcgtccgcgatctcagcaaacctcgcggaattgatctgcccgaaggagtcctgaccgattcgatcgatgacgtcctgaatgaccccgaaatcgacgttgtcatccaattgatgggcgggttgtcaccggctcgcgaagtcatgctgcgggcgatggaagctggcaaagacattgtcaccgcgaacaaagcattgttggccgaacacggtgccgaattgttcacccgagcccgcgaactcggacgcagcatcgcgttcgaagcggccgtggccggtggcatcccgatcattgccaacatcagccagtgtttgtcggccaatcaaattgaatcgttggagggcatcctcaacggaaccagcaatttcatcgtctcgcaaatggacgaaaagggcgccggctacgaagagaccgtcaaacgggctcaggaattggggtacgccgaagccgatcctgcgatggatgtcgatggaaccgacgcggctcaaaaattggcaatcctttcacacttggctttcggagccaccgtggattggcgagacattcctcgccaaggcatcgatgggctggatccagccgatctggtttacgctcgccagcttggatatcgaatcaaattgctcgccaccgctcgcttggtcgatggcgaactggaattgtccgttgcaccgaccttggtcgccatcggcacgcccatggccgaagtccgtgacgccttcaacgccattcgtgtggtgggcgatgcggtcggaccggttttctatcacgggttgggtgcgggccagatgccaactgcgtctgccgtcgtcgccgatgtcatcgacaccgccgtgggacgcacgccaatcacgtttgaaacgctggagtacttttcggcggagcgtcctccacggacggcccagcgagatgtcgatcggctgcgaggtcggtactacttgcgattgcgagtggccaacgacccaggaacattggcagcgatcgcgggtgtgctctcaagccattcgatttccatcgcgtcggtcatccagcacgaaccgaagtcgaaagacgaagccaacgcggcggagaacaccgtgccgttggtgatcatgactcacgaagccagcgaaggtgccgcgtcacgagcgaccaccgacatcgaagctttgcccgccatcagcggccaagtcgtccgaatgcccgttcgcgagtga

SEQ ID NO: 6327 - protein, 448 aa, Rhodopirellula baltica SH 1
MNATSTKQKSSDRTNVAIIGMGTVGAGVARLLIDHGDRTARHAGKTIWLSKAVVRDLSKPRGIDLPEGVLTDSIDDVLNDPEIDVVIQLMGGLSPAREVMLRAMEAGKDIVTANKALLAEHGAELFTRARELGRSIAFEAAVAGGIPIIANISQCLSANQIESLEGILNGTSNFIVSQMDEKGAGYEETVKRAQELGYAEADPAMDVDGTDAAQKLAILSHLAFGATVDWRDIPRQGIDGLDPADLVYARQLGYRIKLLATARLVDGELELSVAPTLVAIGTPMAEVRDAFNAIRVVGDAVGPVFYHGLGAGQMPTASAVVADVIDTAVGRTPITFETLEYFSAERPPRTAQRDVDRLRGRYYLRLRVANDPGTLAAIAGVLSSHSISIASVIQHEPKSKDEANAAENTVPLVIMTHEASEGAASRATTDIEALPAISGQVVRMPVRE

SEQ ID NO: 6328 - DNA, 1305 bp, Bordetella pertussis Tohama I
  CDS (1)..(1305): transl_table=11
atgaatccgatgaaggtgggcctgttgggcctgggcgtggtgggcggcggcacctgggcggtgctggcgcgtaatgccgaagaaatcgcacggcgcgccggacggcgcatcgaagtcagccgcatcgccgtgcgcgacgtggccaaggcgcgcagccgcgtcggggatggcgtcgagatttcgaccgacggctttgccctggtgcgcgatccggcggtcgacatcgtggtcgaattgatcggcggcgatacgctggcgcgcgagctggtgctcgaagccattgcccagggcaagcatgtcgtcaccgccaacaaggcgctgctggccaagcacggcaacgagatcttcgccgccgcttcggcccgcggcgtcatggtggcgttcgaggccgcggtggccggaggggtgcccatcatcaaggcgatccgcgaaggcctgaccgccaaccgcatcgaatgggtggccggcatcatcaacggcaccaccaatttcatcctgtccgaaatgcgcgcccgcgggctgccgttcgccgacgtgctggccgaggcgcagcgcctgggctacgccgaggccgaccccaccttcgacatcgaaggcgtggacgccgcgcacaagctgaccctgctggcctcgctggccttcggcgtgccggtccagttcgacaaggcctatgtcgagggcatcacgcaactggcccaggaggacatcgcccacgccgagcgcctgggctatcgcatcaagctgctgggcatcaccaagcggcgcgtcgatggcatcgagctgcgcgtgcatccgacgctggtgccggccgagcgcttgctggccaatgtcgagggcgccatgaacgccgtgctggtgcgcggcgatgccgtggggcccacgctgtactatggccagggcgccggcgaagagcccaccgcgtcggcggtggtggccgacctggtcgacgtgacccgcctgcacacggccgaccccggccaccgcgtgccgcacctggccttccagcccgatgcgctgtccgacctgcagatcctgtcgatcgaggaagtcagcacctcctattacctgcgcatgcgggtcgacgaccagcccggcgtgctggccgacatcgcgcgcatcctggccgaccgctcgatttccatcggttcgatgatccagcagcccgcgcgcatcggcggcgccgacatcatcttcctgacgcacgaagccgtcgaaggcaatgtgaaccaggccatcgagcacatcgaagcgctgccgttcgtgcgttcgaaggtgacgcgcctgcgcatggaaaacctcacatga

SEQ ID NO: 6329 - protein, 434 aa, Bordetella pertussis Tohama I
MNPMKVGLLGLGVVGGGTWAVLARNAEEIARRAGRRIEVSRIAVRDVAKARSRVGDGVEISTDGFALVRDPAVDIVVELIGGDTLARELVLEAIAQGKHVVTANKALLAKHGNEIFAAASARGVMVAFEAAVAGGVPIIKAIREGLTANRIEWVAGIINGTTNFILSEMRARGLPFADVLAEAQRLGYAEADPTFDIEGVDAAHKLTLLASLAFGVPVQFDKAYVEGITQLAQEDIAHAERLGYRIKLLGITKRRVDGIELRVHPTLVPAERLLANVEGAMNAVLVRGDAVGPTLYYGQGAGEEPTASAVVADLVDVTRLHTADPGHRVPHLAFQPDALSDLQILSIEEVSTSYYLRMRVDDQPGVLADIARILADRSISIGSMIQQPARIGGADIIFLTHEAVEGNVNQAIEHIEALPFVRSKVTRLRMENLT

SEQ ID NO: 6330 - DNA, 1305 bp, Bordetella parapertussis 12822
  CDS (1)..(1305): transl_table=11
atgaatccgatgaaggtgggcctgttgggcctgggcgtggtgggcggcggcacctgggcggtgctggcgcgtaatgccgaagaaatcgcacggcgcgccggacggcgcatcgaagtcaaccgcatcgccgtgcgcgacgtggccaaggcgcgcagccgcgtcggggatggcgtcgagatttcgaccgacggctttgccctggtgcgcgatccggcggtcgacatcgtggtcgaattgatcggcggcgatacgctggcgcgcgagctggtgctcgaagccattgcccagggcaagcatgtcgtcaccgccaacaaggcgctgctggccaagcacggcaacgagatcttcgccgccgcttcggcccgcggcgtcatggtggcgttcgaggccgcggtggccggcggggtgcccatcatcaaggcgatccgcgaaggcctgaccgccaaccgcatcgaatgggtggccggcatcatcaacggcaccaccaatttcatcctgtccgaaatgcgcgcccgcgggctgccgttcgccgacgtgctggccgaggcgcagcgcctgggctacgccgaggccgaccccaccttcgacatcgaaggcgtggacgccgcgcacaagctgaccctgctggcctcgctggccttcggcgtgccggtccagttcgacaaggcctatgtcgagggcatcacgcaactggcccaggaggacatcgcccacgccgagcgcctgggctatcgcatcaagctgctgggcgtcaccaagcggcgcgtcgatggcatcgagctgcgcgtgcatccgacgctggtgccggccgagcgcttgctggccaatgtcgagggcgccatgaacgccgtgctggtgcgcggcgatgccgtggggcccacgctgtactatggccagggcgccggcgaagagcccaccgcgtcggcggtggtggccgacctggtcgacgtgacccgcctgcacacggccgaccccggccaccgcgtgccgcacctggccttccagcccgatgcgctgtacgacctgcagatcctgtcgatcgaggaagtcagcgcctcctattacctgcgcatgcgggtcgacgaccagcccggcgtgctggccgacatcgcgcgcatcctggccgaccgctcgatttccatcggttcgatgatccagcagcccgcgcgcatcggcggcgccgacatcatcttcctgacgcacgaagccgtcgaaggcaatgtgaaccaggccatcgagcacatcgaagcgctgccgttcgtgcgttcgaaggtgacgcgcctgcgcatggaaaacctcacatga

SEQ ID NO: 6331 - protein, 434 aa, Bordetella parapertussis 12822
MNPMKVGLLGLGVVGGGTWAVLARNAEEIARRAGRRIEVNRIAVRDVAKARSRVGDGVEISTDGFALVRDPAVDIVVELIGGDTLARELVLEAIAQGKHVVTANKALLAKHGNEIFAAASARGVMVAFEAAVAGGVPIIKAIREGLTANRIEWVAGIINGTTNFILSEMRARGLPFADVLAEAQRLGYAEADPTFDIEGVDAAHKLTLLASLAFGVPVQFDKAYVEGITQLAQEDIAHAERLGYRIKLLGVTKRRVDGIELRVHPTLVPAERLLANVEGAMNAVLVRGDAVGPTLYYGQGAGEEPTASAVVADLVDVTRLHTADPGHRVPHLAFQPDALYDLQILSIEEVSASYYLRMRVDDQPGVLADIARILADRSISIGSMIQQPARIGGADIIFLTHEAVEGNVNQAIEHIEALPFVRSKVTRLRMENLT

SEQ ID NO: 6332 - DNA, 1317 bp, Prochlorococcus marinus str. MIT 9313
  CDS (1)..(1317): transl_table=11
atgggcacgaaattaggaataggtctcctggggcttggaacagtaggcgccggtgtagcaggcatcctccaagcccctgaagggcggcatccactggtggctgagcttgaactggtccgtgtagcggttcgagatctacaacgacctcgcccaattgagctccgcccatccttagtgaccaacaacccacaggccgttgttgatgatccctctgttcaagtggttgttgaagtcatgggagggatcgaaccagcccgaaccctgatcatgcgagccattgccgccggcaaagcggtcgttacagctaacaaagcggtgattgcaagacatggcgaagagattgcctctgctgctgcagctgctggggtctacgtcctgatcgaagctgccgtcggcggtggcatcccgatcatcgagccacttaagcaatcactaggtggcaaccggatcgaacgcgtgagcggcatcatcaacggcaccaccaactacatcctcagccgcatggcacaggaaggggtggcctatgacgacgtgctcaagaccgcccaagatcttggctacgcagaggcagatccagctgccgacgttgaggggttcgatgcggccgacaagattgccatcctcactgggctcgccttcggtggacctgtcgaccgtgactcaattcccacccaaggcatcaacaaccttcaaagccgcgatgtggactacgccacacagcttggctacagggtgaaactattggctatcgccgaacgtctcaactcagacgctcagaccagtcagtccttgcccttagcggtaagggtgcagccaaccatgattcctctcgaccacccgcttgctggcgtgaatggcgtgaacaacgccatcctggttgagggcgatccgatcggccgcgtgatgttttatggcccaggagcaggctctggacccaccgcctcagctgtggtggcggacatcctcaacatcgctggcatacgccaattaggtgaaatcaacggcagcctcgacccccttcttgccgcaagcagttggcgttcctgtcacctcgttgatccaagcgccatccttcagcgcaactatgtgcgcttcaacgcagaagacaccccaggagtgatcggtcggatcggtagctgcttcggcgatcgtggcatctcgattcaatcaatcgttcaattcgatgcctccgatgccggcgccgaaatcgttgtgattacccatgaaataagtcaaggccagatgcaagatgccctgaccgcaatcacctccatggctgaggtcaaaggacttgccgcccatctgagctgtctttaa

SEQ ID NO: 6333 - protein, 438 aa, Prochlorococcus marinus str. MIT 9313
MGTKLGIGLLGLGTVGAGVAGILQAPEGRHPLVAELELVRVAVRDLQRPRPIELRPSLVTNNPQAVVDDPSVQVVVEVMGGIEPARTLIMRAIAAGKAVVTANKAVIARHGEEIASAAAAAGVYVLIEAAVGGGIPIIEPLKQSLGGNRIERVSGIINGTTNYILSRMAQEGVAYDDVLKTAQDLGYAEADPAADVEGFDAADKIAILTGLAFGGPVDRDSIPTQGINNLQSRDVDYATQLGYRVKLLAIAERLNSDAQTSQSLPLAVRVQPTMIPLDHPLAGVNGVNNAILVEGDPIGRVMFYGPGAGSGPTASAVVADILNIAGIRQLGEINGSLDPLLAASSWRSCHLVDPSAILQRNYVRFNAEDTPGVIGRIGSCFGDRGISIQSIVQFDASDAGAEIVVITHEISQGQMQDALTAITSMAEVKGLAAHLSCL

SEQ ID NO: 6334 - DNA, 1308 bp, Synechococcus sp. WH 8102
  CDS (1)..(1308): transl_table=11
atgggcgcacggatcggcgtaggtcttttggggctgggcaccgttggcggcggggtggctgaaattctgttgaatccagaggagcgtcatcctttggttgccgatctggacctgattcgtgtggccgtccggaacgtcaaccgccctcgcacggttgagttgtccgatgccgtgctgaccaccgatcccagcgaggtggtcaacgacccgaatgtggatgtggtggtggaggtgatcggtggcattgaaccggcccgcagcttgatccttcaggccatcgccaatggcaagtcagtggtgaccgccaacaaagcggtgatcgcgcgccatggccccgaaattgccagcgctgccaaagcagcaggggtctacgtgctgattgaagcggcagtcggcggtggcatcccgatcatcgaacccctgaagcaatccctcggcggcaacaggatcaatcgggtgagcggcatcatcaacggcaccaccaactacatcctcacgcgaatggcgaatgagggggctgcctacgccgatgtgctggctgaagcccagcgactcggctatgcggaagccgaccctgcggccgatgtggatggtctcgatgccgcagacaagatctccatcttgtccgccctcgcctttggcggaaccgtggaccgcgatgccctccccacgactggcatcagtgcactgcagggccgtgatgtggagtacgcgcgacaactgggctatggcgtgaaattgcttgctgttgccgaacgccttgctggccagggtgatcccttaccgctgtccctgcgagtgcaaccgaccctggtacccagcgatcacccactggccggagtcaatggcgtcaacaacgccatccttgtggagggggaccccatcggacgggtgatgttctacggccccggagcaggggccggaccaacggcatcggctgttgtggccgacatcctcaacatcgccggcatccgccaggccagtggcgatcaggggccagtggacccgctgttggcggcaggcagctggagaccgtgcgttctggcggacagcggagacatccggcagcgccactatgtgcggttcaacacggaagatgctcccggcgtgatcggcaaggtgggtggccgtttcggcgacgcgggcgtttccattcaatcgattgttcaattcaacgccagtgaggccggcgcagaaatcgttgtgatcacccatgaagtcagtcagcgcaaggtgatcgcagccctcgatgccatcacttctctcgatgaagtctcgggactggcggctcacctgggctgtctctga

SEQ ID NO: 6335 - protein, 435 aa, Synechococcus sp. WH 8102
MGARIGVGLLGLGTVGGGVAEILLNPEERHPLVADLDLIRVAVRNVNRPRTVELSDAVLTTDPSEVVNDPNVDVVVEVIGGIEPARSLILQAIANGKSVVTANKAVIARHGPEIASAAKAAGVYVLIEAAVGGGIPIIEPLKQSLGGNRINRVSGIINGTTNYILTRMANEGAAYADVLAEAQRLGYAEADPAADVDGLDAADKISILSALAFGGTVDRDALPTTGISALQGRDVEYARQLGYGVKLLAVAERLAGQGDPLPLSLRVQPTLVPSDHPLAGVNGVNNAILVEGDPIGRVMFYGPGAGAGPTASAVVADILNIAGIRQASGDQGPVDPLLAAGSWRPCVLADSGDIRQRHYVRFNTEDAPGVIGKVGGRFGDAGVSIQSIVQFNASEAGAEIVVITHEVSQRKVIAALDAITSLDEVSGLAAHLGCL

SEQ ID NO: 6336 - DNA, 1311 bp, Chromobacterium violaceum ATCC 12472
  CDS (1)..(1311): transl_table=11
atgaaaccgatcaatatcggcctgatgggcgtgggcaccgtgggcggcggcaccgccaccgtgctgaaacggaacgcaggcgagatcacccgccgcgccggccgcgagatccgcctgatccaggccgccaaccgcgacgtggccaaggcgcgggcggcgctggggccggaggtgccggtggtggacgacgcgctgcagatcgtcaacaacccggacgtcgacatcgtggtcgagctgatcggcggcgacaccgtcgccaaggatctggtgctgaaggcgatcgaaaacggcaagcacgtggtcaccgccaacaagaagctgctggcgctgcacggcaccgagatcttcgcccgcgcgcaggaaaagggcgtgatggtggccttcgaagccgcggtggccggcggcatccccatcatcaagaccctgcgcgaaggcctggcggccaaccgcatcgaatggatcgccggcatcatcaacggcacctccaacttcatcctgaccgagatgcgcgacaagggcgcgagcttcgccgacgtgctggccgaggcgcagaagctgggctatgccgaggcggacccgaccttcgacatcgaaggccacgacgcgggccacaagctgaccatcatggcggcgctggctttcggcatcccgatgcagttcgaccagtgctatctggagggcatcagcaagttggacggccgcgacatccgctacgcggaggagttgggctaccgcgtcaagctgctgggcctgacccgccgcaccgacaagggcgtggagctgcgcgtgcatccgacgctgatcccggaaggccggctgatcgccaacgtcaacggcgtgatgaacgcggtgctggtcaagggcgacgcgctgggcccgaccttgtactacggcgccggcgccggcgcgctgcccaccgcctccgcggtggtggccgacatcgtcgacgtcacccgcctgctgacctcggacccggagcaccgcgtgccgcacctggccttccagcccgaccagctgcaggatctgcccatcctgccgatcgccgaggtcaccagctcctactacttgcgcatcggggcgatagaccgcgccggcgtgctggccaacatcacccgcctgctggcggagaacggcatctcgatcgaggcgctgatccagaagggctcggtgtccgacggcaccgccgaagtcgtgatcctgacccaccgcgtgcaggagaaggcgatcaatcgcgccatcgccggcatcgaggcgctggacagcgtcgacggcaaggtggtgcgtttgcgaatggaagagttgaatgactaa

SEQ ID NO: 6337 - protein, 436 aa, Chromobacterium violaceum ATCC 12472
MKPINIGLMGVGTVGGGTATVLKRNAGEITRRAGREIRLIQAANRDVAKARAALGPEVPVVDDALQIVNNPDVDIVVELIGGDTVAKDLVLKAIENGKHVVTANKKLLALHGTEIFARAQEKGVMVAFEAAVAGGIPIIKTLREGLAANRIEWIAGIINGTSNFILTEMRDKGASFADVLAEAQKLGYAEADPTFDIEGHDAGHKLTIMAALAFGIPMQFDQCYLEGISKLDGRDIRYAEELGYRVKLLGLTRRTDKGVELRVHPTLIPEGRLIANVNGVMNAVLVKGDALGPTLYYGAGAGALPTASAVVADIVDVTRLLTSDPEHRVPHLAFQPDQLQDLPILPIAEVTSSYYLRIGAIDRAGVLANITRLLAENGISIEALIQKGSVSDGTAEVVILTHRVQEKAINRAIAGIEALDSVDGKVVRLRMEELND

SEQ ID NO: 6338 - DNA, 1260 bp, Wolinella succinogenes DSM 1740
  CDS (1)..(1260): transl_table=11
atgatcaaggtaggaatcatcggtgtaggaacagtgggcagcagtgtcgctgttattttggagcaaaatagagaagtcatcgccgctagagcgggcaaagagatcgtcgtgaaaagaggagttgttaaagacctctccagaacgcgaagcgatgtgaagattcctatctccacgaacattgatgatatccttgatgatcctgagattgatgtggtggtggaattaatggggggtgtggagtttcccttcgaagtcgctaaaaaggctctagagaggggcaagagtgtcgtgactgccaacaaagcgatgctcgcctatcatcgatacgacttgcaggctattgcgggtgagattcctattggctttgaggcaagtgtagcggggggaattcctatcatcaaggcgttaagggacggtcttggggcgaatcacatccgctccattcgtggaatcatgaatggaacctgcaactttatcctcaccaaaatggtcaaagagggagcggcctatgaggcggtgctcaaagaggctcagacgctcggatatgcagaagcggatccgacttttgatgtgggaggatttgatgcggcgcacaagctgctcatccttgcctccattgcttatggaatcgatgcaaagcccgaggaggtgctcatcgaaggaatccagaagatatcccaagacgagatcgcctttgctaaggagtttggttatagcctgaagcttcttggaatcgccaaaaaagagggtgaagaggtggagttgcgcgtccatcccgtctttatctctagtgaggagatgatcagcaaagtcgatggcgtgatgaatggcattagcgtcattggggatgcggtgggcgagacgatgtattatggagcgggtgcaggaggtgatgcgactgcgagtgccgtgatctccgatctcatcgagattgcaagagtgaagggtgcccccatgcttgggtttaaaagacccatggagagtggattgagactcaagcctcaagaggagattcgttcccgatactatttgcgcctagaagtcaaagatcagccaggtgttttggctaaaatcgcctctcttttaggggagcaatccatctccattagcactcttttgcagaagaacttcgaagggggcgcaaaacttctcctctccacgcacacctgcagcgagcgagagattaagcgtgccattgaagggcttgaggctttggaggtggtgcttagcgctcctgtgatggtgagaatcgaggggtag

SEQ ID NO: 6339 - protein, 419 aa, Wolinella succinogenes DSM 1740
MIKVGIIGVGTVGSSVAVILEQNREVIAARAGKEIVVKRGVVKDLSRTRSDVKIPISTNIDDILDDPEIDVVVELMGGVEFPFEVAKKALERGKSVVTANKAMLAYHRYDLQAIAGEIPIGFEASVAGGIPIIKALRDGLGANHIRSIRGIMNGTCNFILTKMVKEGAAYEAVLKEAQTLGYAEADPTFDVGGFDAAHKLLILASIAYGIDAKPEEVLIEGIQKISQDEIAFAKEFGYSLKLLGIAKKEGEEVELRVHPVFISSEEMISKVDGVMNGISVIGDAVGETMYYGAGAGGDATASAVISDLIEIARVKGAPMLGFKRPMESGLRLKPQEEIRSRYYLRLEVKDQPGVLAKIASLLGEQSISISTLLQKNFEGGAKLLLSTHTCSEREIKRAIEGLEALEVVLSAPVMVRIEG

SEQ ID NO: 6340 - DNA, 1284 bp, Gloeobacter violaceus PCC 7421
  CDS (1)..(1284): transl_table=11
atggcaacccccttgcgtctggcactcatcgggctgggtacggtcggcagcggcgtcctgcgtattttgcacgacacggccgggcgcgacgcgcggctgggcacggtacaggtagtgggtgtggccgtgcgcgatctcgaaagacccagagacctgccggtgttgcccccgctcaccgacgacccgttctcactggtgcgcgatccggaggtggatgtggtagccgaggtgatggggggagtggatctgccttaccggctgttgaccgcggcgctcaaggcgggcaagcacgtgatcaccgcgaacaaagccttgcttgcccgccacggccaggagttgttcgccctggcgcgcgcccaaaatcgccagttgcgctacgaggcggcggtgggcggcggcatcccgctcattcaaccgctggagcagtgcctgggggccaaccgcatccactcggtgacggccatcatcaacggcacgaccaattacatcctcacccagatggccacccgccagatggcctacacccaggccctcgccgaagcccaggccctgggttacgccgaggccgacccggcggcggacgtcgagggggccgacgcccaggagaagctcacgatcctggccagcatcgcctttcgcatcccgctgccgcctctggaggcgatttaccgcgaggggatcaccgcaatcgatctgcccgatgtgatcaacgcccagcagttgggttttgggatcaaactgctggccctggcggagcgctgcccggacggacggctcgatctgcgggtgcacccgacgctggtgccggtcgatcatcccctcagccgggtggacggtgcctacaacgcggtgctcatcgaggcggaaccggtggggtcgatcatgttctttggtcccggggccgggggcggtcccaccgcaagcgcggtgatttccgatctgatcaatatcctcgccgaccggcccgccggacccacccccgccgactttgcccaaccgccgcctggttatctatccatcgacgaagtccagacccgcttttatatccgcctgcgcgccctcgaccggccgggggtggtcggccatatcggccagatcttcggtcgccactcggtgagccttgcctcgatcgtccagaagaacccgcgcggggccgccgccgaactggtgatcatcacccacgacgtggcggaagcgcgcctgcgggcggccctggccgagttgcgcgccagcagcgaggtgcaggatttttgcaccgccatccgggttctgcccgagggctga

SEQ ID NO: 6341 - protein, 427 aa, Gloeobacter violaceus PCC 7421
MATPLRLALIGLGTVGSGVLRILHDTAGRDARLGTVQVVGVAVRDLERPRDLPVLPPLTDDPFSLVRDPEVDVVAEVMGGVDLPYRLLTAALKAGKHVITANKALLARHGQELFALARAQNRQLRYEAAVGGGIPLIQPLEQCLGANRIHSVTAIINGTTNYILTQMATRQMAYTQALAEAQALGYAEADPAADVEGADAQEKLTILASIAFRIPLPPLEAIYREGITAIDLPDVINAQQLGFGIKLLALAERCPDGRLDLRVHPTLVPVDHPLSRVDGAYNAVLIEAEPVGSIMFFGPGAGGGPTASAVISDLINILADRPAGPTPADFAQPPPGYLSIDEVQTRFYIRLRALDRPGVVGHIGQIFGRHSVSLASIVQKNPRGAAAELVIITHDVAEARLRAALAELRASSEVQDFCTAIRVLPEG

SEQ ID NO: 6342 - DNA, 1347 bp, Corynebacterium diphtheriae NCTC 13129
  CDS (1)..(1347): transl_table=11
atgaaccctgactcacagcatcatgcaacgtttaaccctggcaaaggtgaaggatcacctgtgggaatcgcgattttgggctatggcacagtgggtagccaagttcttcgtctcctcaccgagaatcataatgatttccaacatcgcgccggtggaccgcttgagatcaagggtgttgctgcctccagtgtggaaaagcaccgtggatctcttgccgatcaactaggactacttacagacgatgcgcgctcgcttattgctcgtgatgacgtagatatcgttgtggaagtcatcggtggaatcgactatccgcgtgagctcattcttgaggctctacacagcggaaagtctgtggtgacagcaaacaaggcgctggtcgcggctcattcagaggagcttgctgctgcagctgacgaggccggagttgacctctacttcgaggccgcagttgccgctgcaatcccagtgcttggcccactacgtcgttccttggctggtgaccaaatccagtcggttgccggcattgttaacggaacgaccaacttcatcttggacgccatggattctacgggtgcaagctatgatgacatgctcgcagaagccacccgattgggctatgcagaagcagacccaacagcagatgttgaaggccatgacgcagcatcgaaagcagctattcttgcatccttggcattccatacacgcgtaacttatgcggatgtgtactgtgagggaatctcgaagatcacggcagacgacatcaacgcagccaaggaagcaggctttaccatcaaactgcttgctatctgcgagcggctcaatgttgatggcgtagaaaaggtttctgcgcgcgttcatcccaccttggtcccacgcaatcaccccctggccagcgtagataagtccttcaacgcaattttcgttgaagctgaagctgcaggccgacttatgttctatggcaatggtgctggtggtaacccaacggcatcggcggtgctcggcgatattgtcggcgctgctcgcaacaaggtttttggtgggcgtgccccaggcgaatccacctatgcggatcttcccattgcaccattcggtgaggtccctacacgcttccatatcgatatggaagtagaagaccgcgttggcgtattggcggatcttgctaagactttctctaaccatggtatttcgttgcgcactgtgcgtcaggctgaaaaagatggtcatgcccgcttgattgtggttacgcatacggccaaggaatcggaacttgaagcaaccgttgaacagattaagaattctgactcggtgaaaaagatcaacagcgttattcgtctagcaggggagtaa

SEQ ID NO: 6343 - protein, 448 aa, Corynebacterium diphtheriae NCTC 13129
MNPDSQHHATFNPGKGEGSPVGIAILGYGTVGSQVLRLLTENHNDFQHRAGGPLEIKGVAASSVEKHRGSLADQLGLLTDDARSLIARDDVDIVVEVIGGIDYPRELILEALHSGKSVVTANKALVAAHSEELAAAADEAGVDLYFEAAVAAAIPVLGPLRRSLAGDQIQSVAGIVNGTTNFILDAMDSTGASYDDMLAEATRLGYAEADPTADVEGHDAASKAAILASLAFHTRVTYADVYCEGISKITADDINAAKEAGFTIKLLAICERLNVDGVEKVSARVHPTLVPRNHPLASVDKSFNAIFVEAEAAGRLMFYGNGAGGNPTASAVLGDIVGAARNKVFGGRAPGESTYADLPIAPFGEVPTRFHIDMEVEDRVGVLADLAKTFSNHGISLRTVRQAEKDGHARLIVVTHTAKESELEATVEQIKNSDSVKKINSVIRLAGE

SEQ ID NO: 6344 - DNA, 1326 bp, Rhodopseudomonas palustris CGA009
  CDS (1)..(1326): transl_table=11
atggtcgcgccactcagagtgggtattgcgggtctcggcaccgtgggtgccgaagtcgtccgcgtcatcgaacggcaggagcggaccttgtccgctcgttgcggccgccccgtgcgggtggtcgcggtcaccgcgcgctccaaggcgaagaagcgcgggctcgacctctccggtatcaaatgggccaagagtccgctcgcgatcgccaccgatcccgaggtcgactgcttcgtcgagctgatcggcggtgccggcgatcccgccggtccggcgatcgaggcggcgctggctgccggcaaggcggtggtcaccgccaacaaggcgctgatcgccaagcacggcctcaagctggcgtcgctcgccgagaagcacaatgcggcgctgaactacgaagccgccgttggtgccgcgatcccggtgatcaagacgctgcgcgagggcctcgcgggcaccgacatcgatcgcatctacggcattctcaacggcacctgtaactacatcctgacccggatggagcaggaggggctgtcgttcgacgactgcctcgccgatgcccagcggctcggctacgccgaagccgatccgaccttcgatatcgacggccacgacaccgcgcagaagctggcgatcctggccagcctcgcgttcggcaccaaggtgtcggagagctcggtttacgtcgaaggcatccgctcgatcaccccggaagatctccgcgcagccgatgatctcggctaccgcgtcaagctgctcggcgtggcggttcgcaccgccaagggcatcgagcagcgcgtgcatccgaccatggtgccgaagacctcgtcgatcgcccaggtgatgggcgtgaccaacgccgtctcgatcgacggcgatggcattccgccgatcacgctggtcggtgccggcgccggtgccgccgcgaccgcatccgcggtggtggcggatatcgccgacgtcgcccgcggcatccgcgcggtgccgttcggccggccggtggccgggctgaaggccaccgcgaaggcgccgatgcagcgccatgaaggcggctattacttgcggctgctggcgcgcgatcacgccggcaccgccgcgaccatcgccaagcggcttgccgagcaggacatctcgatcgagtcgatcgtgcagcggcatccgcaccgcagcctcgatgccaatggcaaggctgccaaatcgtcgatcccggtgccggtgattctgatcacttacgccaccgccgaagacgcggtgcgccgcgccctgcaggcggtgcagcgcgacaaggtgatcagtggccggccacaggtgatccggatcgagaagaactga

SEQ ID NO: 6345 - protein, 441 aa, Rhodopseudomonas palustris CGA009
MVAPLRVGIAGLGTVGAEVVRVIERQERTLSARCGRPVRVVAVTARSKAKKRGLDLSGIKWAKSPLAIATDPEVDCFVELIGGAGDPAGPAIEAALAAGKAVVTANKALIAKHGLKLASLAEKHNAALNYEAAVGAAIPVIKTLREGLAGTDIDRIYGILNGTCNYILTRMEQEGLSFDDCLADAQRLGYAEADPTFDIDGHDTAQKLAILASLAFGTKVSESSVYVEGIRSITPEDLRAADDLGYRVKLLGVAVRTAKGIEQRVHPTMVPKTSSIAQVMGVTNAVSIDGDGIPPITLVGAGAGAAATASAVVADIADVARGIRAVPFGRPVAGLKATAKAPMQRHEGGYYLRLLARDHAGTAATIAKRLAEQDISIESIVQRHPHRSLDANGKAAKSSIPVPVILITYATAEDAVRRALQAVQRDKVISGRPQVIRIEKN

SEQ ID NO: 6346 - DNA, 1296 bp, Bacillus cereus ATCC 10987
  CDS (1)..(1296): transl_table=11
atgaaagaaattcaagttggcttattaggtcttgggacagttgggagcggtgtggttcgtatcattacagatcaccaagagcgactgatacaccaagtaggttgtcctgtaaaagtaacgaaagtgctagtacaaaatattgaaaaagagagagaagtagaggtaccttctactctattaacgcaaaatgcaaatgaaattttagataatccaaatattgatgttgtcatcgaagtgatgggtggcattgatgacgcaaaatcacatattttacaagctttacaaagcgggaagcatgttgtgactgccaataaagatttaatggcgttacatggagcggaactgttagcggtagcaaaagataataaagcagatttgttttatgaagcaagtgtagccggagggattccgattttacgaagtatcgtagagggactttcttcagatcttattacgaaagtaatgggaattgtaaatggaacgacaaattttattttgacgaaaatgtcagatgaagggagagcatataacgacgtgttaaaagaagctcagcaacttggatttgcagaagcagatccaacatcagatgtagaaggtttagatgcagcaagaaaaatgacaattttggctacccttggtttctctacaaatgtagagcttggagatgtgaaggtaaaaggcattacttctattacagaagaagatattgaatacagtaagagtttaggatacacgattaaattaatcggtcttgcgaagcgagatggtgagaaattagaggttacagttgaaccgacattactcccaaatacacatcctcttgcggccgtgcaaaacgaatataacgctgtatatgtgtatggtgaagcagttggagaaacgatgttttatggaccaggtgcaggaagtttaccgacagcaacagctgttgtttctgatttagtagctgtaatgcaaaatattagattaggggtaacaggaaatagtgctgtagtcccgcaatatcaaaaagtattaaaagagccagacgaaattgttgtaaagaaatttttaagacttcatgtaaaagatgaaattggtgtatttgcaaaaattacttcgttattctctgagcgtggtgttagctttgaaaagattattcaaatgccgcttgaagagaaaggaaaggctgaaattgtcattgtaacgcatcgtgcttctcttgctgattatgattatattctacatacgttgcaagggtatgaagaaatagattgtttgaaagcaaactaccgaattgaaggagatgctaagtag

SEQ ID NO: 6347 - protein, 431 aa, Bacillus cereus ATCC 10987
MKEIQVGLLGLGTVGSGVVRIITDHQERLIHQVGCPVKVTKVLVQNIEKEREVEVPSTLLTQNANEILDNPNIDVVIEVMGGIDDAKSHILQALQSGKHVVTANKDLMALHGAELLAVAKDNKADLFYEASVAGGIPILRSIVEGLSSDLITKVMGIVNGTTNFILTKMSDEGRAYNDVLKEAQQLGFAEADPTSDVEGLDAARKMTILATLGFSTNVELGDVKVKGITSITEEDIEYSKSLGYTIKLIGLAKRDGEKLEVTVEPTLLPNTHPLAAVQNEYNAVYVYGEAVGETMFYGPGAGSLPTATAVVSDLVAVMQNIRLGVTGNSAVVPQYQKVLKEPDEIVVKKFLRLHVKDEIGVFAKITSLFSERGVSFEKIIQMPLEEKGKAEIVIVTHRASLADYDYILHTLQGYEEIDCLKANYRIEGDAK

SEQ ID NO: 6348 - DNA, 1317 bp, Prochlorococcus marinus str. MIT 9303
  CDS (1)..(1317): transl_table=11
atgggcaagaagataggagttggtctcctggggcttggaacagtaggcgccggtgttgcaggcatcctccaagcccccgaagggcggcatcctctggtggcagagcttgaactggtgcgtgtagcggttcgaaatctgcaacgacctcgctcgattgaacttcccgcatccttgctgaccaacaacccacaggctgttgttgatgatccctctgtgcaagtggttgttgaagtcatgggagggatcgaaccagcccgaaccctgatcatgcgagccattgccgccggcaaagcagttgttacagctaacaaagccgtaattgcaagacatggcgaagagattgcagctgctgcagctgctgcaggggtatacgtactgatcgaagctgccgtcggcggaggcatcccgatcatcgagccacttaagcaatcactaggtggcaaccggatcgaacgcgtgagcggcatcatcaacggcaccaccaactacatcctcagtcgcatggcacaggaaggggtggcctatgacgacgtgctcaagaccgcccaggatcttggctatgcagaggcagatccagcggccgacgttgagggcttcgatgcagcagacaagattgccatcctcagtggactggccttcggtggacctgtcaaccgtgactcaattcccacccaaggcatcaacaagcttcaaagccgcgatgtggactacgccaaacagcttggctacagggtgaaattattggctgtcgccgaacgtctcaactcagacgctcagaccagtcagtccttgcccttagctgtaagggtgcaaccaacaatggtgcctctagaccacccgcttgcaggagtaaatggcgtgaacaacgccatcctggttgagggcgatccgatcggccgcgtgatgttttatggcccaggagcaggttctggacccaccgcctctgctgtggtagctgacatcctcaacatcgctggcatacgccaactaggtgaagtccacggcagcctcgatccccttctcgccgcaagcagttggcgttcctgtcacctcgttgatccaagtgccatccgtcagcgcaactatgtgcgcttcaatgcagaggacacaccaggcgtgatcggtcggatcggtagctgcttcggcgatcgtgcaatttcaattcaatcaatcgtgcaattcgatgcctccgatgccggcgcagaaatcgttgtaattacccatgaaataagtcaaggccagatgcaagatgcccttactgcaatcacctctatggctgaggtcaaaggacttgccgcccatctcagctgcctttaa

SEQ ID NO: 6349 - protein, 438 aa, Prochlorococcus marinus str. MIT 9303
MGKKIGVGLLGLGTVGAGVAGILQAPEGRHPLVAELELVRVAVRNLQRPRSIELPASLLTNNPQAVVDDPSVQVVVEVMGGIEPARTLIMRAIAAGKAVVTANKAVIARHGEEIAAAAAAAGVYVLIEAAVGGGIPIIEPLKQSLGGNRIERVSGIINGTTNYILSRMAQEGVAYDDVLKTAQDLGYAEADPAADVEGFDAADKIAILSGLAFGGPVNRDSIPTQGINKLQSRDVDYAKQLGYRVKLLAVAERLNSDAQTSQSLPLAVRVQPTMVPLDHPLAGVNGVNNAILVEGDPIGRVMFYGPGAGSGPTASAVVADILNIAGIRQLGEVHGSLDPLLAASSWRSCHLVDPSAIRQRNYVRFNAEDTPGVIGRIGSCFGDRAISIQSIVQFDASDAGAEIVVITHEISQGQMQDALTAITSMAEVKGLAAHLSCL

SEQ ID NO: 6350 - DNA, 1287 bp, Clostridium thermocellum ATCC 27405
  CDS (1)..(1287): transl_table=11
atggaagaagtgaaaattggtttccttggttttggaaatgttggaaccggagcttataaaattattcgtgataacggtaatgatatttttctaagtgaaggagttcggctgaaagttgcgaaaattcttgtaagagatattaataagaaaagaaatgtggaagttgacaattctattctgacggataaatttgaagaaatagtaaatgaccccggaatctccattgttgctgaattcatgggcggtgtggagcctgccagggattatgttgtttcctgccttaagaataaaaaaaccgttgtgactgcaaacaaagagcttattgccaaacatggattggagcttcaggcgcttgccaaagaaaacggagtgggtctttattatgaagcaagtgtggcaggaggtattccggttataaagattcttgcagagtcgcttcaggcaaacaaaattggcgaaattatggggattattaatggtaccactaactatatacttacaaagatgtccgaggagggaagaagtttcagtgatgtgcttgcagaagcacaaagactggggtatgcggaaccggatcctactgctgacatagaaggctatgatgctatgtataaaatttccatattatcctccatggcatttcataaaaaggtggatgttgacaaaatctacagggagggtattacccaaattaccccggaagatattgaatacggcagggagctggggtttgcaatccgtcttcttgccattgccaaaaagcgcaacaataccatcgaagtaagagtgcatccgacatttatacctcttgaccatcctttggctgctgtaaggcattcctttaatgcagtgttccttaaaggggacgccgtggggaatataatgctgtacggcagaggagccggggaccttcctacgggaagtgcaattgtgtcggatataattactgcatgccatcagaaggacaagcacagatatatcagtttttacaatgacgaagaaggctcagctgagaagataaaattcaatgatgactgggaaagcgaattttttgtcagacttacggtaaaggacaagccgggagttcttgccaaaattgccggatgctttggcaaacacggagtgagtatagcatcggtaattcagaaggacaggggaaaggacgccgttcctttgatatttgtaacccatttggccaaggagctttcaatgaaaaaagccatatctgatattgcagaagttgaggatgtgttaatggttgaaaatatcataccggttgagcgttaa

SEQ ID NO: 6351 - protein, 428 aa, Clostridium thermocellum ATCC 27405
MEEVKIGFLGFGNVGTGAYKIIRDNGNDIFLSEGVRLKVAKILVRDINKKRNVEVDNSILTDKFEEIVNDPGISIVAEFMGGVEPARDYVVSCLKNKKTVVTANKELIAKHGLELQALAKENGVGLYYEASVAGGIPVIKILAESLQANKIGEIMGIINGTTNYILTKMSEEGRSFSDVLAEAQRLGYAEPDPTADIEGYDAMYKISILSSMAFHKKVDVDKIYREGITQITPEDIEYGRELGFAIRLLAIAKKRNNTIEVRVHPTFIPLDHPLAAVRHSFNAVFLKGDAVGNIMLYGRGAGDLPTGSAIVSDIITACHQKDKHRYISFYNDEEGSAEKIKFNDDWESEFFVRLTVKDKPGVLAKIAGCFGKHGVSIASVIQKDRGKDAVPLIFVTHLAKELSMKKAISDIAEVEDVLMVENIIPVER

SEQ ID NO: 6352 - DNA, 1314 bp, Herminiimonas arsenicoxydans
  CDS (1)..(1314): transl_table=11
atgaaatccatcaaagtaggtttgttaggtgcaggcactgtcggggcaggaacattcaatatcctcaagcgtaatcaggaagaaatttcccgtcgcgccggtcacaagattgaaatcgtcatggtggccgatctggatctggcgcgcgccaaggaattagtcgggagcgccgagtgcgaagtggtcaatgacggcaatctggtggtcaaccatcctgatatcgagatcgtggtcgaattgataggcggttacggcatcgcgaaagatctggtcttgaaggcgattgccaacggcaagcatgtcgtcactgccaacaaggctctgctggcggtgcatggtgatgaaattttcaaggcagcgcaagacaagggcgtgatggtcgcgtatgaagcggcggtcgccggcggcatccccatcatcaaggccttgcgcgaaggcttgacggccaatcgtatcgaatggatagccggcatcatcaacggcaccaccaatttcatcttgtccgaaatgcgcgacaagggtctggatttcgataccgttctgaaagaagcgcaacgcctgggctacgctgaagccgatccgactttcgatattgaaggcgtcgatgctgcgcacaaggcgacactgatggcctcgattgcattcggtattccggtgcagttcgacaaggcgcacatcgaaggcattaccaaactggaagccatcgatatccgctatgccgaacaactcggctaccggatcaagttgctgggtatcgccaaacgcacgccgcaagggatagaactgcgcgtgcacccaaccctgatccctgccaagcgcttgatcgccaatgtggaaggtgcgatgaatgccgtggtggtgcagggcgatgcagtgggagcgaccctgtactacggcaagggcgccggcgccgagccgaccggttcggcagtgattgccgatctggttgatatcgcgcgcctggccgatgccgatccggcacatcgcgtaccgcacctggcattccagccgaacgcaatgagcgcgttgccgatactgccgatttccgaagtcacgaccagctattacctgcgcttgcatgtgtctgacaagctgggtgtgctggcgaatgtcaccagcatccttgcagaatcgaccatttcggtagatgcgatgctgcagaaagagccggagctgggcgagtcgcaaaccgatatcatcatcctgacgcatcagacgcaagagaaaaacgtcgaagcggcgatcagtaagattgaagccttgccgaccgtgcatggcaaggtcacaaaaatcaggcttgaacatttgagctga

SEQ ID NO: 6353 - protein, 437 aa, Herminiimonas arsenicoxydans
MKSIKVGLLGAGTVGAGTFNILKRNQEEISRRAGHKIEIVMVADLDLARAKELVGSAECEVVNDGNLVVNHPDIEIVVELIGGYGIAKDLVLKAIANGKHVVTANKALLAVHGDEIFKAAQDKGVMVAYEAAVAGGIPIIKALREGLTANRIEWIAGIINGTTNFILSEMRDKGLDFDTVLKEAQRLGYAEADPTFDIEGVDAAHKATLMASIAFGIPVQFDKAHIEGITKLEAIDIRYAEQLGYRIKLLGIAKRTPQGIELRVHPTLIPAKRLIANVEGAMNAVVVQGDAVGATLYYGKGAGAEPTGSAVIADLVDIARLADADPAHRVPHLAFQPNAMSALPILPISEVTTSYYLRLHVSDKLGVLANVTSILAESTISVDAMLQKEPELGESQTDIIILTHQTQEKNVEAAISKIEALPTVHGKVTKIRLEHLS

SEQ ID NO: 6354 - DNA, 1329 bp, Burkholderia vietnamiensis G4
  CDS (1)..(1329): transl_table=11
atggaaccgatcaaagttggcctgttgggcttcggcaccgtcggtagcggcaccttcacggtgctgcaccgcaatcaggaagaaatcaaacggcgcgcggggcgcggcatcgagatcgcgcgcattgcggtgcgcaaccccgccaaggcgcaggccgcgctcggcgctgacgccggcgtcgtcgaggtcaccgacgacttcaacgcggtcgtcgacgatccgtcgatctcgatcatcgccgagatgatcggcggcaccggcatcgcgcgcgagctcgtgctgcgcgcgatcgccaacggcaagcatgtcgtgaccgccaacaaggcgctgctcgcggtgcacggcaccgagatcttcgaagccgcgcgcgaaaagggcgtgatggtcgcgttcgaggcggccgtcgcgggcggcatcccgatcatcaaggcgctgcgcgaaggcctgaccgccaaccgcatccagtacatcgccggcatcatcaacggcacgaccaactacatcctgtcggagatgcgcgaccgcggcctcgatttcgcgaccgcgctgaaggccgcgcaggcgctcggctacgcggaagccgatccgaccttcgacatcgaaggcgtcgacgccgcgcacaaggcgaccatcatgagcgcaatcgcgttcggcgtgccggtccagttcgaccgcgcttacgtcgaaggcatcagcaagctcgacgcgaccgacatccgctatgcggaagagctcggctaccggatcaagctgctcggcatcgcgcgccgcgccgaagacggcatcgagctgcgcgtgcatccgacgctgattcccgagaagcgcctgctcgccaacgtcgaaggcgcgatgaacgcggtcgtcgtgcacggcgacgcggtcggcacgacgctctactacggcaagggcgccggcgcggagccgaccgcctcggccgtcgtcgcggatctcgtcgacgtcacgcgcctgcatacggccgacccggaacaccgcgtgccgcatctcgccttccagcccgacagcctgtcgaacacgccgatcctgccgatcgacgaagtgacgagcggctactacctgcgcctgcgcgtggccgacgagacgggcgtgctcgccgacatcacgcgcatcctggccgacgccggcatctcgatcgacgcgctgctgcagaaggaatcggagcaggtcgacgacgcgaacggcgaaaccgacatcatcctgatcacgcacgaaacgcgcgaaaagcacgtgaacgcggcgatcgcgcgaatcgaaagcctctcgacggtggtgtcgaaggtgacgaagctgcgcatggaagcgctgaactga

SEQ ID NO: 6355 - protein, 442 aa, Burkholderia vietnamiensis G4
MEPIKVGLLGFGTVGSGTFTVLHRNQEEIKRRAGRGIEIARIAVRNPAKAQAALGADAGVVEVTDDFNAVVDDPSISIIAEMIGGTGIARELVLRAIANGKHVVTANKALLAVHGTEIFEAAREKGVMVAFEAAVAGGIPIIKALREGLTANRIQYIAGIINGTTNYILSEMRDRGLDFATALKAAQALGYAEADPTFDIEGVDAAHKATIMSAIAFGVPVQFDRAYVEGISKLDATDIRYAEELGYRIKLLGIARRAEDGIELRVHPTLIPEKRLLANVEGAMNAVVVHGDAVGTTLYYGKGAGAEPTASAVVADLVDVTRLHTADPEHRVPHLAFQPDSLSNTPILPIDEVTSGYYLRLRVADETGVLADITRILADAGISIDALLQKESEQVDDANGETDIILITHETREKHVNAAIARIESLSTVVSKVTKLRMEALN

SEQ ID NO: 6356 - DNA, 1317 bp, Bradyrhizobium sp. ORS278
  CDS (1)..(1317): transl_table=11
atggtcgcacccctgagagtgggcatcgcgggcctcggcaccgtgggtgccgaggtcgttcgtctgatcgagcggcaggggcgcgtgctcaccgagcggacggggcgtcccgtgcaggtcgtggcggtcacggcgcggtcgaagaagaagcgcgcgatcgatctctccgggatcaagtgggccaaggatccgctggcgctcgccagcgaccccgaagtcgactgtctggtcgagctgatgggtggtgcaggtgatcccgcgctgtcggcaatcgacaccgcgctcaaggccggcaagtcggtggtgaccgcgaacaaggcgctgatcgccaggcacggtctgaagctcgccaaggcggccgagaagcacggcggcgcgctgaatttcgaggccgctgtctgcgccgcgattccggtcatcaagaccctgcgcgaaggcctcgccggcaccggcatcagccgcgtctacggcattctcaatggcacctgcaactacatcctgacccggatggagcaggaaggtctgtcgttcgacgagtgcctggcggacgcgcagcgtctcggctacgccgaggccgatccgtcgttcgacatccatggccacgacaccgcgcagaagctcgcgatcctcgcgagcctcgccttcggcacccaggtcgcggaaaaatccatctacgtggaaggcatctcctcgatcgccccggaggatctgaaggcggccgccgagctcggctaccgcgtcaagctgctcggcgtcgccgtgcgcacggccaagggcatcgagcagcgcgtgcatccgaccatggtgccgaaatcgtcgtcgatcgcccaggtcatgggcgtgaccaacgcggtgaccatcgacggcgagggcattccgccgatcactctggtcggaccgggagcagggggcgcggcgaccgcgtccgcggtcctggctgatatcgccgatgtcgcgcgcggtatccgcgcggcgccgttcggacgaccggtcgacaagctgcaggcgaccgagaaggcgccgatggagcggcacgaaggcggctactacatccgactgatggcccgcgatcacgccggcactgccgcgacgatcgccacgcgcctcgccgagcagaagatctcgatcgagtcgatcgtgcagcgccatcccaacggcagcgagccgctgaagaccggcgccaagggcgggcccgtgcctgtgatcctgatcacctatgccacgcatgaggacgccgtgtacaaggcgctccaggccgtgcagcgcgacaaggtgatcagcggcaagccgcaggtgatccggatcgagaagaattaa

SEQ ID NO: 6357 - protein, 438 aa, Bradyrhizobium sp. ORS278
MVAPLRVGIAGLGTVGAEVVRLIERQGRVLTERTGRPVQVVAVTARSKKKRAIDLSGIKWAKDPLALASDPEVDCLVELMGGAGDPALSAIDTALKAGKSVVTANKALIARHGLKLAKAAEKHGGALNFEAAVCAAIPVIKTLREGLAGTGISRVYGILNGTCNYILTRMEQEGLSFDECLADAQRLGYAEADPSFDIHGHDTAQKLAILASLAFGTQVAEKSIYVEGISSIAPEDLKAAAELGYRVKLLGVAVRTAKGIEQRVHPTMVPKSSSIAQVMGVTNAVTIDGEGIPPITLVGPGAGGAATASAVLADIADVARGIRAAPFGRPVDKLQATEKAPMERHEGGYYIRLMARDHAGTAATIATRLAEQKISIESIVQRHPNGSEPLKTGAKGGPVPVILITYATHEDAVYKALQAVQRDKVISGKPQVIRIEKN

SEQ ID NO: 6358 - DNA, 1296 bp, Bacillus thuringiensis serovar konkukian str. 97-27
  CDS (1)..(1296): transl_table=11
atgaaagaaattcaagttggtttattaggtcttgggacggttggtagcggtgtagttcgtatcattacagatcatcaagagcgacttatacaccaagtaggttgtcctgtgaaagtaacgaaagtactagtgcaaaatattgaaaaagagagagaagtagaggtaccctctactctattaacacaagatgcacatgaaattttagataatccaaatattgacgttgtcatcgaagtaatgggtggcattgatgatgcaaaagcatatattctgcaagctttacaaagtgggaagcacgttgtgactgcgaataaagatttaatggcgttgcacggggcggaactactagcggtagcaaaagataataaagcagatttattttacgaagcaagtgtagccggagggattccaattttacgaagtatcgtagaagggctttcttcagatcttattacgaaagtaatgggaattgtaaatggaacgactaattttattttgacgaaaatgtcagatgaagggagagcatataacgacgtgttaaaagaagcccagcaacttggatttgcagaagcggatccaacatcagatgtagaaggtttagatgcagcaagaaaaatgacaatattggctacccttggtttctctacaaatgtagagcttggagatgtcaaggtaaaagggattacttctattacagaggaagatatcgaatacagtaagagtttagggtacacgattaaactaatcggtcttgcgaagcgagatggtgaaaaattagaggttacagttgaaccgactttacttccaaatacacatcctcttgcggccgtgcaaaacgaatataacgctgtatatgtgtatggtgaagcagttggagaaacgatgttttatggaccaggtgcaggaagcttaccgacagcaacagctgttgtttccgatttagtagctgtaatgcaaaatattagattaggggtaacaggaaatagtgctgtagtcccgcaataccaaaaagtattaaaagagccagatgaaattgttgtaaagaaatttttaagacttcatgtaaaagatgaaattggtgtatttgcaaaaattacttcgttattctctgagcgtggtgttagctttgaaaagattattcaaatgccgcttgaagagaaaggaaaggctgaaattgttattgtaacgcaccgtgcttctcttgctgattatgattatattctacatacgttgcaagggtatgaagaaatagattgtttgaaagcaaactatcgaattgaaggggatgcaaagtag

SEQ ID NO: 6359 - protein, 431 aa, Bacillus thuringiensis serovar konkukian str. 97-27
MKEIQVGLLGLGTVGSGVVRIITDHQERLIHQVGCPVKVTKVLVQNIEKEREVEVPSTLLTQDAHEILDNPNIDVVIEVMGGIDDAKAYILQALQSGKHVVTANKDLMALHGAELLAVAKDNKADLFYEASVAGGIPILRSIVEGLSSDLITKVMGIVNGTTNFILTKMSDEGRAYNDVLKEAQQLGFAEADPTSDVEGLDAARKMTILATLGFSTNVELGDVKVKGITSITEEDIEYSKSLGYTIKLIGLAKRDGEKLEVTVEPTLLPNTHPLAAVQNEYNAVYVYGEAVGETMFYGPGAGSLPTATAVVSDLVAVMQNIRLGVTGNSAVVPQYQKVLKEPDEIVVKKFLRLHVKDEIGVFAKITSLFSERGVSFEKIIQMPLEEKGKAEIVIVTHRASLADYDYILHTLQGYEEIDCLKANYRIEGDAK

SEQ ID NO: 6360 - DNA, 1314 bp, Acinetobacter sp. ADP1
  CDS (1)..(1314): transl_table=11
atggagtgtgacgtgaaaccagttcgtctggcaatactcggtcttggaaccgttggtggtggtgcccttaaactattacaagaaaacgctgctgaaattaaacgtcgcaccggtcgtgaaattcaaattacccatgtcggaacccgccgttctcgtccagatcttgagttggaaggtattcaacaaagcgatgacttgatgcatatcgtccgtcagccagatgtcgatgttgtggttgaagttatgggtggtatccatcctgcctacgaagtcatcatggaagcgatcaagcatggcaaacaggtcgttactgcaaataaagcactccttgcagagcatggtaatgagctgtttaaggcggctgaagataatgcagtacaagttgcatatgaagcagcagtggctggcggaatcccgattattaaagtgattcgtgaaggcttggcagcaaatagaattgaatggttggcgggtattattaacgggactggaaacttcatcctgaccgaaatgcgtgataaaggccgtgcctttacagatgtactaaaagaagcacaagagttagggtatgcagaagccgatcctacttttgatgttgaagggattgatgctgcacataaacttacgatcttggcatcatgcgcgtttggtattccacttcaatttgacaaggtgtataccgaaggtattagcaagattacagcgcaagatgtgaagtatgccgaagagcttggctttcgtatcaaacatctcgggattgcacgtcgtgttgaaaacggtatcgaattacgcgtacatccaaccctaattccagaagaagaattaattgccaatgtcaacggcgttaaaaatgccgtactggtgcaggcacacgctgtaggcccaacattgtactatggtgcaggtgcaggtgcaggcccaacagcatctgctgtggtagccgatatcgtggatattgtacgtgatatttcatataccgaagatggtgcggggaccattccacaactggcgtttgaagccttgactgatgtacctattttaaaacgcgaagaaatgacaacaggttattaccttcgtgtcgatgcagaagatcagacaggtgtgttggcagatatcaccaccatcttaagccgtgctggtattagtatcgatgcaattatgcagcagtcacgtttaaaagatcttatccctattgtaattctgactgatccagttgtggaatccaaaatggacgaagcacttgcaaaaattcaggctttacctgcaattcatggcgaaattgtgcgaattcgtttagaatcgcttgatagttaa

SEQ ID NO: 6361 - protein, 437 aa, Acinetobacter sp. ADP1
MECDVKPVRLAILGLGTVGGGALKLLQENAAEIKRRTGREIQITHVGTRRSRPDLELEGIQQSDDLMHIVRQPDVDVVVEVMGGIHPAYEVIMEAIKHGKQVVTANKALLAEHGNELFKAAEDNAVQVAYEAAVAGGIPIIKVIREGLAANRIEWLAGIINGTGNFILTEMRDKGRAFTDVLKEAQELGYAEADPTFDVEGIDAAHKLTILASCAFGIPLQFDKVYTEGISKITAQDVKYAEELGFRIKHLGIARRVENGIELRVHPTLIPEEELIANVNGVKNAVLVQAHAVGPTLYYGAGAGAGPTASAVVADIVDIVRDISYTEDGAGTIPQLAFEALTDVPILKREEMTTGYYLRVDAEDQTGVLADITTILSRAGISIDAIMQQSRLKDLIPIVILTDPVVESKMDEALAKIQALPAIHGEIVRIRLESLDS

SEQ ID NO: 6362 - DNA, 1326 bp, Propionibacterium acnes KPA171202
  CDS (1)..(1326): transl_table=11
atgacgaataccaccgattccgcgtcagcccagccgatacgcgtggccttgctggggtgcggggttgtggggtcccaggtggcccggatgattgaatcgaggacggaggatatcgccgctcgagtggggcggcaggtcgagctcgctggtattgctgtcgcccatcctgatcgcccgcgccagggccttgactcgcgtctttttaccgatgatcccacagtgctcgttaaccgggacgatgtggatatcgtcatcgagctcatcggtggcatcgaccctgcccgtcagctcctgacagctgccctcggcaaggggcactccgttgtgacggcgaataaggccctgttggcagctcacgggactgagttacacgctgtggccgagagcaacggcgtcgatctgtactacgaagctgcggtagccggggcaattccgatcgtccgcccgctgcgcgagtctcttgtcggagatcaaatcactcgtgttatgggcatcgtcaatggcacgaccaactacatccttgaccaaatgacgactacgggtgcccggttcgatgaagcccttgcccaggcgaaagctcaagggtatgccgaggccgatccgacggctgacgtggagggttatgacgctgcggctaaggctgcgctgctgtcgtcgcttgcgttccatactcagttgcgcggcgaccaggtgtatcgagaagggattaccgagatcaccccagatgacatcctcgctgcacatgatatggattgcgtcgtcaagctcttagctgtgtgccaggccggccccgacggtatttcggctcgcgtccatccggccctcgttcctgcaacccatcctttggggagtgtctcaggagccttcaacgcggtgttcatcgaagctcgtgaagccggacgcctcatgttccttggccctggagccggaggctctcccacggcatcagccgttatgggagacctcgtcactgtggcacgtaacctcgtgcgaggggttgctggtccgcctcaggacgtctacggggagttcccgatcttgcccatgtccgaggtccacacccggtttcacctacggttgcaagttcgtgacgagcccggtgtgctcgccgaagtcgcaaagatcttcgccagccacagggtgtccttgcagactgtgcaacagtctgcagtggagggtactgaccgcgctgatggatggtcagctaccctcaaggtcctcactcacgaagcccgagaatgtgacgtcgacgagtgcgtcaacgaactcaccggccatcactacgtcaactccgatcctcgtgttatccgagtggagggaatgtga

SEQ ID NO: 6363 - protein, 441 aa, Propionibacterium acnes KPA171202
MTNTTDSASAQPIRVALLGCGVVGSQVARMIESRTEDIAARVGRQVELAGIAVAHPDRPRQGLDSRLFTDDPTVLVNRDDVDIVIELIGGIDPARQLLTAALGKGHSVVTANKALLAAHGTELHAVAESNGVDLYYEAAVAGAIPIVRPLRESLVGDQITRVMGIVNGTTNYILDQMTTTGARFDEALAQAKAQGYAEADPTADVEGYDAAAKAALLSSLAFHTQLRGDQVYREGITEITPDDILAAHDMDCVVKLLAVCQAGPDGISARVHPALVPATHPLGSVSGAFNAVFIEAREAGRLMFLGPGAGGSPTASAVMGDLVTVARNLVRGVAGPPQDVYGEFPILPMSEVHTRFHLRLQVRDEPGVLAEVAKIFASHRVSLQTVQQSAVEGTDRADGWSATLKVLTHEARECDVDECVNELTGHHYVNSDPRVIRVEGM

SEQ ID NO: 6364 - DNA, 1356 bp, Leifsonia xyli subsp. xyli str. CTCB07
  CDS (1)..(1356): transl_table=11
atgatcgagtaccgcaacctccgggtcgccctgctgggcgccggatcggtcggttcgcaggtggcgcgcctgctgctggaccagggcgatgagttcgccgcgcgcgtgggcgcgaagctggagctggtcggcatcgcggttcgcgacctccacgccaagcgcaatgccgacctgccgcgcgatctgtacacgacggaagcgagcgcgctgatcctgggcgctgacatcgtggtggagctgatgggcggcatcgagccggcccgcgggtatgtacacgaagcgctcacttcgggcgccgacgtgatcacggcgaacaaggcgctgatggcgacgcacggccccgagctgttcgaggtcgccgagcaggtgggagcccagctctactacgaggccgccgtggccggggccataccgatcatccgaccgctgcgcgacagcctcgcgggcgaccgggtcaaccgcatcctgggcatcgtcaacggcacgaccaacttcatcctcgaccggatggacaccaccggtgagacactggccgacgctctcgctacggcgaccgcccgcggctacgccgaggccgacccgaccgcggacatcggcggctatgacgccgcgcagaaggccgccatcctcgcgagcctcgctttccacaccactgtgccgctcgaccgcgtgtaccgcgagggcatcacgagtgtgaccaaggagcaagtggatgcggctcgcgaggccggagccgtcatcaagctgctcgcgatctgcgagcggctcatcgaccccgagacgggcgaggaaggggtctccgcccgtgtccacccggccctcattggccgcgaccacccgctcgccgcggtgcatggcgcccacaacgcggtgttcgtgcaggcggcggcggcgggcgacctcatgttctacggcgcgggcgcgggcggtgtcgagacggcttctgcggtgctgggggatgtcgtgtccgccgcgcgtcgtcacgtcgtgggcgggccgggcgtcgccgagtcgacgcacgcggacatcccggtgctcgacatcggccgggtgatcacccgctaccagatcacgttggacgtgcccgaccagccgggcgtgctcgcggcggtcacgcgtatcctgagcgatggcggtgtcagcgtcgagacgatgcggcagtcggcgcccaccggcacgggcgtcgtcgtcctgccgggcacggcgccgattcacggcgctggggcacccaccgctaccctggtgatcggcacgcacgaggctgaggaggccgcgctggcggccaccgtcgaggcactcgcggccagcgatgccgtcttcgccatctcgtccgtcctccgagtcgaaggatactaa

SEQ ID NO: 6365 - protein, 451 aa, Leifsonia xyli subsp. xyli str. CTCB07
MIEYRNLRVALLGAGSVGSQVARLLLDQGDEFAARVGAKLELVGIAVRDLHAKRNADLPRDLYTTEASALILGADIVVELMGGIEPARGYVHEALTSGADVITANKALMATHGPELFEVAEQVGAQLYYEAAVAGAIPIIRPLRDSLAGDRVNRILGIVNGTTNFILDRMDTTGETLADALATATARGYAEADPTADIGGYDAAQKAAILASLAFHTTVPLDRVYREGITSVTKEQVDAAREAGAVIKLLAICERLIDPETGEEGVSARVHPALIGRDHPLAAVHGAHNAVFVQAAAAGDLMFYGAGAGGVETASAVLGDVVSAARRHVVGGPGVAESTHADIPVLDIGRVITRYQITLDVPDQPGVLAAVTRILSDGGVSVETMRQSAPTGTGVVVLPGTAPIHGAGAPTATLVIGTHEAEEAALAATVEALAASDAVFAISSVLRVEGY

SEQ ID NO: 6366 - DNA, 1308 bp, Desulfotalea psychrophila LSv54
  CDS (1)..(1308): transl_table=11
atgaaagaaatttgtgtaggaattataggttttggcacggtaggtagaggtcttgcagagacccttcgcatacagcaggaacgacttgaggcacgaatcggggcaaccattcgcctgaaaaccgtagcagatatcgcctgcaaaagcctgccagaggaatttgccggtgttaccctaacccagaatgccaccgatatttttactgatccagagattgatattgtcgtagaactcattggtggaattgaaccggcaaagacctttctcctccaggccattgaaaatggtaaacatgttattactgccaataaggccctcctttccacccacggcaaggaaatttttgaagctgctgtggccaaaaacgtagaggtaggttttgaggccagtgttggtggtggcattcctgtgatcaaggccctgaaagagggtctggtggctaaccgcattaactccatcaagggaattatgaacggtactgccaactacatcctctcacagatgaccgagcacggcacaccctttgccgaggtactgaaagaggcccaagagcttggctttgccgaagctgacccaacctacgatgtagagggtgtggatacagcccataagcttgccatccttatgaccatcgcctacggcttaaacgttaatatcgaccatattaatatagagggtatatccagcatagaacccgttgatatcgatattgcccgggaatttggttttgccatcaaacttctggccatcagcaataatcatggcgacaacgttgaagcccgtgtccatccgaccatggttccacactctcatatgttggcaaccataggtggcgcctttaacggcattcactttaacggcgacaccgtaaccgacgtcctcctctatggaccaggtgcaggcatgatgcctacgggtagtgccgttgcagccgatgttgccgatatcgcccgcaacatcctcagcgattcggtaaaccgggtgccggccctctcctatcagccagagagaatgaccgctccagttattactcctatgagtgagctggtatgtgcctactacttccgctttaccgtaagcagtgagcccggtgtactggcagccattgctactattttgggcaaatacaatatttctgtccagtctattgtccaaaaagaacttggcgaggaccaacctgtctatcttgtggtacgaagccacgatgcccaggaaagtgccgttaatgctgccatggccgagataagagtacttgacgcctgccttgccgaaccgctgaagatccgtattcttggcgcaaacgactaa

SEQ ID NO: 6367 - protein, 435 aa, Desulfotalea psychrophila LSv54
MKEICVGIIGFGTVGRGLAETLRIQQERLEARIGATIRLKTVADIACKSLPEEFAGVTLTQNATDIFTDPEIDIVVELIGGIEPAKTFLLQAIENGKHVITANKALLSTHGKEIFEAAVAKNVEVGFEASVGGGIPVIKALKEGLVANRINSIKGIMNGTANYILSQMTEHGTPFAEVLKEAQELGFAEADPTYDVEGVDTAHKLAILMTIAYGLNVNIDHINIEGISSIEPVDIDIAREFGFAIKLLAISNNHGDNVEARVHPTMVPHSHMLATIGGAFNGIHFNGDTVTDVLLYGPGAGMMPTGSAVAADVADIARNILSDSVNRVPALSYQPERMTAPVITPMSELVCAYYFRFTVSSEPGVLAAIATILGKYNISVQSIVQKELGEDQPVYLVVRSHDAQESAVNAAMAEIRVLDACLAEPLKIRILGAND

SEQ ID NO: 6368 - DNA, 1311 bp, Symbiobacterium thermophilum IAM 14863
  CDS (1)..(1311): transl_table=11
ttggagaaacagaccatgcggttcgccattctgggactcggcaccgtcggcaaaggggtggtgaagctcctgcaggagagccgggagatgctgcacctgaagaccggcctcaacctggagctggccaaggtgctggtgcgcgatgcctccaagccgcggcccggtttcgagggactcccgctgacggaggacgtgagcgagattctggacgatccttccatccgcatcgtggtggagctgatgggcggcatcgagccggcccggacctacctggtcgaggccctgaggcgcgggaagaccatcgtgaccgccaacaaggacgtgatggccgactacgacaaggacctgtacgacgccggtgagatcggcgatgccgagatctacttcgaggcgtccgtggggggcggcatccccatcatccggccgctgaaggaggccctggcggccaacacgatgcgccaggtgatgggcatcgtcaatgggacgaccaactacatcctgacccagatgagccagtacggcaggagttacgaggaggccctgcaggaggcgcaggccctgggctacgccgagcccgacccgaccaacgacgtccagggattcgacgccgcccgaaagctggccatcctctgcaccatctgcttcctctcccgggtcaagcccgggatggtctacaccgaggggatcacgcgcgtgacgccgcgcgacatcgagtacggccgccggttcggctgggtgctgaagctcctggccatcgggaaggaggtggacggcgagatcgaggcgcgggtccacccggcgttcatcccccacacccatcccctggccagcgtagccggatcgttcaacgccatctacaccgtgggcgatccggtcggcgagacgatgttctacgggcggggcgccggcgccggacccaccgcatcggccgtggtctccgacctgatcgccgccgcgctgtccaagcggacgccggggcggcgcgccggcgatgcccacaccgtctacttcgagaagcgggtcctgcccatcgaggagacccgcagccgctactacctgcggctgcacgcggtggacgcgcccggcagcctggcccggatcgccgagcggttcggcgagcacggggtctccctggccgaggtggtgcaggcctcgggcgggccagaccatcccgacgacggcggcgcagccgagctggtgctggtgacccacacggtgcaggacgccaacctccaggcggtggtccgcgacctgaaggagatgcgggacacggtgctccgggtggacaacgtgatccgcgtggagggttag

SEQ ID NO: 6369 - protein, 436 aa, Symbiobacterium thermophilum IAM 14863
MEKQTMRFAILGLGTVGKGVVKLLQESREMLHLKTGLNLELAKVLVRDASKPRPGFEGLPLTEDVSEILDDPSIRIVVELMGGIEPARTYLVEALRRGKTIVTANKDVMADYDKDLYDAGEIGDAEIYFEASVGGGIPIIRPLKEALAANTMRQVMGIVNGTTNYILTQMSQYGRSYEEALQEAQALGYAEPDPTNDVQGFDAARKLAILCTICFLSRVKPGMVYTEGITRVTPRDIEYGRRFGWVLKLLAIGKEVDGEIEARVHPAFIPHTHPLASVAGSFNAIYTVGDPVGETMFYGRGAGAGPTASAVVSDLIAAALSKRTPGRRAGDAHTVYFEKRVLPIEETRSRYYLRLHAVDAPGSLARIAERFGEHGVSLAEVVQASGGPDHPDDGGAAELVLVTHTVQDANLQAVVRDLKEMRDTVLRVDNVIRVEG

SEQ ID NO: 6370 - DNA, 1296 bp, Bacillus cereus E33L
  CDS (1)..(1296): transl_table=11
atgaaagaaattcaagttggtttattaggtcttgggacggttggtagcggtgtagttcgtatcattacagatcatcaagagcgacttatacaccaagtaggttgtcctgtgaaagtaacgaaagtactagtgcaaaatattgaaaaagagagagaagtagaggtaccctctactctattaacacaagatgcacatgaaattttagataatccaaatattgacgttgtcatcgaagtaatgggtggcattgatgacgcaaaatcatatattttacaagctttacaaagcgggaagcatgttgtgactgctaataaagatttaatggcgttacatggagcggaactcttagcggtagcaaaagttaataaagcagatttgttttatgaagcaagtgtagccggagggattccgattttacgaagtattgtagagggactttcttcagatcttattacgaaagtaatgggaattgtaaatggaacgacaaattttattttgacgaaaatgtcagatgaagggagagcatataacgacgtgttaaaagaagcccagcaacttggatttgcagaagcggatccaacatcagatgtagaaggtttagatgcagcaagaaaaatgacaattttggctacccttggtttctctacaaatgtagagcttggagatgtgaaggtaaaagggattacttctattacagaggaagatatcgaatacagtaagagtttaggatacacgattaaattaatcggtcttgcgaagcgagatggtgagaaattagaggttacagttgaaccgacattactaccaaatacacatcctcttgcggccgtgcaaaacgaatataacgctgtatatgtgtatggtgaagcagttggagaaacgatgttttatggaccaggtgcaggaagcttaccgacagcaaccgctgttgtttccgatttagtagctgtaatgcaaaatattagattaggagtaacaggaaatagtgctgtagttcctcaatatcaaaaggtattaaaagagccagatgaaattgttgtaaagaaatttttaagacttcatgtaaaagatgaaattggtgtatttgcaaaaattacttcgttattctctgagcgtggtgttagctttgaaaagattattcaaatgccgcttgaagagaaaggaaaggctgaaattgttattgtaacgcaccgtgcttctcttgctgattatgattatattctacatacgttgcaagggtatgaagaaatagattgtttgaaagcaaactatcgaattgaaggggatgcaaagtag

SEQ ID NO: 6371 - protein, 431 aa, Bacillus cereus E33L
MKEIQVGLLGLGTVGSGVVRIITDHQERLIHQVGCPVKVTKVLVQNIEKEREVEVPSTLLTQDAHEILDNPNIDVVIEVMGGIDDAKSYILQALQSGKHVVTANKDLMALHGAELLAVAKVNKADLFYEASVAGGIPILRSIVEGLSSDLITKVMGIVNGTTNFILTKMSDEGRAYNDVLKEAQQLGFAEADPTSDVEGLDAARKMTILATLGFSTNVELGDVKVKGITSITEEDIEYSKSLGYTIKLIGLAKRDGEKLEVTVEPTLLPNTHPLAAVQNEYNAVYVYGEAVGETMFYGPGAGSLPTATAVVSDLVAVMQNIRLGVTGNSAVVPQYQKVLKEPDEIVVKKFLRLHVKDEIGVFAKITSLFSERGVSFEKIIQMPLEEKGKAEIVIVTHRASLADYDYILHTLQGYEEIDCLKANYRIEGDAK

SEQ ID NO: 6372 - DNA, 1302 bp, Bacillus licheniformis ATCC 14580
  CDS (1)..(1302): transl_table=11
ttgaaggcgatacgagtggggctgctaggattaggaacagtcgggagcggtgtggtgaagattattcaggatcaccaggataagctgacacaccaagtcggatgccctgttacgattcaaaaagttcttgtaaaagataaagataagaagagggatgtcgagctttccaaagacgttctgacgactgaagcctatgatgtcattcaagatccagaagtagatgtcattatcgaggtcatcggggggatcgaggagacgagacgctatttgcttgacgcgcttcaggcgaagaaacacgtcgtgacagcgaataaagatttgatcgccctctatggatcggaactgacggctgccgcgaaagaaaacggctgcgacctttattttgaagcgagcgtcgccggcggaattccgattttgcgaagccttgaagacgggctggcttcagaccggattacgaagatgatgggcatcgtcaatggaacgaccaactttattttaacgaagatgaacaaagaaaacgcgccttatgacgaggtgctgaaagaagcgcaggagctcggcttcgcagaagcagacccgacagctgatgttgaaggtcttgatgccgcgagaaagatggcgattttggccaggctcggtttctcaatgaatgtcgaccttgacgatgtcaaagtgaaaggcatttcccaagtgtctgatgaagacatcaatttcagcaaacggctcggctatacgatgaagctgatcggcatcgctcagcgcgacggacaaaaagtcgaagtgagcgtccagccgacattgctgccggagcatcatccgctgtcttccgtccataatgaattcaatgcggtttacgtatacggcgaagccgtaggggaaacgatgttttacggacctggcgccggaagcatgccgactgcaaccgccgtcgtgtcagatttggtctccgtcatgaaaaacatgcgtcttggcgtgaacggcagcagctttgtcgatccgcagtttgaaaagaagataaaggcgccgtctgaaatctttgcccagcagtttttaagaattcatgtcaaagaccaggttggttcgttttcgaaaatcacatcgattttttcagaaagaggcgtcagctttgaaaagatccttcagcttccgattaaaggccatgacgacctggctgagattgtcattgtgacacatcatacgtcagaagaggattttacggatatcctgcaaaagctgaacgatcttgaggttgttcatcaggtgaaaagcacttatcgagtagaagggaacggttggagctaa

SEQ ID NO: 6373 - protein, 433 aa, Bacillus licheniformis ATCC 14580
MKAIRVGLLGLGTVGSGVVKIIQDHQDKLTHQVGCPVTIQKVLVKDKDKKRDVELSKDVLTTEAYDVIQDPEVDVIIEVIGGIEETRRYLLDALQAKKHVVTANKDLIALYGSELTAAAKENGCDLYFEASVAGGIPILRSLEDGLASDRITKMMGIVNGTTNFILTKMNKENAPYDEVLKEAQELGFAEADPTADVEGLDAARKMAILARLGFSMNVDLDDVKVKGISQVSDEDINFSKRLGYTMKLIGIAQRDGQKVEVSVQPTLLPEHHPLSSVHNEFNAVYVYGEAVGETMFYGPGAGSMPTATAVVSDLVSVMKNMRLGVNGSSFVDPQFEKKIKAPSEIFAQQFLRIHVKDQVGSFSKITSIFSERGVSFEKILQLPIKGHDDLAEIVIVTHHTSEEDFTDILQKLNDLEVVHQVKSTYRVEGNGWS

SEQ ID NO: 6374 - DNA, 1311 bp, Methylococcus capsulatus str. Bath
  CDS (1)..(1311): transl_table=11
ttgaacccggtaaaaatcggcatcctcggcctcggcacggtcggcggcggcacggtcaacgtgttgcggcgcaatgccgacgaaatcacccgccgcgccggccgcgagatccaggtctgccgcgcctcgacccgcgacctgacgcgctcccgcatctgcgacaccaccggcatcgccctgaccgacgatccctacgagatcgtctccgaccccgacatccagatcgtggtcgagaccatcggcggcgagacgccggcgcgggatctggtcatgaaggcgctggcaaacggcaagcacgtcgtcaccgccaacaagatgctgatcgccctgcacggcaacgaaatcttcgccgccgcccgcgaacgcggcctgatggtcgccttcgaagccgccgtggccgggggcatccccatcatcaagaccatccgcgagggactggcgggcaacaaggtcgaatggctggccggcatcatcaacggcaccagcaacttcatcctcaccgagatgtgggaaaagggccgcgacttcgccgacgtcctgcaggaagcccagcggctgggctacgccgaagccgatccgaccttcgacatcgagggggtggacgccgcccacaagctcaccatcctggcatcgatcgccttcggcatcccgctccagttcggcaaggtctacatcgagggcatcaccggcatcaccgcggccgacgtcaaatacgccgaggcactgggttaccgcatcaaactgctcgggatcgcccgccgcacccccaagggcatcgaactgcgggtccaccccaccttgattccggcgcgccggctgatcgccaacgtcaacggtgtgatgaacgccgtactgatcaagggcgacgccgtggggcccaccctgcactacggcgcgggcgccggggccgaaccgaccgcctccgcggtggtcgccgatatcgtcgacgtggtccgcaccctgacctccgatcccgaaaaccgggtgccacacctggccttccagcccgccgcgatctccgagatcccgatcctgccgatcgaagcgatcgagaccgcctattacctgcggctctctgccgaggacaagcccggggtgctggccgacgtgacccgcatcctcgccgcccaccacatcagcatcgaagccgtgctgcagaaggagatgccggagggcgagagccatctgccagtgatcatgctgacgcagaaggtcaccgagcgcgaacttaacgccgccgtgcgggaaatcgaggcgctaccgacgatcaagggcgcggtcaaacgcatccggctcgaaacgctgggttga

SEQ ID NO: 6375 - protein, 436 aa, Methylococcus capsulatus str. Bath
MNPVKIGILGLGTVGGGTVNVLRRNADEITRRAGREIQVCRASTRDLTRSRICDTTGIALTDDPYEIVSDPDIQIVVETIGGETPARDLVMKALANGKHVVTANKMLIALHGNEIFAAARERGLMVAFEAAVAGGIPIIKTIREGLAGNKVEWLAGIINGTSNFILTEMWEKGRDFADVLQEAQRLGYAEADPTFDIEGVDAAHKLTILASIAFGIPLQFGKVYIEGITGITAADVKYAEALGYRIKLLGIARRTPKGIELRVHPTLIPARRLIANVNGVMNAVLIKGDAVGPTLHYGAGAGAEPTASAVVADIVDVVRTLTSDPENRVPHLAFQPAAISEIPILPIEAIETAYYLRLSAEDKPGVLADVTRILAAHHISIEAVLQKEMPEGESHLPVIMLTQKVTERELNAAVREIEALPTIKGAVKRIRLETLG

SEQ ID NO: 6376 - DNA, 1311 bp, Azoarcus sp. EbN1
  CDS (1)..(1311): transl_table=11
atgaaaccgatcaatgttggcctgctgggcatcggtaccgtcggcggcggtaccttcaccgttctgaagcgcaacgaggaagaaatcacccgtcgcgccggtcgcccgatccgcatcaccgcagtggccgacaagaatctcgaactcgcgcgcaaggtcgcgggcgccgacgcgcgactgaccgacgacgcattctcggtcgtcgccgacccggaaatcgacatcgtcgtcgaactgatcggcggctacggcgtcgcgaaggaactggtgctggccgcgatcgagaacggcaagcatgtcgttaccgcgaacaaggcgctgctcgcggtgcacggcaacgagatcttcgccgccgcgcaatcgaggggcgtcatggtcgcgttcgaggcggcggttgccggcggcatcccgatcatcaaggcgctgcgcgaaggcctgtcggcgaaccgcatccagtggctcgccggcatcatcaacggcacgacgaacttcatcctgtcggagatgcgcgacaagggcctgccgttcgccgatgtgctcaaggaggcgcaggcgctcggctacgccgaggccgatccgactttcgatatcgaaggcgtcgacgccgcgcacaaggcgacgatcatgagcgcgatcgcgttcggcgtgccgatgcagttcgacgccgcgcacgtcgaaggcatcacgaagctcgacagcatcgacatccagtacgtggagcagctcggctaccgcatcaagctgctcggcatttcgcggatgcgcccggaaggcatcgagctgcgcgtgcatccgacgctgatcccggccaagcggctgatcgcgaacgtcgaaggcgcgatgaacgccgtcgtcgtccatggcgacgccgtcggcgcgacgctgtattacggcaagggcgcaggtgccgagccgaccgcgagcgcggtgatcgccgacctcgtcgacgtcacccgcctgcacactgcagaccccgagcaccgcgtgccgcatctcgcgttccagccggaccaggtacgcgacctcaaggtgctgccgatcgaagaggtcgtgacctcgtattacctgcgcatgcgcgtcgaggacaagccgggcgtgctggccgacatcacgcggatactggccgatagcggcatctcgatcgaagcgatgatccagaaggaagcgccggaaggcgcgtcgcagaccgacatcatcatgctgacccacagcacgatcgagaagaacgccaacgcggcgatcgcgaagatcgaggccttgccggtcgtgcagggcaggatcacgcgcctgcgcatggaaagcctgcagtaa

SEQ ID NO: 6377 - protein, 436 aa, Azoarcus sp. EbN1
MKPINVGLLGIGTVGGGTFTVLKRNEEEITRRAGRPIRITAVADKNLELARKVAGADARLTDDAFSVVADPEIDIVVELIGGYGVAKELVLAAIENGKHVVTANKALLAVHGNEIFAAAQSRGVMVAFEAAVAGGIPIIKALREGLSANRIQWLAGIINGTTNFILSEMRDKGLPFADVLKEAQALGYAEADPTFDIEGVDAAHKATIMSAIAFGVPMQFDAAHVEGITKLDSIDIQYVEQLGYRIKLLGISRMRPEGIELRVHPTLIPAKRLIANVEGAMNAVVVHGDAVGATLYYGKGAGAEPTASAVIADLVDVTRLHTADPEHRVPHLAFQPDQVRDLKVLPIEEVVTSYYLRMRVEDKPGVLADITRILADSGISIEAMIQKEAPEGASQTDIIMLTHSTIEKNANAAIAKIEALPVVQGRITRLRMESLQ

SEQ ID NO: 6378 - DNA, 1287 bp, Silicibacter pomeroyi DSS-3
  CDS (1)..(1287): transl_table=11
atgaaaccggcattgcggcttgggatcgcgggattgggaaccgtgggcgtcggcgttgtgcgcatcatccgccgtcaggccgatctgctggaggcgcgtaccgggcgccgcatcgaaatcaccgccatctcggcccgcgacgcgggcaaggaccggggcgtcaacctgtcctcctacgcctgggagagcgacccggtcgcgttggcccgccgcgacgatgtcgatgtgttcgtcgaactgatgggtggcgagaacggccccgccaaggcctcgatcgaggcggcgctggaaacgggcaaggacgtggtcaccgccaacaaggcgctgctggccatccatggtcaggcgctggccgaacaggccgaggccgcgggccgggtgatccggttcgaggccgccgtcgccggcggcatcccggtgatcaaggcgctgaccgaagggctggccggcaacgagatcacccgcgtgatgggcgtcatgaacggcacctgcaactatatcctgacccgcatggaatcgcagcgtaaaggctataacgcgctgtttcaggaatgcgccgaactgggctatctcgaggccgacccgacgcttgacgtgggcgggatcgacgccgcgcacaagctggcgctgctggccgccatcgcctttggcaccaaaccgcatttcgacgggatcgacatcgaggggatcgagcgcatcaacctcgaagacatcgcctatgccgcggacatgggctatcgcatcaagctgctgggtgtggcccagcgcagcgggcgcgggctggaacagcggatgcggccctgcctggtgccggcggactcgccgctgggccagctcgagggcggtaccaatatggtggtgatcgaaggtgacgccgtggaacagatcgtgctgcgtggccccggcgcgggcgaaggccccaccgccagcgccgtgctgggcgatatctgcgatatcgcgcgcggcttccgcctgccggtgttcggccagcccgccaccgcgctggccgaggccgacagtgcccaatcgaactctccggccccctattacctgcgtctgctgttgcccgatcgtccgggcgcgctggccaaggtggctgccgcgttgggcgatgccggggtcagtataaaccggatgcgccagaccggccacgacagcgccgaggcgccggtggtgatcgtcacccacaagacccagcgcgccgacctcgacgcagcgctggaggccatgacggcggcgggtgttctggccgccgaaccggtggcgctgaggatcgaggcggtctga

SEQ ID NO: 6379 - protein, 428 aa, Silicibacter pomeroyi DSS-3
MKPALRLGIAGLGTVGVGVVRIIRRQADLLEARTGRRIEITAISARDAGKDRGVNLSSYAWESDPVALARRDDVDVFVELMGGENGPAKASIEAALETGKDVVTANKALLAIHGQALAEQAEAAGRVIRFEAAVAGGIPVIKALTEGLAGNEITRVMGVMNGTCNYILTRMESQRKGYNALFQECAELGYLEADPTLDVGGIDAAHKLALLAAIAFGTKPHFDGIDIEGIERINLEDIAYAADMGYRIKLLGVAQRSGRGLEQRMRPCLVPADSPLGQLEGGTNMVVIEGDAVEQIVLRGPGAGEGPTASAVLGDICDIARGFRLPVFGQPATALAEADSAQSNSPAPYYLRLLLPDRPGALAKVAAALGDAGVSINRMRQTGHDSAEAPVVIVTHKTQRADLDAALEAMTAAGVLAAEPVALRIEAV

SEQ ID NO: 6380 - DNA, 1302 bp, Bacillus clausii KSM-K16
  CDS (1)..(1302): transl_table=11
gtgggggaacgagcgattcaagttggccttttaggcttagggacggttggcactggcgtagtgtcgattgtggaacggcatcaaaatgaattggcgcaccaagccggaaggccagtcgcgataaaaaaagcactcgtcaaacaaatagataaagtgcgaggatctgaagtaaacggtgtcgaattgacaacaaatccagaagatattcttgacgacccagatttggatgttgtcatcgaagtcatgggcggagtaagcgagacgaagcaactgcttgaaaaagccattcgccagaaaaagcatattgttacggccaacaaagacctcatggctgaatggggtgcttcgctgctcgcgcttgcggccgagcaaggggtggacgtttattatgaagcgagcgtagctggaggcatcccgattttgcggacgatcacggaagggttgtcggctgaccggattacaaaaatgatgggaattgtcaatggcacgaccaactatatattaacgaagatgagccaggaaaaccgctcctatgaagatgtactcaaggaagcgcaagagctggggtttgctgaagcggatccaactgctgacgtagaagggctggatgcagctaggaaaatggcgattttagcgacgctcggcttttcagcgcctgtccagcttagtgatgtcgccgtgaaaggaatcaccaatgtatcgggcaaagacttgcatttttgcgagcaactcgggcttacgatgaagttgatcggcgtcgccaaaagagatgaggggcggttggaagtatgtgttgaaccaacacttttgccatctgaccacccactagccagcgtacaaaatgaatacaatgctgtctttgtccacggggaagccgttggcgaaacgatgttttacgggcctggagctggctcattgccgactgcaactgcagtcgtaagcgacctcgtgtcggtcatgaaaaatatgcgccatcgcgtcaatggctacgcggccatgaagccattgtacgaagcagtgtttaaagaagagcaggaaaagcaatcacagttttttattcgcctgcatgtagaagaccgaactggtacgttttcaagcattacgtcgttatttgctagatacgacgtcagctttgaaaagcttttgcagcttccactggaagaggaacaaatggcggaaattgtcatcattacacatgtaaccaatcgtgctgtatataaggaattaatggaagagcttgagcagctagatgtggttaaaacgatagcaagctcgtaccgagttgagggaggaaaaggataa

SEQ ID NO: 6381 - protein, 433 aa, Bacillus clausii KSM-K16
MGERAIQVGLLGLGTVGTGVVSIVERHQNELAHQAGRPVAIKKALVKQIDKVRGSEVNGVELTTNPEDILDDPDLDVVIEVMGGVSETKQLLEKAIRQKKHIVTANKDLMAEWGASLLALAAEQGVDVYYEASVAGGIPILRTITEGLSADRITKMMGIVNGTTNYILTKMSQENRSYEDVLKEAQELGFAEADPTADVEGLDAARKMAILATLGFSAPVQLSDVAVKGITNVSGKDLHFCEQLGLTMKLIGVAKRDEGRLEVCVEPTLLPSDHPLASVQNEYNAVFVHGEAVGETMFYGPGAGSLPTATAVVSDLVSVMKNMRHRVNGYAAMKPLYEAVFKEEQEKQSQFFIRLHVEDRTGTFSSITSLFARYDVSFEKLLQLPLEEEQMAEIVIITHVTNRAVYKELMEELEQLDVVKTIASSYRVEGGKG

SEQ ID NO: 6382 - DNA, 1302 bp, Dehalococcoides ethenogenes 195
  CDS (1)..(1302): transl_table=11
atggaaaaagagtatataggggtaggagtaataggtctgggagtagtagccggacaggtgtccaaagtgctccatgagagggaggaattcctttctgcccagctgggcttccccctgaaactgaaaaaggtaaaggttctccctcaggatatgagccgccccctggcaaagcttttgcccgaaggggtgctgactactgatgaagatgacttttttaatacccccggtctggatattgtggttgaggctatcggcggggaataccccgctttcaacctgctttcccgcgggctgaaaatgggtaaatgcgtggttacttccaataaagaggttattgccaagcatgctccggaactggtcaaactggccagggaaaataataccggcctgcgctgcgaagccagcgtgggcgggggaataccgcttatctcgccttttcagtatgatttagccgccaaccatataaacggcatttatgccattatcaacgggactaccaactatatcctgacccgtatggccaaagaagggctggactttgagactgccctgaaacaggcccagtctctgggttatgccgaagccaacccgtctaatgacatagaaggcacggatgctgtttataaactggccattatggcttccataaactttcagtgtaaggttaaaccggaagatatttaccgtgaaggtatttcccgcctgaccagccgtgatttctgctatgcggatgagcttgggtttaacataaaactgctggctataacaaaacccggcaacggtcagatagaagccagggttcacccggtctttttgcccaaggatgaatggctggccaaggtggacggggttttcaatgccgtattggtagagggtgatttagtcgggccggtgctctttcagggccagggggcaggtgcttcggccacttccagtgcggtggtggcggatgtgctggcggcggcgcaggatatccacctgggggtgggtaaccggatgcgctggaatatggacaaacctctgggcgtaaaacccatgagcgatattctcacccgttattacctgcggatgacagtgaccgattcaccgggtgtgctggcccttattgccagagtactgggtgaccataatatcagcatttcgtcggtaatccagaaagaaacagacgaagaaaacctgactgccgagatagttatcatgacccaccccgccaaagaagcctttgtccagcaggcgctggtggagctgggcgggctggataaagtaaaggatataaataattttgttcgggtaggtatttag

SEQ ID NO: 6383 - protein, 433 aa, Dehalococcoides ethenogenes 195
MEKEYIGVGVIGLGVVAGQVSKVLHEREEFLSAQLGFPLKLKKVKVLPQDMSRPLAKLLPEGVLTTDEDDFFNTPGLDIVVEAIGGEYPAFNLLSRGLKMGKCVVTSNKEVIAKHAPELVKLARENNTGLRCEASVGGGIPLISPFQYDLAANHINGIYAIINGTTNYILTRMAKEGLDFETALKQAQSLGYAEANPSNDIEGTDAVYKLAIMASINFQCKVKPEDIYREGISRLTSRDFCYADELGFNIKLLAITKPGNGQIEARVHPVFLPKDEWLAKVDGVFNAVLVEGDLVGPVLFQGQGAGASATSSAVVADVLAAAQDIHLGVGNRMRWNMDKPLGVKPMSDILTRYYLRMTVTDSPGVLALIARVLGDHNISISSVIQKETDEENLTAEIVIMTHPAKEAFVQQALVELGGLDKVKDINNFVRVGI

SEQ ID NO: 6384 - DNA, 1308 bp, Neisseria gonorrhoeae FA 1090
  CDS (1)..(1308): transl_table=11
atgaagccagtaaacatcggtcttttaggcttaggtacggtcggcggcggtgcggctgccgtgttgcgggacaacgcagaggaaatttcccgccgcttggggcgcgaaatccgtatttctgccatgtgcgacttaagcgaagaaaaagcccgccaaatctgcccgtccgccgcctttgtcaaagatccgttcgaactggtcgcgcgtaaagacgtcgatgtcgtcgtcgaattgttcggcggcacgggcattgccaaagaagcggtgttgaaagccattgaaaacggcaaacacatcgttaccgccaacaaaaaactgctcgccgaatacggcaacgaaatcttcccgctggcggaaaaacaaaacgtcatcgtccaatttgaagcggcagtagcgggcggtatcccaatcatcaaagccctgcgcgaaggtttggcggcaaacaggattaaatccatcgccggcattattaacggcaccagcaacttcatcctctccgaaatgcgcgaaaaaggcagcgcgtttgccgacgtattgaaagaagcgcaggcattgggttatgccgaagccgacccgaccttcgacatcgaaggcaacgacgcaggccataaaatcaccatcatgagcgcgctggcattcggtacgccgatgaacttctccgcctgctatctcgaaggcatcagcaaactcgacagccgcgacatcaaatacgccgaagaactcggctaccgcatcaaactgttgggcgtcacccgcaaaaccggcaaaggcatcgaattgcgcgtccatccgaccctgattcccgaaagccgcctcttggcaaacgtcgacggcgtgatgaacgccgtgcgcgtcaacgccgatatggtcggcgaaaccttatattacggcgcgggcgcgggcgcattgccgaccgcttccgccgtggttgccgatatcatcgacatcgcccgcctggttgaagccgacaccgcccaccgcgtaccgcatctggcgttccaacccgcccaagtccaagcgcaaaccatcctgcctatggacgaaattaccagcagctactacctgcgcgtccaagccaaagacgaaccgggcacgctggggcaaatcgccgcgctgttggcacaagaaaacgtgtccatcgaagccttaatccaaaaaggcgttatcgatcagaccactgccgaaatcgtgattctgacccacagcacggtcgaaaaacacatcaagtcggcaatcgcagccatcgaagcactggattgtgtggaaaaaccgattaccatgatccgcatggaaagcctgcatgactga

SEQ ID NO: 6385 - protein, 435 aa, Neisseria gonorrhoeae FA 1090
MKPVNIGLLGLGTVGGGAAAVLRDNAEEISRRLGREIRISAMCDLSEEKARQICPSAAFVKDPFELVARKDVDVVVELFGGTGIAKEAVLKAIENGKHIVTANKKLLAEYGNEIFPLAEKQNVIVQFEAAVAGGIPIIKALREGLAANRIKSIAGIINGTSNFILSEMREKGSAFADVLKEAQALGYAEADPTFDIEGNDAGHKITIMSALAFGTPMNFSACYLEGISKLDSRDIKYAEELGYRIKLLGVTRKTGKGIELRVHPTLIPESRLLANVDGVMNAVRVNADMVGETLYYGAGAGALPTASAVVADIIDIARLVEADTAHRVPHLAFQPAQVQAQTILPMDEITSSYYLRVQAKDEPGTLGQIAALLAQENVSIEALIQKGVIDQTTAEIVILTHSTVEKHIKSAIAAIEALDCVEKPITMIRMESLHD

SEQ ID NO: 6386 - DNA, 1392 bp, Pseudomonas syringae pv. syringae B728a
  CDS (1)..(1392): transl_table=11
gtgtcgtcaaaatttcagccgcatggcgccatgcggcagtttttccacagccgattcaggttcggctgtttttcggggagttcatcagtgaaaccggtcaaagtaggcatatgtgggctgggtactgtcggtggcggtaccttcaacgtacttcagcgtaacgccgaggagattgcccgccgtgccgggcgtggaatcgaagtggcgcaaattgcggttcgtacaccaaatcccaattgccagattaccggtacgccgaccaccagcgatgtgtttgccattgcgaccaaccctgaaatcgacatcgtcgtagaattgatcggcggctataccgttgcccgcgaactggtcctcaaggccatcgaaaacggcaagcacgtggtgaccgccaacaaggcgctgatcgcggtgcatggcaacgaaatcttcgccaaggcgcgtgagaagggcgtgatcgtcgcttttgaagcagcggttgccggtggcatcccggtcatcaaggccattcgtgaaggcctgtcggcgaaccgtatcaactgggttgccggcatcatcaacggcaccggcaacttcatcctcaccgaaatgcgcgagaagggccgtacctttgccgatgttctggccgaagctcaggccctgggttatgccgaagccgatccgaccttcgacgttgaaggtatcgacgcggcgcacaaactgaccattctggcatccattgccttcggcattccgctgcagttcgacaaggcctacaccgaaggcattaccaaactgaccactgcagacgtcaattatgccgaagcgctgggctatcgcatcaaacacctgggcgttgcacgcagcacggctcaaggcatcgaactgcgcgtacacccgaccctgatcccggccgatcgcctgatcgccaacgtcaacggcgtcatgaatgccgtgatggtcaatggcgatgcgtccggctcgacgctgttctacggcgcgggtgccggtatggagcctaccgcgtcttcggtggtggccgatctggtcgatgtggtccgtgcgatgacctccgatccggaaaaccgggtccctcatctggccttccagcccgattcgttgtccgcccacccgatcctgccgatcgaagcctgcgaaagcgcctactacctgcgcattcaggccaaggatcacccgggtgtgctggctcaggtcgcgagcatcctgtccgagcgcggcatcaacatcgaatcgatcatgcaaaaggatgtcgaagaacacgatggcctggtgccgatgatcctgttgacccaccgggtagtggagcagcgtatcaatgacgccattcaagccctggaagcgttgcaggatgtggtgggcccggtagtccgtattcgcgtcgaacatcttaattaa

SEQ ID NO: 6387 - protein, 463 aa, Pseudomonas syringae pv. syringae B728a
MSSKFQPHGAMRQFFHSRFRFGCFSGSSSVKPVKVGICGLGTVGGGTFNVLQRNAEEIARRAGRGIEVAQIAVRTPNPNCQITGTPTTSDVFAIATNPEIDIVVELIGGYTVARELVLKAIENGKHVVTANKALIAVHGNEIFAKAREKGVIVAFEAAVAGGIPVIKAIREGLSANRINWVAGIINGTGNFILTEMREKGRTFADVLAEAQALGYAEADPTFDVEGIDAAHKLTILASIAFGIPLQFDKAYTEGITKLTTADVNYAEALGYRIKHLGVARSTAQGIELRVHPTLIPADRLIANVNGVMNAVMVNGDASGSTLFYGAGAGMEPTASSVVADLVDVVRAMTSDPENRVPHLAFQPDSLSAHPILPIEACESAYYLRIQAKDHPGVLAQVASILSERGINIESIMQKDVEEHDGLVPMILLTHRVVEQRINDAIQALEALQDVVGPVVRIRVEHLN

SEQ ID NO: 6388 - DNA, 1305 bp, Pseudomonas fluorescens Pf-5
  CDS (1)..(1305): transl_table=11
gtgaatccggtcaaagtaggcatctgtgggctgggtactgtcggtggcggtaccctaaacgtacttcagcgcaacgccgaggagattgcccgccgtgccgggcgtggaatcgaagtagcgcagattgctacccgtacgccaaagccgcagttccaaacgaccggtattgcgattaccaacgatgtcttcgccgtggccaccaaccctgaaatcgatatcgtcatcgagctggtgggcggctacaccgtggcccgtgacctggtgctcaaggccatcgagaacggcaagcacgtggtcaccgcgaacaaggcgctgatcgccgtgcacggcaacgaaatcttcgccaaggcccaggagaagggcgtgatcgtcgctttcgaagccgccgttgccggtggcatcccggtgatcaaggcgatccgcgaaggcctctcggccaaccgtatcaactggctggcggggatcatcaacggcaccggtaacttcatcctctcggaaatgcgcgagaagggccgcacctttgaagacgtgctggccgaagcccaggccctgggctacgccgaagccgacccgaccttcgacgtcgaaggcatcgatgccgcgcacaagctgaccatcctggcctccatcgcctttggtatcccgctgcagttcgacaaggcctacaccgaaggcatcaccaagctcaccaccgccgacgtgaactacgccgaggccctgggctaccgcatcaagcacctgggtgtggcgcgccgcaccgaggccggtatcgagctgcgggtgcacccgaccctgattccggccgatcgcctgatcgccaacgtcaacggtgtgatgaacgcggtcatggtcaatggcgatgctgccggttcgaccctgttctacggcgccggcgcgggcatggagccgaccgcttcctcggtggtggccgacctggtggacgtggttcgcgccatgaccagtgacccggaaaaccgcgtgccgcacctggcgttccagcctgactcgctatcggatcatccgatcctgccgatcgagtcctgcgagagcgcctactacctgcgcatccaggccaaggatcacccgggcgtactggcccaggtggcgagcatcctctcggagcgcggcatcaacatcgaatcgatcatgcagaaggaagtggaagagcaggacggcctggtgccgatgatcctgctgacccaccgtgttctggagcagcacatcaacgatgcgatcaccgccctggaggccctgcagggcgtcgttggcccggtggtgcgtatccgcgtcgaacatttgaattaa

SEQ ID NO: 6389 - protein, 434 aa, Pseudomonas fluorescens Pf-5
MNPVKVGICGLGTVGGGTLNVLQRNAEEIARRAGRGIEVAQIATRTPKPQFQTTGIAITNDVFAVATNPEIDIVIELVGGYTVARDLVLKAIENGKHVVTANKALIAVHGNEIFAKAQEKGVIVAFEAAVAGGIPVIKAIREGLSANRINWLAGIINGTGNFILSEMREKGRTFEDVLAEAQALGYAEADPTFDVEGIDAAHKLTILASIAFGIPLQFDKAYTEGITKLTTADVNYAEALGYRIKHLGVARRTEAGIELRVHPTLIPADRLIANVNGVMNAVMVNGDAAGSTLFYGAGAGMEPTASSVVADLVDVVRAMTSDPENRVPHLAFQPDSLSDHPILPIESCESAYYLRIQAKDHPGVLAQVASILSERGINIESIMQKEVEEQDGLVPMILLTHRVLEQHINDAITALEALQGVVGPVVRIRVEHLN

SEQ ID NO: 6390 - DNA, 1347 bp, Psychrobacter arcticus 273-4
  CDS (1)..(1347): transl_table=11
gtgagcaaatccatcaaactagcgatacttggtttaggcaccgtcggaacgggtgtggtcaatctaatcaatgataatttagatgaactaaaacgtcgtagcggacgcgacattgtgattaccgaagttggtattcgtcgtcagcgtgatgatatcgatcctaatattatacaaaacagcgatttgatggcaaccgctgccagtgacaatgtcgatattgtcatcgagttgattggcggtacgacccttgccaaagacgttgttatgcacgccatcaaaaacggcaagcatgtcgtaacggccaacaaagcgctactggctgagcatggcaacgagatttttgcctttgctgaacagcataacgtccatgtcgcctatgaagcagccgtagcaggtggtattccgattattaaagtcatgcgtgaaggcttagccgccaataaaattgattggctagcaggcattattaatggtacgggcaactttattatgacggagatgcgcgataaaggtcgcccatttgccgatgtattgagcgaggcgcaagcacttggttatgctgaagcagatcctacctttgatgtcgaaggtatcgatgcggcgcacaaactggcgctacttgcctctattgcttttggtattccactacagtttgataaagtctactgtgaaggcatcaccggtattactttgcaggatgtcaattacgccgaagagcttggctatcgcatcaagcatttaggcttcgctgttcgccgtgcgggcaatggcagcggtgacgacagcgccggtattgagctgcgtgtacacccaacgctgattccacaaaacgccctgcttgccaacgttaatggcgtaaaaaatgccgtattggtgaactcccatcctctcggtcagacgttatattgtggtgatggcgcgggtgcgggtgcgacagcttctgcagtgatggcagatgtcatggatttagtgcgtgttttaggatgcaaagatgctgaccaacaaaacagcaatggtcatcatgtgccgcacttagcctttatccctgaaaaattgtcagatacgccgatattgcgtgctgaacagatgattaccggatactatttacgggtacatgcgtacgatagtcctggcgtattggcagacatcacccgtatcttgagtgatgccggtatcaatatcgatgctattttacaaaaacctgcgcataagcttgggcaagtgccggtgattatcttaacgctgcctgtggttgagagtcagatgaatcttgccatcgaaaaaatcgagaaattagataccattactgataaagtggtacgcatacgcttagatgagctggcgtag

SEQ ID NO: 6391 - protein, 448 aa, Psychrobacter arcticus 273-4
MSKSIKLAILGLGTVGTGVVNLINDNLDELKRRSGRDIVITEVGIRRQRDDIDPNIIQNSDLMATAASDNVDIVIELIGGTTLAKDVVMHAIKNGKHVVTANKALLAEHGNEIFAFAEQHNVHVAYEAAVAGGIPIIKVMREGLAANKIDWLAGIINGTGNFIMTEMRDKGRPFADVLSEAQALGYAEADPTFDVEGIDAAHKLALLASIAFGIPLQFDKVYCEGITGITLQDVNYAEELGYRIKHLGFAVRRAGNGSGDDSAGIELRVHPTLIPQNALLANVNGVKNAVLVNSHPLGQTLYCGDGAGAGATASAVMADVMDLVRVLGCKDADQQNSNGHHVPHLAFIPEKLSDTPILRAEQMITGYYLRVHAYDSPGVLADITRILSDAGINIDAILQKPAHKLGQVPVIILTLPVVESQMNLAIEKIEKLDTITDKVVRIRLDELA

SEQ ID NO: 6392 - DNA, 1305 bp, Pseudomonas syringae pv. phaseolicola 1448A
  CDS (1)..(1305): transl_table=11
gtgaaaccggtcaaagtaggcatatgtgggctgggtactgtcggtggcggtactttcaacgtacttcagcgtaacgccgaggagatcgcccgccgtgccgggcgaggaatcgaagttgcgcaaattgcggttcgtacaccaaaccccaactgccagattgccggtacgcctactaccagtgatgtgtttgccgttgcgaccaaccctgaaatcgacatcgtcgttgaattgatcggtggctacaccatcgcccgtgatctggtgctcaaggccatcgagcatggcaagcacgtagtgaccgccaacaaggcgctgatcgcagttcacggcaacgagattttcgccaaggcacgtgaaaagggcgtaatcgtagcctttgaggcggctgtcgctggtggcatcccagtgatcaaggccatccgtgaggggctgtcggcaaaccgtatcaattgggttgcaggcattatcaacggcactggcaacttcatcctcaccgaaatgcgcgagaagggccgtaccttcccggatgttctggccgaagcccaggcgctggggtatgcagaggctgatccgaccttcgacgttgagggtatcgatgcagcgcacaagctgaccattctggcctccattgccttcggcatcccgttgcagttcgacaaggcctacaccgaaggcatcaccaaactgaccaccgccgacgtgaattacgccgaggcgctgggctatcgcatcaagcacctgggcgttgcacgcagcacggcccaaggcatcgaactgcgcgtacacccgacgctgatcccggccgatcgcctgattgccaacgtcaatggcgtgatgaacgcggtgatggtcaatggcgatgcgtccggctcgacgctgttctacggtgccggtgccggtatggagcctacggcttcctccgtggtggccgatctggtggacgtggtgcgggcgatgacctccgatccggaaaaccgtgtgccgcatctggccttccagcccgattcgctgtccgcgcacccgattctgccgatcgaagcctgtgaaagtgcctactacctgcgcatccaggccaaggatcacccgggcgtgctggcccaggtggcgagcatcctgtccgagcgcggcatcaatatagagtcgatcatgcaaaaggaagtcgaggagcacgatggtctggtgccgatgatcctgttgacgcaccgtgttgtggagcagcgcatcaatgacgccattcaggccctggaagctcttcaggacgtggttggcccggtggttcgtattcgcgtagaacatcttaattaa

SEQ ID NO: 6393 - protein, 434 aa, Pseudomonas syringae pv. phaseolicola 1448A
MKPVKVGICGLGTVGGGTFNVLQRNAEEIARRAGRGIEVAQIAVRTPNPNCQIAGTPTTSDVFAVATNPEIDIVVELIGGYTIARDLVLKAIEHGKHVVTANKALIAVHGNEIFAKAREKGVIVAFEAAVAGGIPVIKAIREGLSANRINWVAGIINGTGNFILTEMREKGRTFPDVLAEAQALGYAEADPTFDVEGIDAAHKLTILASIAFGIPLQFDKAYTEGITKLTTADVNYAEALGYRIKHLGVARSTAQGIELRVHPTLIPADRLIANVNGVMNAVMVNGDASGSTLFYGAGAGMEPTASSVVADLVDVVRAMTSDPENRVPHLAFQPDSLSAHPILPIEACESAYYLRIQAKDHPGVLAQVASILSERGINIESIMQKEVEEHDGLVPMILLTHRVVEQRINDAIQALEALQDVVGPVVRIRVEHLN

SEQ ID NO: 6394 - DNA, 1311 bp, Dechloromonas aromatica RCB
  CDS (1)..(1311): transl_table=11
atgaaacccatcaatgttggccttatcggcatcggcaccgtcggcggtggcacctggaccgttcttaagcgcaacgaggaagagattacccgtcgtgccggtcggccgattcgcatcaccgctgtggccgacaagaacgttgaactcgccaagcagattactggtggtgcagcccgtgttaccgacgatgccttttcgttggtcaatgacccggaaatcgatatcatcgtcgaactgatcggcggttatggtgttgccaaggaagtggtcatgcaggccatcgccaacggcaaacatgtcgtgacggccaacaaggcactgcttgccgtgcatggcactgaaatctttacggccgctcaacaaaagggcgtgatggtcgctttcgaagcggcagtagccggcggcattcccatcatcaaggcattgcgcgagggcctgacggccaatcgcatcgagtgggcggccggcattatcaatggtacgaccaacttcatcctgtctgaaatgcgcgacaagggcctgtcctttggcgatgtgctgaaagaagctcagcgtcttggttatgccgaagcagatccgactttcgacatcgaaggtgtcgatgcggcccacaaggcgacattgattgcttcgattgcctatggcattccggtccagttcgacaaggcttacatcgaaggcatcaccaagctggaagcctccgatatcaagtatgccgaacagctcggttaccgcatcaagctgcttggcatcgccaagcgtcgcgagaagggtatcgagttgcgcgtccatccgaccctgatcccggcaaagcgcctgctggccaatgtcgaaggtgcgatgaatgccgtcatggtcaagggcgacgcggttggcatcaccctgtattacggcaagggggctggtgctgagccgaccgcttccgccgtggtggctgatctggtcgatgttgctcgtctggccaccgctgatgccgcgcaccgcgtgccgcacctggccttccagccggacgccatgtccaacctgccgatcctgccaatgagcgaagtcgagactggttattacctgcgtttgcgcgttgaagacaagcctggggtactggcagatatcactcgcatcctggccgatcagggtatttctatcgatgccatgctgcagcgcgagccggaagagggtgagggcgagaccgacattatcatcctgacccacatctgcaaggaaagtgcggccgatgcggcgattgccaagatcgaaggcttgtctgcgcaaaagggcaaggtcaagcgtattcgcctggaagagctgcaataa

SEQ ID NO: 6395 - protein, 436 aa, Dechloromonas aromatica RCB
MKPINVGLIGIGTVGGGTWTVLKRNEEEITRRAGRPIRITAVADKNVELAKQITGGAARVTDDAFSLVNDPEIDIIVELIGGYGVAKEVVMQAIANGKHVVTANKALLAVHGTEIFTAAQQKGVMVAFEAAVAGGIPIIKALREGLTANRIEWAAGIINGTTNFILSEMRDKGLSFGDVLKEAQRLGYAEADPTFDIEGVDAAHKATLIASIAYGIPVQFDKAYIEGITKLEASDIKYAEQLGYRIKLLGIAKRREKGIELRVHPTLIPAKRLLANVEGAMNAVMVKGDAVGITLYYGKGAGAEPTASAVVADLVDVARLATADAAHRVPHLAFQPDAMSNLPILPMSEVETGYYLRLRVEDKPGVLADITRILADQGISIDAMLQREPEEGEGETDIIILTHICKESAADAAIAKIEGLSAQKGKVKRIRLEELQ

SEQ ID NO: 6396 - DNA, 1311 bp, Ralstonia eutropha JMP134
  CDS (1)..(1311): transl_table=11
atgaaccccatcaaagttggcctgctcggcatcggtaccgtcggtagcggcacgtttaacgtgctcaagcgcaaccaggaagaaattcgccgccgcgctggccgcggcatcgagatcgctgtggtggcggatctcaacaccgagcgcgcacgcgagctgaccaacggcgaagtcgaaattgtcaacgacgccaacctggtggtggcgcgcccggacatcgacatcgtggtcgagctgatcggcggctacggcatcgcgcgtgagctggtgctgaaggccatcgagaacggcaagcacgtggtcaccgccaacaaggcgctgctggccgtgcacggcaacgagatctttgaagccgcacgcaggaagggcgtgatcgtcgcgttcgaggccgcagtggccggtggcatccccatcatcaaggcactccgcgaaggcctgaccgcgaaccgcatccagtggatcgccggcatcatcaacggcaccacgaacttcatcctgtccgagatgcgcgacaagggcctggatttcaacacggtcctgaaggaagctcagcaactcggctatgccgaggccgatccgaccttcgacatcgaaggtgtcgacgccgcgcacaaggtcacgctgatgagcgccatcgcgttcggcatgccggtgcagttcgaaaaggcccatgtggaaggcatcaccaagctggccgcgaccgacatcaagtacgccgaggaactgggctaccgcatcaagctgctgggcatcacgcgccgccgtgacgatggcgtggaactgcgcgtgcatccgacgctggtgccagcctcgcgcctgatcgccaacgtggaaggcgcgatgaacgcggtgctggtgcagggcgacgccgtgggcgccacgctgtactacggcaagggcgccggcgccgagccgaccgcctcggccgtgattgcggatctggtggacgtgacccgcctgcacaccgccgacccgaatcaccgcgtcccgcacctggcgttccagccggacgagctgtcgaacgtgccggtgctgccgatcgaggaaatcaacagcgcctactacctgcgcatgcgcgtgtccgacgagaccggcgtgctggccgagatcacgcgcatcctggccgaggggggcatctccatcgacgcgatgctgcagaaggaatcgcgcgagggcgagccgcagaccgacatcatcatcctgacccacgtgacgcgcgagaagcatgtcaatgccgccattgcgaagatcgagtcgctgccgactgtgctgtcgccggtcacgcgcctgcgcatggaagaactgaactga

SEQ ID NO: 6397 - protein, 436 aa, Ralstonia eutropha JMP134
MNPIKVGLLGIGTVGSGTFNVLKRNQEEIRRRAGRGIEIAVVADLNTERARELTNGEVEIVNDANLVVARPDIDIVVELIGGYGIARELVLKAIENGKHVVTANKALLAVHGNEIFEAARRKGVIVAFEAAVAGGIPIIKALREGLTANRIQWIAGIINGTTNFILSEMRDKGLDFNTVLKEAQQLGYAEADPTFDIEGVDAAHKVTLMSAIAFGMPVQFEKAHVEGITKLAATDIKYAEELGYRIKLLGITRRRDDGVELRVHPTLVPASRLIANVEGAMNAVLVQGDAVGATLYYGKGAGAEPTASAVIADLVDVTRLHTADPNHRVPHLAFQPDELSNVPVLPIEEINSAYYLRMRVSDETGVLAEITRILAEGGISIDAMLQKESREGEPQTDIIILTHVTREKHVNAAIAKIESLPTVLSPVTRLRMEELN

SEQ ID NO: 6398 - DNA, 1314 bp, Thiobacillus denitrificans ATCC 25259
  CDS (1)..(1314): transl_table=11
atgaagcccatccatgtcggcctcctaggccttggaaccgtcggcggcggcacgctcaccgtgctgcgccgcaacgccgaagaaattacccgccgcgccggccgcgagattcgcgtcgtgcgcgcggccgtccgcaacctcgacaaagccgaggcgctcgcaggcggcctgccgctgacgaccaatcccttcgacgtcgtcgacgatcccgagatagacatcgtcgtcgaactgatcggcgggctcgagccggcgcgcgaactcgtcatgcaggcgatcgccaacggcaagcacgtcgtcaccgccaacaagcacctcgtcgccaagtacggcaacgagatcttcgcggcggcgcaggccaagggcgtgatggtcaccttcgaggccgccgtcgcaggcggcatcccgatcatcaaggccttgcgcgaaggtctcacggccaaccgcatcgagtggctcgccggcatcatcaacggcaccagtaatttcatcctgagcgaaatgcgcgacaagggcgcggccttcgacgacgtgttgaaggaagcgcagcgcctcggctacgcggaagccgacccgaccttcgacatcgagggcatcgatgcggcgcacaagctcacgatcctctccgcgatcgcgttcggcatcccgatgcagttcgaacgtgcctataccgaggggatttcgcagctgacgcgcgaggacgtgcgctacgccgaggaactcggctaccgcatcaagcttctcggcatcgcgcgtcgcgccgaaaacggcatcgaactgcgcgtgcacccgacgctgattcccgagcgccgcctgatcgccaacgtcgacggcgcgatgaacgcggtgctcgtcaagggcgacgcggtcgggccgacgctctactacggcgcaggtgccggcagcgagccgacggcgtcggccgtcgtcgccgatctcgtcgacgtgacgcgtctgcacacggccgatccgcatcaccgcgtgccgcatctggcgttccagccggaccagctggccgacacgccgatcctgccgatggaagcggtgcgcaccgcgtattacctgcggctgcgtgctttcgaccggcccggcgtgctcgccgacatcacgcgcatcctcgccgacagcagtatttcgatcgacgcgatggtgcagaaagagcccgccgagggcgaggagcaggtcgacatcatcctgctgacccacgtcacgctcgagaagaacgtcaacgccgcgatcgcgaagatcgaagcgctcgacgccgtggcgggcaaggtcatgcgcatccgactcgaggacctgggcgccaaatga

SEQ ID NO: 6399 - protein, 437 aa, Thiobacillus denitrificans ATCC 25259
MKPIHVGLLGLGTVGGGTLTVLRRNAEEITRRAGREIRVVRAAVRNLDKAEALAGGLPLTTNPFDVVDDPEIDIVVELIGGLEPARELVMQAIANGKHVVTANKHLVAKYGNEIFAAAQAKGVMVTFEAAVAGGIPIIKALREGLTANRIEWLAGIINGTSNFILSEMRDKGAAFDDVLKEAQRLGYAEADPTFDIEGIDAAHKLTILSAIAFGIPMQFERAYTEGISQLTREDVRYAEELGYRIKLLGIARRAENGIELRVHPTLIPERRLIANVDGAMNAVLVKGDAVGPTLYYGAGAGSEPTASAVVADLVDVTRLHTADPHHRVPHLAFQPDQLADTPILPMEAVRTAYYLRLRAFDRPGVLADITRILADSSISIDAMVQKEPAEGEEQVDIILLTHVTLEKNVNAAIAKIEALDAVAGKVMRIRLEDLGAK

SEQ ID NO: 6400 - DNA, 1290 bp, Anabaena variabilis ATCC 29413
  CDS (1)..(1290): transl_table=11
gtgggtgtaaagctgggaatcttaggattaggtacggtaggaacagggacagtgcaactgctacaagatgcagttggtcgtcaccctttactgcaagaaatagaaatatatcgggtgggagtacgatcgcctaataaatcccgcgatgtacaattacagccggaagttataaccacagatttagagtcaatcgtcaatgacccggcagtagatattgttgttgaggtcatgggaggattagaaccggcgcgatcgcttattctccaagccataaataatggtaagcacgtagtcacagctaataaagcagcgatcgcccgtttcggggcagaaattttcacggctgctaatcaagccggagtctacgtgatgctggaagccgccgttggtggtggtattcccgtaattcaaccattaaagcaggctttaagtgtcaacaggctgcatactgttacaggcattgttaacggtaccactaattacatcctgactcggatgcaaacagagggtagcgacttcggtgatgtattagctgatgctcaacgtttgggttatgcggaggctgaccctacggcagatgtagacggcttagatgcaggggataaaattgctattctggcatcactagcttttgatgggcgaattaacttagaggatgtgtattgtgaggggattcgccaagtcagtaagacagatattgcctatgccgaaaaattgggatttgtgattaaattactggcgatcgctaaaaatcaggctcaagatgccactaaactatcggtaagggttcaccctaccttcgtacccaaaacacatcccttagccagcattaacggcgtgtataacgccattctcgtagaaggagaacccataggtcaggtgatgttttttggccctggtgcaggtgcaggtgcaaccgccagcgccgtcacctcagatatattaagtttggtagcagcgctaaaaagcaatacaacagcccctaatcccctattaacctgtagacacgaagaatatagccaagttgctcccatcagcgaccttctgacgcgattttatgcccgattcctcaccaaagaccaagctggtgtaatcggtcaattgggtacttgcttcggtaatcatggtgtgagtatagaatcaatcgtccaaactggctttcaaggagaactagtagagatagtagttgtgactcacgatgtcagggaaggtgaatttcgccaagccttagcagaaattcaaaatttaccagctattgacagtattcctagcatattgcgggtgttgtag

SEQ ID NO: 6401 - protein, 429 aa, Anabaena variabilis ATCC 29413
MGVKLGILGLGTVGTGTVQLLQDAVGRHPLLQEIEIYRVGVRSPNKSRDVQLQPEVITTDLESIVNDPAVDIVVEVMGGLEPARSLILQAINNGKHVVTANKAAIARFGAEIFTAANQAGVYVMLEAAVGGGIPVIQPLKQALSVNRLHTVTGIVNGTTNYILTRMQTEGSDFGDVLADAQRLGYAEADPTADVDGLDAGDKIAILASLAFDGRINLEDVYCEGIRQVSKTDIAYAEKLGFVIKLLAIAKNQAQDATKLSVRVHPTFVPKTHPLASINGVYNAILVEGEPIGQVMFFGPGAGAGATASAVTSDILSLVAALKSNTTAPNPLLTCRHEEYSQVAPISDLLTRFYARFLTKDQAGVIGQLGTCFGNHGVSIESIVQTGFQGELVEIVVVTHDVREGEFRQALAEIQNLPAIDSIPSILRVL

SEQ ID NO: 6402 - DNA, 1305 bp, Pseudomonas fluorescens PfO-1
  CDS (1)..(1305): transl_table=11
gtgaaaccggtcaaagtaggcatctgtgggttagggaccgtcggtggcggaaccttcaacgtacttcagcgcaacgccgaggaaattgctcgtcgtgccgggcgtggaatcgaagtggcacaaattgccatgcgcacgccaaagcctcagttccagacgaccggtattgcgattaccaacgatgtcttcgaagtggccacgaaccctgagatcgacatcgtcatagagctgatgggcggctataccgttgcccgcgagctggtactcaaggccatcgagaatggcaagcatgtggtcaccgcgaacaaggctctgattgccgttcacggtaatgaaattttcgccaaggcacgcgagaaaggcgtgatcgtggcgttcgaagcggcggtagccggtggcattccagtgatcaaggcgatccgtgaaggcctgtccgccaaccgtatcaactgggtcgccgggatcatcaacggcaccggtaacttcatcctcaccgaaatgcgcgagaagggtcgcaccttcgaagacgtgctggccgaggcccaagcactgggttacgccgaagccgatccgaccttcgacgtcgaaggcatcgacgccgcgcacaagctgacgatcctggcctcgatcgcattcggtgttccgctgcagttcgacaaggcttacaccgaaggcatcaccaagctgaccaccgccgacgtgaattacgccgaagcgctgggctaccgcatcaagcacctgggcgtggcacgcagcaccgccgccggtatcgagctgcgcgtacacccgacgctgatcccggccgatcgtctgatcgccaacgtcaacggcgtgatgaacgcggtgatggtcaacggtgacgctgccggttcgaccctgttctacggcgccggcgccggcatggagccgaccgcttcgtcggtgatcgcggatctggtggacgtggttcgcgccatgacctccgacccggaaaaccgcgtgccgcacctggccttccagccggactcgctgtcggcccatccgatcctgccaatcgaagcctgtgaaagcgcctactacctgcgcattcaggccaaggaccatccgggcgtattggctcaggtggcaagcatcctctcggagcgcggcatcaacatcgagtcgatcatgcagaaggaagtcgaggaacacgacggcctggtgccgatgatcctgctgacccaccgcgtgctggagcagcacatcaacgacgcgatcgccgccctcgaagcgctggcgggcgtggtcggtccggttgtgcggatccgcgtcgagcacttgaactaa

SEQ ID NO: 6403 - protein, 434 aa, Pseudomonas fluorescens PfO-1
MKPVKVGICGLGTVGGGTFNVLQRNAEEIARRAGRGIEVAQIAMRTPKPQFQTTGIAITNDVFEVATNPEIDIVIELMGGYTVARELVLKAIENGKHVVTANKALIAVHGNEIFAKAREKGVIVAFEAAVAGGIPVIKAIREGLSANRINWVAGIINGTGNFILTEMREKGRTFEDVLAEAQALGYAEADPTFDVEGIDAAHKLTILASIAFGVPLQFDKAYTEGITKLTTADVNYAEALGYRIKHLGVARSTAAGIELRVHPTLIPADRLIANVNGVMNAVMVNGDAAGSTLFYGAGAGMEPTASSVIADLVDVVRAMTSDPENRVPHLAFQPDSLSAHPILPIEACESAYYLRIQAKDHPGVLAQVASILSERGINIESIMQKEVEEHDGLVPMILLTHRVLEQHINDAIAALEALAGVVGPVVRIRVEHLN

SEQ ID NO: 6404 - DNA, 1287 bp, Rhodobacter sphaeroides 2.4.1
  CDS (1)..(1287): transl_table=11
atggctgcccccctgcgtcttggtattgccggtctcggcaccgtcggtatcggggtggtcaagatcatccagcgtcacgccgacctgatcgccgcccgcgcaggacgcccggtcaccatcaccgccgtctgcgcccgcgaccggtcgaagaaccgcgatgccgatctttcgggctacgcctgggagacggatgcggtggcgctggcacagcgcgcggatatcgacgtgttcgtcgaggtcatgggcggctcggaaggggcggcgcgcgcctcgaccgaggccgcgctggccgccggcaaggatgtggtgaccgcgaacaaggcgctcctcgctcatcacgggcaggccttggccgagatggccgaggccgcgggcctcgccatccggttcgaggctgccgtcgcgggcggcatcccggtcatcaaggcgctgaccgaggggctcgccggcaaccagatgcgccgggtgatgggcgtcatgaacggcacctgcaactacatcctgacccggatggagaccgcgggcctgccctacgaccatgtcttcgaggaggcccgccagctcggctatctcgaggccgacccgaacctcgatgtcggagggatcgacgcgggccacaagctctcgcttctggcctcgatcgccttcggcacccgcgtcagcttcgacgacgtgcagctcgaggggatcggccagatctcgatcgacgacatccgccatgcgggcgatctcggcttccgcatcaagcttctgggcgtggcgcaggtgtcgggccgcgggctcgagcagcggatgaccccctgcctcgtgcccgccgacagcccgctcggccagcttcagggcggcaccaatatggtggtgctcgaaggagacgcggtgggccagatcgtgctgcgcggccccggcgcgggcgaaggccccaccgccagcgccgtgatgggcgacgtgatcgacctcgcgcgcggactgcgcctgcccaccttcggccgccccgccacgagcctcgtcgaggcggtgcccgccaaggtcgcggcgcccgcgccctggtatctgcgcatgacgctcctcgacaagccgggggcgctggccaagatcgcgacggcgctcggcgaggccggcatctccatcgaccggatgcgccagtatggccacgagggcggccacgccccggtgctgatcgtcacccacaaggcctctcgcgacgacatttcccatgcgatcagccggttcggggccacgggcgtcctcgtcggcgaacctgtggcgatccgcatcgaagaggtttga

SEQ ID NO: 6405 - protein, 428 aa, Rhodobacter sphaeroides 2.4.1
MAAPLRLGIAGLGTVGIGVVKIIQRHADLIAARAGRPVTITAVCARDRSKNRDADLSGYAWETDAVALAQRADIDVFVEVMGGSEGAARASTEAALAAGKDVVTANKALLAHHGQALAEMAEAAGLAIRFEAAVAGGIPVIKALTEGLAGNQMRRVMGVMNGTCNYILTRMETAGLPYDHVFEEARQLGYLEADPNLDVGGIDAGHKLSLLASIAFGTRVSFDDVQLEGIGQISIDDIRHAGDLGFRIKLLGVAQVSGRGLEQRMTPCLVPADSPLGQLQGGTNMVVLEGDAVGQIVLRGPGAGEGPTASAVMGDVIDLARGLRLPTFGRPATSLVEAVPAKVAAPAPWYLRMTLLDKPGALAKIATALGEAGISIDRMRQYGHEGGHAPVLIVTHKASRDDISHAISRFGATGVLVGEPVAIRIEEV

SEQ ID NO: 6406 - DNA, 1293 bp, Carboxydothermus hydrogenoformans Z-2901
  CDS (1)..(1293): transl_table=11
atggcagcggtcaaaattggacttctgggttttggtacggtggggcggggagtttataaagttttaaactcccaccgggaaaaaatttataacaccttgggcgtagaagtggaaattgccaaggtattggtcagaaatctcgaaaagtatcaaaaaacttaccccgagctttcaaatttatttaccgaaaacccccgggaggtaattgatgatccggaaataaaaattgtggtagaagtgatgggcgggattaaaccggctctggattacgttttacaggcaatgcaaaacggcaaaagtgtaataaccgccaataaagacatggttgccgaacatggccgggagctttttgccacgcatgaagaacagggagtagactttttatttgaggccagtgtggccgggggaatccccattattagaaccttaaaggaaagccttgcgggaaacaattttaaagaagttatcggaatcattaacggaaccacaaattatatgcttaccaaaatgtcattatacggtgctccctatgaagaggtgctaaaagaagctcaggaaaaaggctatgccgaagcggacccaacttccgatgtggaagggtttgatgcggcaagaaagcttgccatcttagcctccatagcgtttaactcccgggtgacttttaaagatgtgtatgccgaagggattacccggattactcccattgacattcagtacgcccgggagctgggtggagttataaaattgctggggattgccaaagaagatgaggaagggattgaggtaagggtacatcctaccattattccccagagccatcctttagcggcggttaatgatgtttttaacgccatttttgtggaaggggatgcggtgggacctctgatgttttacggccggggagcgggagagttccctactgccagtgctgtggttggggatattattgaggcggtaaaaaatattagccaccacgataccggacgaattgggtgtacctgttacctggaaaagccggtaaaacctatcggggaaattagcaccaagtattatattagacttgtggtggaagataaacccggggttttggcttcggttgcccaggtgtttggtaatcagggggttagcattgcttcggttattcaaaaacgctccatcgaagatttagcagagctggtggttatgacccaccgggtaaaagagcggcatatcagagatgcggtttccatcttaaaagggatgtccacggtgcgagaaattgccaacgtaataagagctgagggggatttctaa

SEQ ID NO: 6407 - protein, 430 aa, Carboxydothermus hydrogenoformans Z-2901
MAAVKIGLLGFGTVGRGVYKVLNSHREKIYNTLGVEVEIAKVLVRNLEKYQKTYPELSNLFTENPREVIDDPEIKIVVEVMGGIKPALDYVLQAMQNGKSVITANKDMVAEHGRELFATHEEQGVDFLFEASVAGGIPIIRTLKESLAGNNFKEVIGIINGTTNYMLTKMSLYGAPYEEVLKEAQEKGYAEADPTSDVEGFDAARKLAILASIAFNSRVTFKDVYAEGITRITPIDIQYARELGGVIKLLGIAKEDEEGIEVRVHPTIIPQSHPLAAVNDVFNAIFVEGDAVGPLMFYGRGAGEFPTASAVVGDIIEAVKNISHHDTGRIGCTCYLEKPVKPIGEISTKYYIRLVVEDKPGVLASVAQVFGNQGVSIASVIQKRSIEDLAELVVMTHRVKERHIRDAVSILKGMSTVREIANVIRAEGDF

SEQ ID NO: 6408 - DNA, 1329 bp, Burkholderia sp. 383
  CDS (1)..(1329): transl_table=11
atggaaccgatcaaagttggcctgttgggcttcggcacggtgggcagcggcaccttcacggtgctgggccgcaaccaggaagaaatcaagcgacgcgcggggcgcggcatcgaggtgacgcgcattgcggtgcgcaacccggccaaggcgctggctgcgctcggcggcgacgccggcgccgcgcaaatcaccgacgatttcaacgcagtcgtcgatgatccgtcgatcgcgatcatcgccgagatgattggcggcacgggcatcgcacgcgagctcgtgctgcgcgcgatcgcgaacggcaagcacgtcgtgacggccaacaaggcgctgctcgcggtgcacggcaccgagatcttcgaggccgcgcgcgcgaagggcgtgatggtcgcgttcgaggcggccgtcgccggcggcatcccgatcatcaaggcgctgcgcgaaggcctgaccgcgaaccgcatccagtacatcgcgggcatcatcaacggcacgaccaactacatcctgtcggaaatgcgcgatcgcgggctcgacttcgcgaccgcgctgaaggccgcgcaggagctcggctacgcggaagccgatccgaccttcgacatcgaaggcgtcgacgccgcgcacaaggcgacgatcatgagcgcgatcgcgttcggcgtgccggtgcagttcgagcgcgcgtacgtcgagggcatcagcaagctggatgcgaccgacattcgctacgcggaagaactcggctaccggatcaagctgctcggcatcacgcgccgcgccgaaaacggcatcgagctgcgcgtgcatccgacgctgatcccggagaagcgcctgctcgcgaacgtcgagggcgcgatgaacgcggtcgtcgtgcacggcgacgcggtcggcacgacgctgtactacggcaagggcgcgggcgcggagccgaccgcatcggccgtggtcgcggatctcgtcgacgtcacgcgcctgcacacggcggacccggagcatcgcgtgccgcacctcgcgttccagccggacagcctgtcgaacacgccgatcctgccgatcgaggaagtgacgagcggctactacctgcgcctgcgcgtcgccgatcaaaccggcgtgctggccgacatcacgcgcatcctcgccgcatcgggtatctcgatcgacgcgctgctgcagaaggaatcggagcaggtcgacgacgcgaagggcgaaaccgacatcatcctgatcacgcacgtcacggtcgagaagaacgtgaatgcggcgatcgcgcagatcgagagccttgcgacggtggtatcgaaggtgacgaagctgcgcatggaagcgctgaactga

SEQ ID NO: 6409 - protein, 442 aa, Burkholderia sp. 383
MEPIKVGLLGFGTVGSGTFTVLGRNQEEIKRRAGRGIEVTRIAVRNPAKALAALGGDAGAAQITDDFNAVVDDPSIAIIAEMIGGTGIARELVLRAIANGKHVVTANKALLAVHGTEIFEAARAKGVMVAFEAAVAGGIPIIKALREGLTANRIQYIAGIINGTTNYILSEMRDRGLDFATALKAAQELGYAEADPTFDIEGVDAAHKATIMSAIAFGVPVQFERAYVEGISKLDATDIRYAEELGYRIKLLGITRRAENGIELRVHPTLIPEKRLLANVEGAMNAVVVHGDAVGTTLYYGKGAGAEPTASAVVADLVDVTRLHTADPEHRVPHLAFQPDSLSNTPILPIEEVTSGYYLRLRVADQTGVLADITRILAASGISIDALLQKESEQVDDAKGETDIILITHVTVEKNVNAAIAQIESLATVVSKVTKLRMEALN

SEQ ID NO: 6410 - DNA, 1311 bp, Geobacter metallireducens GS-15
  CDS (1)..(1311): transl_table=11
atgaacgagataaaggtgggccttctcggcctggggaccattggtacgggggtcgccaagctgctcatgaccaatgccgatctgatcgccgccaaggtgggcgcccggattaccctgaaaaagatcgccgatctggatataaccaccgaccgggggattgcgcttccggcggacattctcaccaccaacgccgacgaggtgctcaccgatccggagatcagcgtggtgatcgagttgatcggcggctatgagccggccaagcgcttcgtgctcaaggccatcgaaaacggcaagcatgtggttaccgccaacaaggcgcttctggctctccacggtgaagagatctaccctgccgcggcccgcaagggggtagaggttctgtttgaggccgcggtcgggggaggcatcccggtcatttccgccatacgcgggaacatggcagccaataatttttccactgttttcggcatactgaacggaacatgcaattacatacttacccgaatgaccaaggagggggtggacttcgccgacgttctcaagaaggcccaggaactcggttatgctgaggctgaccccaccttcgacatcgagggggtggacacggcccacaagctggcgctccttgtttccctctgcttcgggacccgggtcaccttcagcgacatccatacggaaggaatcagttccctctcctccgttgacatcaagtttgcccgggacttcgggtacaagatcaagctcctggccatcggcaagcgggacggcgaccgggtggaggcccgggttcaccccaccatgatcccggtcaacaatccgctggccgatgtagatggcgcctttaacgccatccgcttcaccggcgacttcatcggtccggtcatgttctatggccgcggtgccggcatggaccctaccgccagcgccgtggtgggtgatatcatcgaggtctcccgcaacatcgtggcgggcatcggccgtcgttgtgctcctctcggctactgtgacgaggcggtcgccactcttccgctcaagcccatgggggaaatcgagagcaagtactacattcgcttcagcgccgtggacaggcccggtgttctggcgagaatctccgggattctcggaaagtacgacatcagcatcgagtccatggtccagagcggccgcatggccggcgaggaggtccccatcgtcatcatgacccatgaggccagggaaagcgatgtacggacggccctcgacgagatcgacacctttgatatcattacccagaagagccaggtcatccggattgaggacaatctggaatag

SEQ ID NO: 6411 - protein, 436 aa, Geobacter metallireducens GS-15
MNEIKVGLLGLGTIGTGVAKLLMTNADLIAAKVGARITLKKIADLDITTDRGIALPADILTTNADEVLTDPEISVVIELIGGYEPAKRFVLKAIENGKHVVTANKALLALHGEEIYPAAARKGVEVLFEAAVGGGIPVISAIRGNMAANNFSTVFGILNGTCNYILTRMTKEGVDFADVLKKAQELGYAEADPTFDIEGVDTAHKLALLVSLCFGTRVTFSDIHTEGISSLSSVDIKFARDFGYKIKLLAIGKRDGDRVEARVHPTMIPVNNPLADVDGAFNAIRFTGDFIGPVMFYGRGAGMDPTASAVVGDIIEVSRNIVAGIGRRCAPLGYCDEAVATLPLKPMGEIESKYYIRFSAVDRPGVLARISGILGKYDISIESMVQSGRMAGEEVPIVIMTHEARESDVRTALDEIDTFDIITQKSQVIRIEDNLE

SEQ ID NO: 6412 - DNA, 1338 bp, Synechococcus elongatus PCC 7942
  CDS (1)..(1338): transl_table=11
atggtgcaagccgtatcggtcgatgattggaaacaacgagtgacatttaaggttgggctgttggggctggggaccgttggtactggcacagcacaaattttgctagaccctgcagatcggcaacccctgctgcaagaactggagctgtatcgggtgggggtgcgtagcctcgacaaaccccgcagcgtcgacatttctcgcgatcgccttaccactgatctggagagtattgttcgcgatccagccgtggatattgtggtcgagctgctgggtggcctagaaccgtcgcgcagcctgatcctgactgcgatcgcccacggtaagcatgtggtgaccgccaataaagcggtgattgctcgctacggcgaggaaatttttgcagcggcagctgatgcgggtgtgtacgtgctgctagaggcagcagtcggcggcggcattccggtgatcgagcccctgaagcaatcgctctgtgccaaccgtatccagggcattctgggcatcatcaacggcacgaccaactacatcctgacgcgcatgcagcgcgagggcggggattttggtcccattttggccgatgcccagcggctgggctatgccgaagccgatcccaccgccgatgttgatggctgggatgcagcagacaaaattgccatcctggcttctcttgcctttggcggacgggtcgagcgatcgcaaattacctgcgaagggatccgggcaattacagccagcgatattgcctacgccgaaggattgggcttcacgatcaagctgttagccaaggccaaacggcagcaccagggcgatacttggcggctggaagcgagcgtctatccgaccttggtacccctcagccatcccctcgccagcgtcaacgatgtctacaacgccatcttggtcgagggcgaccccgtcggacaggtcatgttctttgggcccggggcgggggcaggaccaacggctagtgccgtggtggctgacatcctcaacatcgctgctgtcctcagtgctggcagcgatcgcgatcacctcgacccgctgctggcttgccgctatctccaaactgtggagctggcgccagcggccgaaaccgccgctcgtttttacctacgcatcgtcgttcaagacagccccggcgtcatcggcaaagtcggcacaatctttggtgagcaggggattagcctcgagtcgatcgtccagacagacgtcagtggcgaaacggctgagctggtggtgattacccacgaggtgcaagaagggatcatgcggcaggcaattacgcagctagaagccttacccttagtgcaggcaattgccaacctcttgcacgttctctag

SEQ ID NO: 6413 - protein, 445 aa, Synechococcus elongatus PCC 7942
MVQAVSVDDWKQRVTFKVGLLGLGTVGTGTAQILLDPADRQPLLQELELYRVGVRSLDKPRSVDISRDRLTTDLESIVRDPAVDIVVELLGGLEPSRSLILTAIAHGKHVVTANKAVIARYGEEIFAAAADAGVYVLLEAAVGGGIPVIEPLKQSLCANRIQGILGIINGTTNYILTRMQREGGDFGPILADAQRLGYAEADPTADVDGWDAADKIAILASLAFGGRVERSQITCEGIRAITASDIAYAEGLGFTIKLLAKAKRQHQGDTWRLEASVYPTLVPLSHPLASVNDVYNAILVEGDPVGQVMFFGPGAGAGPTASAVVADILNIAAVLSAGSDRDHLDPLLACRYLQTVELAPAAETAARFYLRIVVQDSPGVIGKVGTIFGEQGISLESIVQTDVSGETAELVVITHEVQEGIMRQAITQLEALPLVQAIANLLHVL

SEQ ID NO: 6414 - DNA, 1293 bp, Rhodospirillum rubrum ATCC 11170
  CDS (1)..(1293): transl_table=11
atgaatgatcctttgaaagtcgccgtcgccggcctgggaacggtcggcgccggggtggtgaagctgctggccgaccacaaggacctgctggccgcccgcgccggccggccggtggtggtcagcgccgtttcggcccgctcgcgcacgcgcgatcgcggggtcgatctgtcgtcctatgcgtggttcgatgatcccgtcgccctggtccgcgaggccaaggccgatgtggtggtcgaactgatcggcggatcggacggcccggccaaggccgtctgcgagaccgcccttgatcttggccggccggtggtgaccgccaacaaggcgttgctcgcccaccatgggctggccctggccgcccgcgccgaggcgacgggggcggggctgtggttcgaagccgccgtggccggcggcattccgatcatcaaggccctgcgcgaaggcttggccgccaaccggatcgacgcccttcacggcatcctcaacggtacctgcaattatatcctgacgaccatgcgcgaaagcgggcgggatttcgccgacgtgctagccgaggcccaggctttgggctatgccgaggccgatcccggctttgatatcgacggcatcgacgccgcccataagctggcccttctcgccagtctcgccttccatgttccggtcgatctgggtggggtgagcattcagggcatccgccatatctcgtcgctcgatatccgcttcgccgatgaactgggctatcgcatcaaattgctggcgatggcccggcgcaccgccgagggcgtggaacagcgggtggcgccggtgatggtgccccttgacgcgccgctcgcccatgtcgagggcgtcaataacgccgtggtcaccgagggcgacttcgtgggccgcagcgtgttccaggggcgcggcgccggggccggtccgacggcttcggccgtggtcgccgatctgatcgatctggcgcgcggccataaggttccggtctttggcgtgcccagctcggcgctgagcgttctgccgcgcgccgagcccgaggatcatgtcgggcgctattacgtccgactgatggtcgttgaccggccgggggttttcgccgaggtggcggcggcgttgcgcgatgaacaggtctccatggaatccgttcttcaacgcgcccgcgatcccggcgagacggtgccggtggtcatgacccttcatgacaccggcgaggcggcgatgacccgggccctggcccgcatcggggcgatcgacgccatggtcgagccgccccgcgtcatccgcatcgaacagttctag

SEQ ID NO: 6415 - protein, 430 aa, Rhodospirillum rubrum ATCC 11170
MNDPLKVAVAGLGTVGAGVVKLLADHKDLLAARAGRPVVVSAVSARSRTRDRGVDLSSYAWFDDPVALVREAKADVVVELIGGSDGPAKAVCETALDLGRPVVTANKALLAHHGLALAARAEATGAGLWFEAAVAGGIPIIKALREGLAANRIDALHGILNGTCNYILTTMRESGRDFADVLAEAQALGYAEADPGFDIDGIDAAHKLALLASLAFHVPVDLGGVSIQGIRHISSLDIRFADELGYRIKLLAMARRTAEGVEQRVAPVMVPLDAPLAHVEGVNNAVVTEGDFVGRSVFQGRGAGAGPTASAVVADLIDLARGHKVPVFGVPSSALSVLPRAEPEDHVGRYYVRLMVVDRPGVFAEVAAALRDEQVSMESVLQRARDPGETVPVVMTLHDTGEAAMTRALARIGAIDAMVEPPRVIRIEQF

SEQ ID NO: 6416 - DNA, 1299 bp, Moorella thermoacetica ATCC 39073
  CDS (1)..(1299): transl_table=11
gtgttgggaccaatcaatcttggccttctgggcctgggtactgttggcagcggtgtggtccggttgctggagcagaacaaagccatcattacccagaaattgggccagcctttaaatattaaacgcatcctggtccgggatttaaaccgccctcgtcaggtggcagtcgatccagccttgctgacaaccgacccggataccatcctgggtgatccagatatccctattatcgtcgaggtcatggggggtaccgggacggccagagagtacatcctccaggctctaagccggggtaaaagtgtggttacggccaacaaggatctcctcgccctttatggcaaggagctttttgatgccgccgacgcccatggggccgacctcctctttgaagccagcgtaggaggggggatacccattattcgccccctgaaggaatgcctggcgggtaaccggattcgtcaggtcatgggcatcattaatggtaccaccaactatatcttgaccaagatgagccgcgaaggccgcgactttaacgacgttctaaaggaagcccagtccttgggttacgccgaagccgatcctacgtccgatattgaaggcgatgatgccgcacgtaaaatggccatcctcgcttccatagccttcggtacccggattacttacccggaggtttaccgggagggtataggccgcctgtcgtcccatgacatcaactacgccagggatatgggctatgccgtcaagctcctgggcatcgcccgggaagacgaggacgggatcgaggtgcgggtccacccggctctggtacccctgaatcaccccctggcctcggttagcgatgtttttaacgccatcttcgtggaaggcgacgccgtgggcgagacgatgttttacggccgcggagccggttccctgccgactgccagcgccgttgtcggggacattattgaaggggcccgtaacctccagcatcacgaccggggccggatatcctgcacttgtttttatgataaacccctaaaaccgataggagcaattattactaaatattacctccgcctggtagtcgtcgaccgaccgggagtcctggctaccattgccgggattttcggcgagcgtgaagtcagcctggcctcggtcatccaggaacggatgcttggcgacctggcggaactggtgcttattacccaccgcgtccgggaaaagaatgtccgggaagccctggaggttttaggcagcctgccggtggtcaaagagatagccagcgtaataagggtagaaggaggagaagccaggtga

SEQ ID NO: 6417 - protein, 432 aa, Moorella thermoacetica ATCC 39073
MLGPINLGLLGLGTVGSGVVRLLEQNKAIITQKLGQPLNIKRILVRDLNRPRQVAVDPALLTTDPDTILGDPDIPIIVEVMGGTGTAREYILQALSRGKSVVTANKDLLALYGKELFDAADAHGADLLFEASVGGGIPIIRPLKECLAGNRIRQVMGIINGTTNYILTKMSREGRDFNDVLKEAQSLGYAEADPTSDIEGDDAARKMAILASIAFGTRITYPEVYREGIGRLSSHDINYARDMGYAVKLLGIAREDEDGIEVRVHPALVPLNHPLASVSDVFNAIFVEGDAVGETMFYGRGAGSLPTASAVVGDIIEGARNLQHHDRGRISCTCFYDKPLKPIGAIITKYYLRLVVVDRPGVLATIAGIFGEREVSLASVIQERMLGDLAELVLITHRVREKNVREALEVLGSLPVVKEIASVIRVEGGEAR

SEQ ID NO: 6418 - DNA, 1329 bp, Burkholderia thailandensis E264
  CDS (1)..(1329): transl_table=11
atggaaccgatcaaagtaggcctgttgggcttcggcacggtgggcggcggcaccttcaaggtgctgcgccgcaaccaggaggaaatcaagcggcgcgccgggcgcggcatcgagatcacgcgcgtcgcggtgcgcaatcccgcgaaggcgctcgccgcgctcgacggcgatgcgaacggcgtgtcgatcggcgacgatttcaacgcggtcgtcgacgacccgtcgatcgcgatcgtcgccgagatgatcggcggcaccggcctcgcgcgcgagctcgtgctgcgcgcgatcgcgaacggcaagcacgtcgtgaccgcgaacaaggcgctgctcgcggtgcacggcaccgagatcttcgaggccgcgcgcgagaagggcgtgatggtcgcgttcgaggcggccgtcgcgggcggcatcccgatcatcaaggcgctgcgcgaagggctgaccgcgaaccggattcagtacatcgccggcatcatcaacggcacgacgaactacatcctgtcggagatgcgcgagcacggcctcgatttcgcgacggcgctcaaggccgcgcaggagctcggctacgcggaagccgatccgaccttcgacatcgagggcatcgacgccgcgcacaaggcgacgatcatgagcgcgatcgcgttcggcgtgccggtgcagttcgagcgtgcgtacgtcgaagggatcagcaagctcgccgcgaccgatatccgctacgcggaagagctcggctaccggatcaagctgctcggcatcacgcggcgcaccgagcgcggcatcgagctgcgcgtgcacccgacgctgattcccgcgaagcgcctgctcgcgaacgtcgagggcgcgatgaacgcggtcgtcgtgcacggcgacgcggtgggcacgacgctttactacggcaagggcgcgggcgcggagccgacggcgtcggccgtcgtcgccgatctcgtcgacgtcacgcgcctgcacacggcggaccccgagcaccgcgtgccgcacctcgcgttccagccggacagcctgtcgaacacgccgatcctgccgatcgaagaggtgacgagcggctactacctgcgcctgcgcgtcgccgacgagacgggcgtgctcgccgacatcacgcgcatcctcgccgattcggggatctcgatcgacgcgctgttgcagaaggagtcggagcaggtcgacgacgcgaacggcgagaccgacatcatcctgatcacgcacgagacgatcgagaagaacgtcaacgcggcgatcgcgcgcatcgagtcgctcgcgaccgtcgtgtcgaaggtcacgaagctgcgcatggaagcgctcaactga

SEQ ID NO: 6419 - protein, 442 aa, Burkholderia thailandensis E264
MEPIKVGLLGFGTVGGGTFKVLRRNQEEIKRRAGRGIEITRVAVRNPAKALAALDGDANGVSIGDDFNAVVDDPSIAIVAEMIGGTGLARELVLRAIANGKHVVTANKALLAVHGTEIFEAAREKGVMVAFEAAVAGGIPIIKALREGLTANRIQYIAGIINGTTNYILSEMREHGLDFATALKAAQELGYAEADPTFDIEGIDAAHKATIMSAIAFGVPVQFERAYVEGISKLAATDIRYAEELGYRIKLLGITRRTERGIELRVHPTLIPAKRLLANVEGAMNAVVVHGDAVGTTLYYGKGAGAEPTASAVVADLVDVTRLHTADPEHRVPHLAFQPDSLSNTPILPIEEVTSGYYLRLRVADETGVLADITRILADSGISIDALLQKESEQVDDANGETDIILITHETIEKNVNAAIARIESLATVVSKVTKLRMEALN

SEQ ID NO: 6420 - DNA, 1308 bp, Novosphingobium aromaticivorans DSM 12444
  CDS (1)..(1308): transl_table=11
atgagcgaaccattgcgcatcgcgctggccggacttggcacggtaggcggcggagtgatccggctgatcgaggcgaacgccgatctgatcgcgcgccgcgcgggccggccgatagtcattaccaccgtcagcgcacgcaatcgcgacaaggaccgcggcttcgacgtgtcgcgctatgcctgggaagacgacatggtcatcctcggcgagcgtcctgacgtggacgtcgtggtcgaactcgtcggcggcgccgatggccccgccttggcgctcgcccggaccacgttcgaggccggcaaggctcttgtcacggccaacaaggcaatgatcgcgcaccacggcgtggaacttgccacaaaggcagaagccgccaaggtggcgctgaaattcgaggctgcggtcgctggcggcatccccgttatcaagggactcaaggaaggcgtcgccgccaacgagatcgcacgggtctatggcattctcaacggcacctgcaactacatcctctcgacgatggaagacaccggccgcgatttcgccgacgttctcgccgaggcgcaggccaagggctatgccgaagccgacccgaccttcgacatcgacggcatcgacgccgcgcacaagctttcgatcctttcgtcgatcgccttcggcacggcggtggacttcaagcccgtggccgcgaccggcatccgccgcgtccttgccgccgacatcgcgcaggcagatgtgctcggctactatatccgcctgatcggcatggccgagacggaaatggacgctgcgggcaaccgccgcctgttccagcgggtccacccgcacctcgtccatcgcgaccatccgctcgcccatgtcgacggcgcgaccaatgcggtcgtcgccgagggcaatttcgtgggcaggctgctgttccagggcgcgggggccggcgatggtccgaccgccagcgccgtggtcgccgatctcatcgacatcgcgcgcggcgacatcggcgcgcccttctcgatcccggtcgcggaactggaaagggcagctccggccgaaaccggccaccgcaggggcaaggcctatatccggttcaacgtggccgatcgtccgggcgtgctggccgaaatcaccgccgccatgcgcgacgccggggtatcgatcgagagcttcatccagaagggtgggcaggacgatgcaccggtcatggtgtcgatggtcacgcacgaaggcccggaaagcgccatcgccgaagcactgcgccttctcgatggctcgcccgtcctggccgagccgccgctggtcatgcacatcctcggcgaatga

SEQ ID NO: 6421 - protein, 435 aa, Novosphingobium aromaticivorans DSM 12444
MSEPLRIALAGLGTVGGGVIRLIEANADLIARRAGRPIVITTVSARNRDKDRGFDVSRYAWEDDMVILGERPDVDVVVELVGGADGPALALARTTFEAGKALVTANKAMIAHHGVELATKAEAAKVALKFEAAVAGGIPVIKGLKEGVAANEIARVYGILNGTCNYILSTMEDTGRDFADVLAEAQAKGYAEADPTFDIDGIDAAHKLSILSSIAFGTAVDFKPVAATGIRRVLAADIAQADVLGYYIRLIGMAETEMDAAGNRRLFQRVHPHLVHRDHPLAHVDGATNAVVAEGNFVGRLLFQGAGAGDGPTASAVVADLIDIARGDIGAPFSIPVAELERAAPAETGHRRGKAYIRFNVADRPGVLAEITAAMRDAGVSIESFIQKGGQDDAPVMVSMVTHEGPESAIAEALRLLDGSPVLAEPPLVMHILGE

SEQ ID NO: 6422 - DNA, 1299 bp, Desulfitobacterium hafniense Y51
  CDS (1)..(1299): transl_table=11
ttgatgcaggtcgttaagattggactgctgggtctcggaaccgtcggcagtggcgtaattcagatccttgagcaaaatgctaatgatatacagaaccgttccctaagtcagattaaagtctccaaggtcctggtgcggaaccttaaggctccccgctcaatcgcaggggattttactctaaccgatcaagccgccgatgttctcaccgaccccgacatcagtattgtcgtcgaagtgatgggcggcattgaaccggccaaaacctatatattagaagcttttaaacaagggaagaatgtggtgaccgccaataaggaccttttggcccttcatgggcaagagcttttggatgcggctaaagaagctggcaaagatctttattttgaagccagtgtagccggcggcattcctattatcgccgccctgaagcagtctctggccgggaatagaatctctgaagtcctggggattattaacggcaccaccaactatatcctgaccgctatgaccgagcagggccgggattatcaggaagtcctgaaggaagctcaagagttaggttatgcggaagccgacccgaccgcagatgtggacggactggatgccgcccgcaagctggccatcctcgcctccatcgcctttaactcccgggtcaccgtcaatgatgtctatgtggaagggatcgccaagatcacctccgaagacatcgcctatgcccgtgaactcaattccaccatcaaacttctggctgtggctaaagctcaggccgacggcatcgaggttcgtgtccaccctgcctttgtccccgacaaccatcccctggctgctgtcagcggagtttttaatgctatctatgtggtgggagacgccgttggcgaaaccatgttctatggccggggtgccgggtccctgcccactggaagtgccgttgtctccgatatcattcaagtggtccggaatatcaatgcggattctacagccaatattaattgcacttgttacaatgaattagccatcaaaagcgaacaggattttaaaagcgctttctatatccggctgcgggtcaaggatgaaccccgggttctggctaccctagccctgcttttcgccgaagccggggtgagctttgcttccatcattcaaaaacagaaaaaacgccaggaagcggaaatcgtcctggtcacccaccccactcaggaatcctgcttgcgtgaagctctggattcggtccgggcctacagcaaagtgctctccatccacaatgtgattcgttttgaatcaggtgagcattacgactag

SEQ ID NO: 6423 - protein, 432 aa, Desulfitobacterium hafniense Y51
MMQVVKIGLLGLGTVGSGVIQILEQNANDIQNRSLSQIKVSKVLVRNLKAPRSIAGDFTLTDQAADVLTDPDISIVVEVMGGIEPAKTYILEAFKQGKNVVTANKDLLALHGQELLDAAKEAGKDLYFEASVAGGIPIIAALKQSLAGNRISEVLGIINGTTNYILTAMTEQGRDYQEVLKEAQELGYAEADPTADVDGLDAARKLAILASIAFNSRVTVNDVYVEGIAKITSEDIAYARELNSTIKLLAVAKAQADGIEVRVHPAFVPDNHPLAAVSGVFNAIYVVGDAVGETMFYGRGAGSLPTGSAVVSDIIQVVRNINADSTANINCTCYNELAIKSEQDFKSAFYIRLRVKDEPRVLATLALLFAEAGVSFASIIQKQKKRQEAEIVLVTHPTQESCLREALDSVRAYSKVLSIHNVIRFESGEHYD

SEQ ID NO: 6424 - DNA, 1353 bp, Saccharophagus degradans 2-40
  CDS (1)..(1353): transl_table=11
atggctgattgttggcgctttgtttacccattagaggaacgtagcttgaaacctgtgaatattggcctgtgtggtcttggcactgttggcggcggtacacttactgtacttaagcgcaatttgctcgatattaatgcccatgcgggtaaaagtgtggtgctaacccatattggtgcccgccgtgataaccctgcattcgaccttagcggtattaaagtaagtcgcgatgtgttcgcagtggctgacgatccagaagttgatattttggttgagctaattggtggaacctccgtcgccaaagagttggttttgcgtgcagtgcgcagtggcaagcacgtggtgactgcaaacaaggcgcttattgccgagtttggtaacgagctatttgctgaggccgccaaacacaacgtagtaatagcctatgaagcggcggttgcgggcggtattcctatcattcgcgccatgcgcgaaggtttagcagccaataaaattgaatggttggctggtattattaacggtaccggtaactttattcttaccgaaatgcgcgataaaggtcgtgcattcgaagatgtattaaaagaagcgcaagagctaggttacgccgaggctgaccctacgttcgacgtagagggcattgatgccgcgcacaagcttgttattcttgcgtctattgcgtttggtatgcctttgcagttcgacaaggtatttaccgagggcattagtacaatttctaccgaagatgtggcgtacgccggtgagcttggctaccaagtgaagcacttaggtataacacgcaagcgccccaatcagggtattgaattgcgcgtgcaccccacgctaattcctaactcacgtctaattgccaacgtagatggtgttatgaatgcggtgttagttaagggtgatgctgtaggccctaccttgtactacgggcctggtgctggcgccgagccaactgcgtctgcggttgtctctgatattgttgatgtaagccgattagtgggtgccgaatctggctcaagtgtaccgcacttagggtttgcgctagataaactagtcgattacccaatcctgccaattgaagaagttgagaccgcttactatattcgtatttcagcgttagatcgccctggtgtgctctctaaaatcacccagatattgagcgatgctggcattagtattgaagcgttaatacaaaaagagccgaaagaagggcaagatcatgtgccggttatattgctaactaaccgcgccatagaaaaacaaattattgcagccattaagaagattgaagcgttagattctataaatggcaaagttgtgcgtattcgtgttgagtcgcttaaataa

SEQ ID NO: 6425 - protein, 450 aa, Saccharophagus degradans 2-40
MADCWRFVYPLEERSLKPVNIGLCGLGTVGGGTLTVLKRNLLDINAHAGKSVVLTHIGARRDNPAFDLSGIKVSRDVFAVADDPEVDILVELIGGTSVAKELVLRAVRSGKHVVTANKALIAEFGNELFAEAAKHNVVIAYEAAVAGGIPIIRAMREGLAANKIEWLAGIINGTGNFILTEMRDKGRAFEDVLKEAQELGYAEADPTFDVEGIDAAHKLVILASIAFGMPLQFDKVFTEGISTISTEDVAYAGELGYQVKHLGITRKRPNQGIELRVHPTLIPNSRLIANVDGVMNAVLVKGDAVGPTLYYGPGAGAEPTASAVVSDIVDVSRLVGAESGSSVPHLGFALDKLVDYPILPIEEVETAYYIRISALDRPGVLSKITQILSDAGISIEALIQKEPKEGQDHVPVILLTNRAIEKQIIAAIKKIEALDSINGKVVRIRVESLK

SEQ ID NO: 6426 - DNA, 1314 bp, Methylobacillus flagellatus KT
  CDS (1)..(1314): transl_table=11
atgaaacccatcaatgttggcctgcttggcatcggtactgtcggtggcggcacctataccgttcttacacgcaatcaggaagaaatcgcgcgccgtgctggtcgcccgattgccatcacgcgcgttgccgaccgcaatctggaattggcccgcaaggtcacggcaggtcaagttgacgtgactgacgacgcatttgccgtggtggcagatcccagcatcgacatcgtggtcgagctgatcggcgggtgcactgtcgcacgcgaattggtgatgaaggcgatcgaacatggcaagcatgtggtcaccgccaacaaggcgctgatcgcgttgcacggtaacgagatttttgccgcggcgcagcagaagggggtgatcgttgcttttgaagctgcggtggcagggggtattcccatcatcaaggccgtacgcgagggcctggccgccaaccgtatcgagtggattgcgggcatcatcaacggtaccaccaatttcatcctctcggaaatgcgtgagaaggggctggcctttgctgatgtgctcaaggaggcgcagcgcctgggctatgccgaggccgacccgaccttcgacgttgagggtgtggatgcggcgcacaagctcatgatcctggctgcaattggcttcggtatcccgatgcagttcgacaaggcctatgttgaaggcatcagcaagctggactccattgatatccgttatgcggaagagctgggctaccgcgtcaagctgcttggcattaccaagcgcaccagccaaggcgtggagctgcgcgtgcacccgaccttgatccccgaaaagcgcctgattgccaatgtcaacggcgccatgaatgcggtgctggtgaagggggacgcggttgggcctaccttgtattacggcgcaggcgcaggtgccgagcccaccgctagcgccgtggtggctgatattgtcgacgtaacgcgcacacacacgaccgatgtgcaccaacgcgtccctcacctggcgttccaacccgaccagctcgtggatttgcccatcctggcaatcggcgaggtgagcagcgcttattacctgcggctgcgcgcggtggacaagccaggcgtgctggccgatgtgacccgcatcctgggtgaccgccagatttcgattgatgccatgatccagaaagaaccacaggaaggcgaagaccaggccgatatcatcatcctgacccatgtcacggccgagaagaacatggatgacgcgattgccgccatcgaggcattgcctgccatttccggcagcgtgacccgcttgcgtatggaagagctgagccgataa

SEQ ID NO: 6427 - protein, 437 aa, Methylobacillus flagellatus KT
MKPINVGLLGIGTVGGGTYTVLTRNQEEIARRAGRPIAITRVADRNLELARKVTAGQVDVTDDAFAVVADPSIDIVVELIGGCTVARELVMKAIEHGKHVVTANKALIALHGNEIFAAAQQKGVIVAFEAAVAGGIPIIKAVREGLAANRIEWIAGIINGTTNFILSEMREKGLAFADVLKEAQRLGYAEADPTFDVEGVDAAHKLMILAAIGFGIPMQFDKAYVEGISKLDSIDIRYAEELGYRVKLLGITKRTSQGVELRVHPTLIPEKRLIANVNGAMNAVLVKGDAVGPTLYYGAGAGAEPTASAVVADIVDVTRTHTTDVHQRVPHLAFQPDQLVDLPILAIGEVSSAYYLRLRAVDKPGVLADVTRILGDRQISIDAMIQKEPQEGEDQADIIILTHVTAEKNMDDAIAAIEALPAISGSVTRLRMEELSR

SEQ ID NO: 6428 - DNA, 1332 bp, Burkholderia xenovorans LB400
  CDS (1)..(1332): transl_table=11
atggaaccgatcaaagttggactgctgggcttcggcacggtaggcagcggcaccttcacggtactgcgccgcaatcaggaagaaatcaaacgccgcgcgggccgcggcatcgagatcgcgcgcattgccgtgcgcaatcccgccaaagcgacggcggtgctcggcgccgaggcaggcaccgtggcgctgaccgatgacttcaacgcggtggtcgacgacccgtcgatcgatatcgtggccgaaatgatcggcggcacgggcgtggcgcgcgacctcgtgctgcgcgcgatccgcaaccgcaagcatgtggtgaccgccaacaaggcgctgctcgcggtgcacggcacggagattttcgaagcggcgcgcgccaacggcgtgatggtgtcgttcgaggcggcggtggcgggcgggattccgatcatcaaggcgctgcgcgaagggctcacggccaatcgcatccagtacattgcgggcatcatcaacggcaccacgaactacattctctcggaaatgcgcgaccgcgggctcgacttcgcgaccgcgctgaaagcggcgcaggacctcggttatgccgaagccgacccgaccttcgacatcgaaggcgtggacgccgcgcacaaggcgaccatcatgagcgcgatcgcgttcggcgtgccggtgcagttcgacaaggcctacgtcgaaggcatcagcaagctcgcggcgatcgacatcagatatgccgaggaactcggctaccgtatcaagctgctcggcattgcgcgccgcacagataaaggcatcgaattgcgcgtgcatcccacgctgattccggaaaagcgcctgctggcgaacgtggaaggcgcgatgaacgcagtcgtcgtgcacggcgacgcggtcggcaccacgctgtactacggcaagggcgcgggcgccgagcccacggcttccgcggtggtggccgatctggtcgacgtgacgcgtctgcacacggcggacccggagcaccgcgtgccgcatctggcgttccagccggacagcctgtcgaacaccccgatcctgccgatcgacgaagtgacgagcggctactacctgcgtctgcgggtggcggacgtgaccggcgtgctggctgacatcacgcgcattctggccgataccggcatttcgatcgacgcgctgctgcagaaggaatcggagcaggtcgacgcgaacggcaagggcgaaaccgacatcatcctgattacgcacgaaacggttgagaagaacgtcaacgccgcgatcaagacgatcgaagcgctgaagaccgttgtttcgcaagtcacgaagctgcgcatggaagcgctgaactag

SEQ ID NO: 6429 - protein, 443 aa, Burkholderia xenovorans LB400
MEPIKVGLLGFGTVGSGTFTVLRRNQEEIKRRAGRGIEIARIAVRNPAKATAVLGAEAGTVALTDDFNAVVDDPSIDIVAEMIGGTGVARDLVLRAIRNRKHVVTANKALLAVHGTEIFEAARANGVMVSFEAAVAGGIPIIKALREGLTANRIQYIAGIINGTTNYILSEMRDRGLDFATALKAAQDLGYAEADPTFDIEGVDAAHKATIMSAIAFGVPVQFDKAYVEGISKLAAIDIRYAEELGYRIKLLGIARRTDKGIELRVHPTLIPEKRLLANVEGAMNAVVVHGDAVGTTLYYGKGAGAEPTASAVVADLVDVTRLHTADPEHRVPHLAFQPDSLSNTPILPIDEVTSGYYLRLRVADVTGVLADITRILADTGISIDALLQKESEQVDANGKGETDIILITHETVEKNVNAAIKTIEALKTVVSQVTKLRMEALN

SEQ ID NO: 6430 - DNA, 1311 bp, Ralstonia metallidurans CH34
  CDS (1)..(1311): transl_table=11
atgaatcccatcaaagtcggccttctcggcatcggtaccgtcggtagcggcacgttcaacgtgctcaagcgcaatcaggaggaaattcgtcgccgtgcaggccgcggcatcgagattgcggtggtggctgacctgaacaccgagcgcgcccgcgagctgaccggtgggacggtggacgtcgtcagcgatgcgaacgacgtggtgacgcgtccggacatcgacatcgtcatcgagctgatcggcggctatggcatcgcccgcgagttggtgctcaaggcgatcgagaatggcaagcacgtggtcaccgccaacaaggcgctgctggccgtgcatggcaacgagattttcgaggccgcgcgcaagaagggcgtgatcgtcgccttcgaggcggcagtggcgggtggcatccccatcatcaaggcgctgcgcgaaggcctgaccgcgaaccgcatccagtggatcgccggcatcatcaacggcacgacgaacttcatcctgtccgagatgcgcgacaagggtctggatttcgataccgtgctcaaggaagcgcagcaactgggctatgccgaggccgatccgaccttcgacatcgaaggcgtcgacgccgcgcacaaggtcacgctgatgagcgcgatcgcattcggtatgccggtgcagttcgaccgcgcccacgtggaaggcatcaccaagctgtcggccatcgatatcaaatacgccgaggaactgggttatcgcatcaagctgctcggcatcacccgccgccgcgaggaaggcgtggaactgcgcgtgcacccgacgctggtgccggcctcgcgcctgatcgccaacgtggaaggcgcgatgaacgccgtgctggtgcagggcgatgccgtgggcgccactctgtactacggcaagggcgccggcgccgagccgaccgcctcggccgtgattgccgatctggtcgacgtgacccgcctgcacaccgccgatccgaaccaccgcgtaccgcacctggcattccagccggacgagctgtcgaacgtgcccgtgctgccgatcgacgaagtcactagctcgtactacctgcgtatgcgtgtgtcggacgaaactggcgtgctggcagagatcacgcgcatcctggcggaagccggcatcagcatcgacgcgatgctgcagaaggaatcgcgcgaaggcgagccgcagaccgacatcatcatcctgacgcacctgacgcgcgagaagcacgtcaatgccgcgattcgcagcatcgaagcgctccagaccgtgctgtcgccggtcacgcgcctgcgcatggaagaactgaactga

SEQ ID NO: 6431 - protein, 436 aa, Ralstonia metallidurans CH34
MNPIKVGLLGIGTVGSGTFNVLKRNQEEIRRRAGRGIEIAVVADLNTERARELTGGTVDVVSDANDVVTRPDIDIVIELIGGYGIARELVLKAIENGKHVVTANKALLAVHGNEIFEAARKKGVIVAFEAAVAGGIPIIKALREGLTANRIQWIAGIINGTTNFILSEMRDKGLDFDTVLKEAQQLGYAEADPTFDIEGVDAAHKVTLMSAIAFGMPVQFDRAHVEGITKLSAIDIKYAEELGYRIKLLGITRRREEGVELRVHPTLVPASRLIANVEGAMNAVLVQGDAVGATLYYGKGAGAEPTASAVIADLVDVTRLHTADPNHRVPHLAFQPDELSNVPVLPIDEVTSSYYLRMRVSDETGVLAEITRILAEAGISIDAMLQKESREGEPQTDIIILTHLTREKHVNAAIRSIEALQTVLSPVTRLRMEELN

SEQ ID NO: 6432 - DNA, 1314 bp, Rhodococcus sp. RHA1
  CDS (1)..(1314): transl_table=11
gtgacgagcgaatcggcgcatcgcgctatcggtgtggccgtcctcggcctcggcaacgtcgggagcgaggtggtgcgcatcctgcgggagcacagcgaagacctcgaggctcgcgtcggtgccccgctggaactgcgtggagtggccgtgcgccgccccggcaaggaccgcggaattcccgaggagttgcagaccaccgacgcggagtccctcgtggcccgcgacgacgtcgacatcgtcgtcgaggtgatcggcggcatggacctgccccgcaagctgatcctctcggcgctcaattccggcaagtccgtcgtcaccgccaacaaggcgctgctcgccgatcacaccggtgaactggccgaggcggcggaactgcacaacgtcgacctctacttcgaggccgccgtggccggtgcgatccccgtgatccgcccgctcatccagtccctcgccggtgaccgggtgaacaaggtcgccggaatcgtgaacggaaccaccaacttcatcctgtcggcgatggacgagaccggcgcggactacgccgcgaccctcgccgaggccggacgtctgggttacgccgaggccgacccgaccgccgacgtggagggttacgacgccgcggccaaggcggccatcctcgcgtcgatcgcgttccacacccgggtcaccgccgccgacgtgtaccgcgaggggatctccaagatcaccgcggccgacctgacgtcggctcgcgcactcgactgcacgatcaagctgctgtccatctgcgagcggatcgccacccccgagggcaaggagcggatttccgcgcgggtctacccggcgctcgtgccgctggaacatccgctggcctcggtcaacggtgcgttcaacgccgtcgtcgtcgaggcggagaacgccgggcgcctcatgttctacggccagggcgcaggcggcgcccccaccgcgtcggccgtgatgggcgacctggtgatggccgcgcgcaacaaggtgaacggcggccgcggcccccgcgagtccaagtacgccaagctgaagatcgcgccgatcggcgacatccccacgcggtactacgtcaacatgcaggtgacggacaaggccggggtcctgtcggcggtcgctgccgaattctcgcagcacggcgtcagcatctccaccgtgcggcaggaaggcgccggcgacggggcccgcctcgtcgtcgtcacccacgtcgcgacggattctgctctgtcggaaaccgttgaggcactgagcaaactcgaattcgtcaccgctgtgaccagcgtgctgcgactggaaggcaccgaacaatga

SEQ ID NO: 6433 - protein, 437 aa, Rhodococcus sp. RHA1
MTSESAHRAIGVAVLGLGNVGSEVVRILREHSEDLEARVGAPLELRGVAVRRPGKDRGIPEELQTTDAESLVARDDVDIVVEVIGGMDLPRKLILSALNSGKSVVTANKALLADHTGELAEAAELHNVDLYFEAAVAGAIPVIRPLIQSLAGDRVNKVAGIVNGTTNFILSAMDETGADYAATLAEAGRLGYAEADPTADVEGYDAAAKAAILASIAFHTRVTAADVYREGISKITAADLTSARALDCTIKLLSICERIATPEGKERISARVYPALVPLEHPLASVNGAFNAVVVEAENAGRLMFYGQGAGGAPTASAVMGDLVMAARNKVNGGRGPRESKYAKLKIAPIGDIPTRYYVNMQVTDKAGVLSAVAAEFSQHGVSISTVRQEGAGDGARLVVVTHVATDSALSETVEALSKLEFVTAVTSVLRLEGTEQ

SEQ ID NO: 6434 - DNA, 1305 bp, Trichodesmium erythraeum IMS101
  CDS (1)..(1305): transl_table=11
gtggtattcaaaatcggtttgttgggattaggaacagtcggtatagggacagcaaaaattttgctatccccacaaggtcgtcatcctttaattaatgaattggaaatataccgagttggagtgcgtgatatatccaaaactagggatattaatatatctccaaatattttaacaacagatttagaggcgatagctactgacccagatgtagacataataatagaactcatcggtgggttagaaccagcaagaagtctaattctcaaagctatcgaacatggtaaacatatagtcactgccaacaaagctgtcatctctcgttacggtccagaaatttttgatgcagctaataaaaaaagtgtctatgttatgttagaagcatcagtaggaggtggaattccagttattcaacccctcaaagaatctctaacagtaaatcgcattcattctattactggtatcatcaacgggacaactaactacatccttactaaaatgcaaaaagagggagcagactttgcagatgttcttgctgatgctcaaaagctgggttacgcagaggcaaatcccactgctgatgtggaagggttagatgccaaagataaaatcgccattcttggttcccttgcttttagtggtttcataaaattagaagacatttactgcgaaggtattcgtcaaataacagcagcagatattacctacgctgctcaactaaatttcgtaattaaattattagcgatcgccaagcaagctcctaaaaatactaacttcacctctgataaacttcaactcagagtacatcctaccctcattcccaaaactcatccccttgccagtatcaacgatgttgacaacgctatcttcattgaaggagaacccatcggacaagttatgttttttggtcctggtgccggtgctggtccaactgccagtgcagtagtttctgatattatgaatattgcggctattctgcaaacagaaaccgaacccattccccatccattattaagttgtactcatcaaaaatattgtgaaatagtacccataaaagaactgatcactagattttatgctcgtttcttaactcaagataaaccaggagtaataggtaaacttggtagttgttttggtaaatatagtgttagtttagaatctgtggtacaaacaggaatacataatcaacttgcagaaatagttgttgttacccgtgatgtacgagaaggcaacttccggcaagcattagaggaaattcaatcattagatgttattaatagcattcccagtatattaagggttttgtag

SEQ ID NO: 6435 - protein, 434 aa, Trichodesmium erythraeum IMS101
MVFKIGLLGLGTVGIGTAKILLSPQGRHPLINELEIYRVGVRDISKTRDINISPNILTTDLEAIATDPDVDIIIELIGGLEPARSLILKAIEHGKHIVTANKAVISRYGPEIFDAANKKSVYVMLEASVGGGIPVIQPLKESLTVNRIHSITGIINGTTNYILTKMQKEGADFADVLADAQKLGYAEANPTADVEGLDAKDKIAILGSLAFSGFIKLEDIYCEGIRQITAADITYAAQLNFVIKLLAIAKQAPKNTNFTSDKLQLRVHPTLIPKTHPLASINDVDNAIFIEGEPIGQVMFFGPGAGAGPTASAVVSDIMNIAAILQTETEPIPHPLLSCTHQKYCEIVPIKELITRFYARFLTQDKPGVIGKLGSCFGKYSVSLESVVQTGIHNQLAEIVVVTRDVREGNFRQALEEIQSLDVINSIPSILRVL

SEQ ID NO: 6436 - DNA, 1314 bp, Alkalilimnicola ehrlichei MLHE-1
  CDS (1)..(1314): transl_table=11
ttgaaaccggtcaaagtcggcctgctaggtctgggtaccgtgggcagcggtactgtgaatatcctggagcgcaacaacgacgagatcacccgccgcgccggccgtgagatccaggtggtggccgccgccgcccgccacctggaccgtccgcgcagttgccgcaccgagggtatccgcctgaccagcgaccccttccaggtggtcgatgaccctgagaccgagatcatcgttgagctgatcggcggctacgagccggcccgggagctggtgctgcgcgccatcgacaacggcaagcacgtggtgaccgccaacaaggcgctgatcgcccttcacggtaatgagatcttcgcccgtgcccgggacaagggcgtcaccgtggtcttcgaggcggcggtggccggcggcatcccgatcatcaaggccgtgcgcgagggcctgaccggcaaccgcatccagtggctggccggcatcatcaatggcaccgccaattacatcttcaccgagatgttctacgccgggcgcgagttcggcgaggtgctggcggaagctcagcgtctgggctatgccgaggccgaccccaccttcgacgtggagggcattgacgcggcgcacaagctcaccattctggcctccatcgccttcggcatcccgctgcagttcgacaaggtgcacgtggagggtatcgcccatgtcaccgccgaggatgtgggctgggcagaggagctgggctaccgcatcaaacacctggggatctgtgtgcacgaggaaaacggttactccctccgggtgcaccccacgctgctgccccagcggcacatgctcgccaacgtggacggggtgatgaacgcggtcatggtctgcggtgacgccgtgggccccacgctctactacggcccgggtgccggctccgagcccaccgcctccgcggtggtggccgacctggtggatgtggtgcgcgaattcaacctggagccggagaaccgcgtgccctacctggccttccagtcccacttcctgtccaacgacccggtgctggacatgggcgaggtggagagtgcctactacattcgcctgatggcccaggacgagccgggcgtgctcgccgaggtgacccgcatcctcggtgagttgggcatcagcattgaggcgatcatgcagaaggagccggccccgggcgccgaggacgtgccggtcatcttcctgacccaccgggtcaaggaacaccgcatgaacgccgctatcgaacagatcgaggccctgccggccgtcaatgggcgcctgacgcggatccgcgtcgagcgtttcgattcctga

SEQ ID NO: 6437 - protein, 437 aa, Alkalilimnicola ehrlichei MLHE-1
MKPVKVGLLGLGTVGSGTVNILERNNDEITRRAGREIQVVAAAARHLDRPRSCRTEGIRLTSDPFQVVDDPETEIIVELIGGYEPARELVLRAIDNGKHVVTANKALIALHGNEIFARARDKGVTVVFEAAVAGGIPIIKAVREGLTGNRIQWLAGIINGTANYIFTEMFYAGREFGEVLAEAQRLGYAEADPTFDVEGIDAAHKLTILASIAFGIPLQFDKVHVEGIAHVTAEDVGWAEELGYRIKHLGICVHEENGYSLRVHPTLLPQRHMLANVDGVMNAVMVCGDAVGPTLYYGPGAGSEPTASAVVADLVDVVREFNLEPENRVPYLAFQSHFLSNDPVLDMGEVESAYYIRLMAQDEPGVLAEVTRILGELGISIEAIMQKEPAPGAEDVPVIFLTHRVKEHRMNAAIEQIEALPAVNGRLTRIRVERFDS

SEQ ID NO: 6438 - DNA, 1326 bp, Rhizobium leguminosarum bv. viciae 3841
  CDS (1)..(1326): transl_table=11
atggcagatgccctcaaaatcggcattgcgggcttgggcaccgttggcgcctcgcttgtccgcatcattcagcagaaaagcaacgagcttgccgttacctgcgggcgtccgatcaccatcacggccgtttcggcacgtgacaaggcgagggaccgcggcatcgatctttccactgttacctggttcgaccggccggaagaccttgccgaaaaaggcgatatcgacgtcttcgtcgagttgatgggcggcgccgaaggggctgccaacgtctccgtgcgcacggcgctccagcgtggtctccatgtggtgacagccaacaaggcgctgcttgcctatcacggcgtcgagcttgcgacgattgccgaggagaagggttcgttgctgaacttcgaggcagcagtcgccggcggcatcccggtcatcaaggcgctacgcgaatcgctgacgggcaattccgtctcgcgcatctatggcatcatgaacggcacctgcaattacatcctgaccaagatggagaaggaggggctttccttcgccgaatgcctcaaggaagcgcagcggctgggctatgccgaggccgatccggccttcgatatcgagggcaacgacacggcccacaagctttccatcctcacgaccctcgccttcggcaatcagatcgccgccgacgacatctatctcgaaggcatcaccaacatctcgatcgaggatatccacgccgctgccgagctcggttatcgcatcaagctcttgggcgttgcccagcgcaccgataccggcatcgaacagcgcgtccaccccacaatggtgccggtcgattcggtcatcgcccaggtcgacggcgtcaccaatgcggtggcgatcgaatccgacgtgctcggcgaactgctgatggtcggcccgggcgctggcggcaacgccacggcctcgtcggtgcttggcgatatcgccgatatcgccaagagccagccgggcgcccagcgcgtgccggtgctcggccatcccgcagcgacgctggagccctaccgcaaggcgcagatgcagagccacgagggcggctatttcatccgcctgaccgtgctcgaccgcaccggcgtctttgccagcgtcgcaacccgcatggccgaaaacaacatatcgctggaatcgatcgtccagcgctccaaacagcatctggcgccatcgcaccaccagacgatcatcctcgtcacccacgcgacgacggaagaatcggtgcgcaaggcggtcgcctcgatcaagtcggaaggttatctcttcggtgagccgcaggtcattcgcatcgagcggcccaaggaagaaggctga

SEQ ID NO: 6439 - protein, 441 aa, Rhizobium leguminosarum bv. viciae 3841
MADALKIGIAGLGTVGASLVRIIQQKSNELAVTCGRPITITAVSARDKARDRGIDLSTVTWFDRPEDLAEKGDIDVFVELMGGAEGAANVSVRTALQRGLHVVTANKALLAYHGVELATIAEEKGSLLNFEAAVAGGIPVIKALRESLTGNSVSRIYGIMNGTCNYILTKMEKEGLSFAECLKEAQRLGYAEADPAFDIEGNDTAHKLSILTTLAFGNQIAADDIYLEGITNISIEDIHAAAELGYRIKLLGVAQRTDTGIEQRVHPTMVPVDSVIAQVDGVTNAVAIESDVLGELLMVGPGAGGNATASSVLGDIADIAKSQPGAQRVPVLGHPAATLEPYRKAQMQSHEGGYFIRLTVLDRTGVFASVATRMAENNISLESIVQRSKQHLAPSHHQTIILVTHATTEESVRKAVASIKSEGYLFGEPQVIRIERPKEEG

SEQ ID NO: 6440 - DNA, 1305 bp, Pseudomonas aeruginosa UCBPP-PA14
  CDS (1)..(1305): transl_table=11
gtgaaaccggtcaaagtaggcatctgtgggttggggaccgtcggtggcggtaccttcaatgtactcaaacgcaacgccgaggagattgcccgccgtgccgggcgcggtatcgaggttgcgcagatcgccgcccgccggccgaacccgaagtgcgataccggtgcgacccccatcaccgccgatatcttcgacgtagcgtgcaatcccgagatcgacgtggtcgtcgagttgatcggcggctacaccctggcccacgagctggtgctcaaggccatcgagaacggcaagcacgtggtcaccgcgaacaaggcgctgatcgccgtgcacggcaacgagatcttcgccaaggcccgcgagaagggcgtgatcgtcgccttcgaggccgctgtcgccggcggcatcccggtgatcaaggcgatccgcgaggggctgtcggctaaccgcatcaactggctggccgggatcatcaacggtaccggcaacttcatcctcagcgaaatgcgcgagaagggccgtaccttccccgacgtgctcgccgaggcccaggccctgggctatgccgaggccgacccgaccttcgacgtggaaggcatcgacgccgcccacaagctgaccatcctcgcctcgatcgccttcggcattccgctgcagttcgacaaggcctacaccgaaggcatctcgaaactgaccagcgccgacgtcaactacgccgacgccctcggctatcgcatcaagcacctgggcgtggcgcgtcgcaccgagagcggcttcgagctgcgcgtgcacccgaccctgattccctcggatcgcctgatcgccaacgtcaacggcgtgatgaacgcggtgatggtcaacggcgacgccgtcggctcgaccctctactacggcgccggtgccggcatggagccgaccgcttcctcggtggtggccgacctcgtcgacgtggtccgcgccatgacctccgatccggagaaccgcgtaccgcacctggcattccagccggacgcgctgtccgaccacccgatcctgccgatcgaagcctgcgaaagcgcctactacctgcgcatccaggccaaagaccacccgggcgtactggcccaggtggccaccatcctgtccgagcgcggcatcaacatcgaatcgatcatgcagaaggaggccgaggaacaggacggcctggtgccgatgatcctggttacccaccgggtcatcgaacaacgcatcaacgatgccatcgccgccctggaagcgctggaaggcgtgtccgggccggtggtccgtatccgtgtcgaacaactgaattga

SEQ ID NO: 6441 - protein, 434 aa, Pseudomonas aeruginosa UCBPP-PA14
MKPVKVGICGLGTVGGGTFNVLKRNAEEIARRAGRGIEVAQIAARRPNPKCDTGATPITADIFDVACNPEIDVVVELIGGYTLAHELVLKAIENGKHVVTANKALIAVHGNEIFAKAREKGVIVAFEAAVAGGIPVIKAIREGLSANRINWLAGIINGTGNFILSEMREKGRTFPDVLAEAQALGYAEADPTFDVEGIDAAHKLTILASIAFGIPLQFDKAYTEGISKLTSADVNYADALGYRIKHLGVARRTESGFELRVHPTLIPSDRLIANVNGVMNAVMVNGDAVGSTLYYGAGAGMEPTASSVVADLVDVVRAMTSDPENRVPHLAFQPDALSDHPILPIEACESAYYLRIQAKDHPGVLAQVATILSERGINIESIMQKEAEEQDGLVPMILVTHRVIEQRINDAIAALEALEGVSGPVVRIRVEQLN

SEQ ID NO: 6442 - DNA, 1299 bp, Oenococcus oeni PSU-1
  CDS (1)..(1299): transl_table=11
atgaaaaactatcgaattggaattttcggtttgggaacagtcgccagtgggttgataaaaatcctaaaaaaagaaaaaatcaactatcaaaatagattcaacgttaattttgagctttctcaagtagtagttcacgatctccaaaagaaacgcgctcctgaattcgatggattaaatatttccgatgatccggctaaaattatcgaagatccggctattgatatcgtaatcgaacttatcggcggcaagacagtggctaagaatataattgaagaatcgcttcaaaccggcaaacacgttatcacagctaataaagatttaatcgccagcgaaggacgaaaattaagtcgacttgccaaagaaaagcatgtcggtcttttttatgaagcagctgttgccggtgggatcccgattttaagatctctttccaatagcttagcttctgatgaaatcgaacaaatcaacggcatcgttaacggaacttccaattttattctttcacaaatgcgccagaacaaaatttcttatgcggctgccctaaaaacagctcaagaaaaaggttttgccgaagcagatccaagcaacgacgtcgacggaatcgatgctgcttataagctgcaaattttagctgattttacctttggaaaacaaatcaatcaacgagatattcaaatgggtggaattcgtacgattactcaagctgatttgcaggatgttactgatcttggttatgaaataaaacttttagccagtgcgacagttatttccaacaaattggaactatcagttgctccgacgcttgtccctaaagggcacccgttagcttcggttcaaaatgaaaataatgccgttttcgttaacggacgatattcaggtggtctgatgttctatggacccggtgccggcgaattcccaacagccaactcagttgccgctgatttaatagagctgactaaaaagatcgaccaaccggaaagcttcaacacgaatttttcttccgatttgacgctggcaaaaccaaaagatcgaattgccagtcgctatatcgttttcaacgtcgctaatcgtccaggagtgatgcacaagctatcggctttcttcctaatgagcgatatcaattttcgcaatattcgtcaatacgatccggttggcgacaatacccgtgttgtgatcattacctatccagcctcggatgcccaattgaatccggttaaaacaacaatcagaaaggctcggggtgttgagataattcatgaattcaagctcctaatcgagccaaaagaggttaccaatgcctga

SEQ ID NO: 6443 - protein, 432 aa, Oenococcus oeni PSU-1
MKNYRIGIFGLGTVASGLIKILKKEKINYQNRFNVNFELSQVVVHDLQKKRAPEFDGLNISDDPAKIIEDPAIDIVIELIGGKTVAKNIIEESLQTGKHVITANKDLIASEGRKLSRLAKEKHVGLFYEAAVAGGIPILRSLSNSLASDEIEQINGIVNGTSNFILSQMRQNKISYAAALKTAQEKGFAEADPSNDVDGIDAAYKLQILADFTFGKQINQRDIQMGGIRTITQADLQDVTDLGYEIKLLASATVISNKLELSVAPTLVPKGHPLASVQNENNAVFVNGRYSGGLMFYGPGAGEFPTANSVAADLIELTKKIDQPESFNTNFSSDLTLAKPKDRIASRYIVFNVANRPGVMHKLSAFFLMSDINFRNIRQYDPVGDNTRVVIITYPASDAQLNPVKTTIRKARGVEIIHEFKLLIEPKEVTNA

SEQ ID NO: 6444 - DNA, 1278 bp, Leuconostoc mesenteroides subsp. mesenteroides ATCC 8293
  CDS (1)..(1278): transl_table=11
atggaaataggcatcggtctttttggtctcggcacagttggaagtggtgtcgtaaaaattttacaacaaaacgctaatcaaattacccaacgcacgggatctcatttggtcgtacgtcatgccgtcgtacataatcttaataaaccgcgcacaggttttacacaagattttccaatcactgataatcctgaggatattttaggcaatgacgaaatacaaattgtagtagaagtcatgggtggaattgattatgcatacgatattatcaaacgcgcacttatggcaaaaaagcatgttgtcacggcaaacaaagatttaatcgcaagtcgtggacaagagttagctgaattagccaaccagaatggtgttgatttatattatgaagctgccgttgccggtggcgtgcctatcttgcgtacgctttcaagcagttttacggcagatgaaatttcacgtgtcgccggtatcattaacggcacaagtaactttattctaacgcaaatggctacaaatggtttaacgtatgcagaagcccttaaattagctcaagacaaaggttttgctgaatctgatcccacaaatgacgtggaaggttttgatgcagcatacaagttaattattttgtctaacttttcgtttggtgtgcaacctgttatggatgacgtaactattactggtattgccgacttaacggattcagatatcaacgatgcgcacggttttggctacgcaatcaaattgcttggtgttgcccaaagagttggtaatgcactcagtattgaggtttcccctcaccttgtttcgtttaaccatcccttagcgaccgttaacaatgaaaacaatgccgttttagttaatggtgagtcagttggtgaagtgatgctatatggaccaggcgctggtgaaatgcctactgctaattcggtattaagtgatttaaccaatgtcgctaccaatctagcgctgaatacgccaggaagaccatttaatacttttaaccaagatctagatttggctaaaccttcacagcgcgtggcaagacgttttattgttgtagaagtagctgacacgccaggagcaatgtattccgtaaccggtatgtttgcttccgcaaaaataagttttactgatttaaagcaaaccccagcaaaaaatggttttgctcgattagttgctctgacacacgctgcctctgatgcgcagctcaatgttattcgtacaacaatccgaaatgctgatggcattaatttagcggcggagtataaaattttctcatga

SEQ ID NO: 6445 - protein, 425 aa, Leuconostoc mesenteroides subsp. mesenteroides ATCC 8293
MEIGIGLFGLGTVGSGVVKILQQNANQITQRTGSHLVVRHAVVHNLNKPRTGFTQDFPITDNPEDILGNDEIQIVVEVMGGIDYAYDIIKRALMAKKHVVTANKDLIASRGQELAELANQNGVDLYYEAAVAGGVPILRTLSSSFTADEISRVAGIINGTSNFILTQMATNGLTYAEALKLAQDKGFAESDPTNDVEGFDAAYKLIILSNFSFGVQPVMDDVTITGIADLTDSDINDAHGFGYAIKLLGVAQRVGNALSIEVSPHLVSFNHPLATVNNENNAVLVNGESVGEVMLYGPGAGEMPTANSVLSDLTNVATNLALNTPGRPFNTFNQDLDLAKPSQRVARRFIVVEVADTPGAMYSVTGMFASAKISFTDLKQTPAKNGFARLVALTHAASDAQLNVIRTTIRNADGINLAAEYKIFS

SEQ ID NO: 6446 - DNA, 1353 bp, Solibacter usitatus Ellin6076
  CDS (1)..(1353): transl_table=11
atggggcgggggagggcaaaagcgccgggcttatgccaacatgatagggatatgcaagaagtgaatgttggcatcgtggggctgggcaacgtgggatccagcacgctggccatactggcagagaatggcgaccagatcgcgttgaagctcggttaccggctgaaggtggtggcggtgtgcagccggtcggtgcacacgaagaaaattcccgaagggctcggaccggtgttcaagaccaccgactggcgcgaggtggtctcgcatccggacgtgcagattgtggccgagctggtgggcggcacgagcgtggcatcggagattgtgaacgcggcgatcgccaacaagaagagcgtagttaccgccaacaaggaactgatggcggcgtgcggcccggagatttgggatcgcgcgattcaggcgggcatcaacctggcgatggaggcctcggtgtgcggcggcatcccgattcacgcggtgctgcgcgaaggcatttcgggcgaccgggtgcaggcgctctacggaatcctgaacgggacgtgcaactacattctcacggagatcgagaagaccggagcggcgatggagacgatgatcgccgaggcgcagcgactggggtacgcggaggcggacccgagcgcggacgtggacgggtacgacgcgcgcagcaaactggtgctcctggcggcgctggcgttcggcgagaagatcacgccgtcggacattttcatggagggaatccggcgcatcacgccgctggatttccagtacgcgaagacgttgaagcatacgatccggctggtctgcggcggccgcaagacgccggacggcttgatcctgttcgtgcggccggcgctgattccttcatcgacaattctggcgagcgtgcaggggccgtataacgcggtgtgggtgaagggcatgttcggggaggacactttctactacggctggggcgccgggcaccccacgggcgtggcggtggtgagcgacttgatgcgtgtggcgcgggaaattcgcggcgggtcgccggagcgcgtgtcgccgttcgcgcacgagcggctgggcgagaacaaaccgatttcggtgaagctgcagaagcgcgcgtactacctgcggttccgggtggaggaccgtccgggcatcatcgcgaagctggccgggattctggcgagcaagcacatcgggctggaggcggtattgcaggagccctgcgataccaaacacgatctgccgttcgtgattacgaccgagcagaccagcgaacaatcgatcggcgaggcaatcgacgagatgtcgcgcctggatttcatgcgggaggcgccgctggcgctgcccatggagaccgcgttatga

SEQ ID NO: 6447 - protein, 450 aa, Solibacter usitatus Ellin6076
MGRGRAKAPGLCQHDRDMQEVNVGIVGLGNVGSSTLAILAENGDQIALKLGYRLKVVAVCSRSVHTKKIPEGLGPVFKTTDWREVVSHPDVQIVAELVGGTSVASEIVNAAIANKKSVVTANKELMAACGPEIWDRAIQAGINLAMEASVCGGIPIHAVLREGISGDRVQALYGILNGTCNYILTEIEKTGAAMETMIAEAQRLGYAEADPSADVDGYDARSKLVLLAALAFGEKITPSDIFMEGIRRITPLDFQYAKTLKHTIRLVCGGRKTPDGLILFVRPALIPSSTILASVQGPYNAVWVKGMFGEDTFYYGWGAGHPTGVAVVSDLMRVAREIRGGSPERVSPFAHERLGENKPISVKLQKRAYYLRFRVEDRPGIIAKLAGILASKHIGLEAVLQEPCDTKHDLPFVITTEQTSEQSIGEAIDEMSRLDFMREAPLALPMETAL

SEQ ID NO: 6448 - DNA, 1320 bp, Magnetococcus sp. MC-1
  CDS (1)..(1320): transl_table=11
gtgaaagctttacgcgtaggcgttatggggtatggcacggttgggcgtggcgtagtgcgtatgttgttggatcatgccgacctgctggaggcccgaaccggttgtgcggtaaccctacgttatattgccgaccataataccgagagtgaccgaggtgtggtattgccagagacggttacgctgctaaacgatgcccataaaatgatcgagtccgaggatgtggatgtgatctgcgaattgatcggcggcaccggtattgccaaaaccctcgtgctcaaggcgctgcaacagggtaaacatgtggttacggccaacaaggcgctcattgccacccatggcaatgagctgattgccgctgccgatgcctcgggcgtagagctgatgtttgaagcctctacagcgggcaccatccccatcattaaatccctgcgtgaggcgctggcgggtaatgagatccgggagatttatggcattcttaatggcacctgtaattacattcttaccgagatgcgcgagaaggggttgccctttgagacggtgttggccgatgcccagcaaaagggttatgccgaggctgaccctacctttgatgtcgacggtattgatgccgcccataagctgaccattttagcctccatcgcatttggtatgccgctctcttttgatgcggtttcggtggaaggcattcggcatgtctctgcggtggatattgcttgggccacggagatgggctatcgcattaaactgctgggcattgccaagcgttgcgatggtaaggtgcagctacgtgtgcagccggtgttggttgaagaggagagcatgctgggcgccgtagaaggggtatttaatgcggtgtttgtcaacagcgactttgctggttctaccatgtattatgggcgtggcgctggcgaggagcctactgccagcgcggtggtttctgatctcattgatattgctcgcaatgtgcaagcaggggcgaagatgccgcgcatttatcccctcggtcagcctacggcccagcttagcatgcccaccatgtgcccggtagaagagatgcgggatgcctactatctgcgtctgtcggtattggatagacccggtgtgttggctgatattaccgcgatcttaaaagagcaccgggtctccattgatgccattgtgcagaaggagcgctcgccggtggagcatgtgcctttggtgattgtgacccatgaggtgacagagcggcagattttggataccgtggcggccattgaaaagatggattcggtcagtgataaaccccgcatgatccgcattgaggatcttggagtggcctag

SEQ ID NO: 6449 - protein, 439 aa, Magnetococcus sp. MC-1
MKALRVGVMGYGTVGRGVVRMLLDHADLLEARTGCAVTLRYIADHNTESDRGVVLPETVTLLNDAHKMIESEDVDVICELIGGTGIAKTLVLKALQQGKHVVTANKALIATHGNELIAAADASGVELMFEASTAGTIPIIKSLREALAGNEIREIYGILNGTCNYILTEMREKGLPFETVLADAQQKGYAEADPTFDVDGIDAAHKLTILASIAFGMPLSFDAVSVEGIRHVSAVDIAWATEMGYRIKLLGIAKRCDGKVQLRVQPVLVEEESMLGAVEGVFNAVFVNSDFAGSTMYYGRGAGEEPTASAVVSDLIDIARNVQAGAKMPRIYPLGQPTAQLSMPTMCPVEEMRDAYYLRLSVLDRPGVLADITAILKEHRVSIDAIVQKERSPVEHVPLVIVTHEVTERQILDTVAAIEKMDSVSDKPRMIRIEDLGVA

SEQ ID NO: 6450 - DNA, 1326 bp, Nocardioides sp. JS614
  CDS (1)..(1326): transl_table=11
atggagagcgacaagctcgccgcagagaaggcgctgagagtagccgtgctcggctgcgggtccgtggggtcgcaggtggtccggctgctcgaggagcaggcgcacgacctcgcagcccgggtcggtgcgcgggtcgagctggccggcgtcgccgtacgccggccggaggcgccgcgcgaggtggaggtccccacggagctgatcacgaccgacgccaccgcgctcgtcacccgcgaggacgtcgacctcgtggtcgaggtcatcgggggcatcgagccggcccgctcgctgatccttgccgccctcgagaacggcaagtcggtggtcaccgcgaacaaggcgctgctggccgaggacgggccgacgctgttcgaggcggcggagaaggccggccgcgacctctactacgaggctgcggtggccggggccatcccgatcctgcgcccgttgcgcgagtcgctggccggagaccgggtgacccgggtgctcggcatcgtcaacggcaccaccaacttcatcctcgaccggatggacagctcgggcgccggcttcgccgaggcgctcgaggaggcccaggagctcgggtacgccgaggccgacccgacggccgacgtcgagggcttcgacgccgctgccaaggccgcgatcctggcctccctcgccttccactcgcgggtcaccgcctcggacgtgcaccgcgagggcatctccgaggtcacggccgccgacgtccagtccgcgcgtgagatgaacagcgtcgtgaagctgctcgcgatctgcgagctccgcgtgaccgaggacgggcagagcgcggtcgcggtccgggtgcacccggcgatgatcccgcgcgaccacccgctcgcctcggtgcgcgaggcgttcaacgccgtcttcgtcgagtccgaggccgccggccagctgatgttctacggccccggggccggtggtgcgccgaccgcgtcggcggtcctcggtgacctcgtcaccgtggcgcgcaaccggctcgcgggcacccgcggcgccggcgagtcggcgtacgccgaccgcgccgtgctgccgatgggcgagacgctgacccggtaccacgtggcgatcgacgtcgacgaccgcgccggcgtcctcgcctcggtggcgacggcgttcgccgagaacggcgtgtcgatccagaccgtccggcaggagggtcggggagccgacgcgcagctggtcgtcgtctcccacgagtcgaccgacgcggcgttgcgcgccaccgtcgagcacctgcgcgagatggacatcgtgcgcgaggtgacgtccgtgatgcgtgtcgagggggcgaccgagtga

SEQ ID NO: 6451 - protein, 441 aa, Nocardioides sp. JS614
MESDKLAAEKALRVAVLGCGSVGSQVVRLLEEQAHDLAARVGARVELAGVAVRRPEAPREVEVPTELITTDATALVTREDVDLVVEVIGGIEPARSLILAALENGKSVVTANKALLAEDGPTLFEAAEKAGRDLYYEAAVAGAIPILRPLRESLAGDRVTRVLGIVNGTTNFILDRMDSSGAGFAEALEEAQELGYAEADPTADVEGFDAAAKAAILASLAFHSRVTASDVHREGISEVTAADVQSAREMNSVVKLLAICELRVTEDGQSAVAVRVHPAMIPRDHPLASVREAFNAVFVESEAAGQLMFYGPGAGGAPTASAVLGDLVTVARNRLAGTRGAGESAYADRAVLPMGETLTRYHVAIDVDDRAGVLASVATAFAENGVSIQTVRQEGRGADAQLVVVSHESTDAALRATVEHLREMDIVREVTSVMRVEGATE

SEQ ID NO: 6452 - DNA, 1308 bp, Azoarcus sp. BH72
  CDS (1)..(1308): transl_table=11
atgaaaccgatcaacgttggcctgctgggcatcggaaccgtcggcggcggtaccttcaccgtcctcaaacgcaacgaagaagaaatcacgcgtcgcgccgggcgtccgatccgaattaccgcggtggccgacaagaacctcgagctcgcccgcagcgtcaccggcggcggggtcaagctcaccgacgacgccttcgcggtcgtgaccgaccccgaagtcgatatcgtcgtcgaactgatcggcggctacggcatcgcccgcgaactggtgctgaaggcgatcgagaacggcaagcatgtggttaccgccaacaaggcgctgctcgcggtccacggcaacgaaatcttcgccgccgcgcaggcgcgcggcgtgatggtcgccttcgaggcggcggtggccggcggcattcccatcatcaaggcgctgcgcgaaggcctgtcggccaaccgcatccagtggctggccggcatcatcaacggcaccaccaacttcatcctgtcggaaatgcgcgacaagggcctgccgttcgccgacgtgctgaaggaagcccaggcgctcggctatgccgaagccgacccgaccttcgacatcgaaggcatcgatgccgcccacaaggcgaccatcatgagcgcgatcgccttcggcatccccatgcagttcgacaaggcctacgtcgaaggcatcaccaagctcgacgccgccgacatccgctacgcggagcagctcggctaccgcatcaagctgctcggcatcgcccgccgccgcgacgaaggcgtggaactgcgcgtgcatccgacgctgatcccggaaaagcgcctcatcgccaatgtggaaggcgcgatgaacgcggtgctggtgcagggcgacgccgtcggcgcgacgctgtactacggcaagggtgccggcgcagagccgaccgcctcggccgtcatcgccgacctggtcgacgtcacccgcctgcacaccgccgatccggaacaccgcgtgccccacctggccttccagccggaccaggtacaggacgtggcggttctgccgatcgaggaagtggtcacctcctactacctgcgcctgcgggtggatgacaagccgggcgtgctcgccgacatcacccgcatcctcgccgacagcgacatctcgatcgacgcgatgatccagaaggagccgggcgaaggcgaagcgcagaccgacatcatcatgctgacccaccagacggtggagaagaacgccaacgccgcgatcgccaagatcgaagcgctgccggtggtggtgggcaaggtcaccaagctgcggctcgaaaacctctga

SEQ ID NO: 6453 - protein, 435 aa, Azoarcus sp. BH72
MKPINVGLLGIGTVGGGTFTVLKRNEEEITRRAGRPIRITAVADKNLELARSVTGGGVKLTDDAFAVVTDPEVDIVVELIGGYGIARELVLKAIENGKHVVTANKALLAVHGNEIFAAAQARGVMVAFEAAVAGGIPIIKALREGLSANRIQWLAGIINGTTNFILSEMRDKGLPFADVLKEAQALGYAEADPTFDIEGIDAAHKATIMSAIAFGIPMQFDKAYVEGITKLDAADIRYAEQLGYRIKLLGIARRRDEGVELRVHPTLIPEKRLIANVEGAMNAVLVQGDAVGATLYYGKGAGAEPTASAVIADLVDVTRLHTADPEHRVPHLAFQPDQVQDVAVLPIEEVVTSYYLRLRVDDKPGVLADITRILADSDISIDAMIQKEPGEGEAQTDIIMLTHQTVEKNANAAIAKIEALPVVVGKVTKLRLENL

SEQ ID NO: 6454 - DNA, 1467 bp, Neisseria meningitidis FAM18
  CDS (1)..(1467): transl_table=11
gtgcaaaatcagacaaattcatgtaggattagcggatttcatctgacctctcctgctgatttcagacggcatttgattcaaagtgcggcacaattatatcggcagcggatattttcgtctttcaatatttacatttcagtcggcttacaaggagacacaatgaagccagtaaacatcggtcttttaggtttgggtacggtcggcggcggtacggctgccgtgttgcgggacaacgcggaggaaatttcccgccgcttggggcgcgaagtgcgcatcagtgccgtatgcgacttgagcgaagaaaaagcccgccaaatctgcccgtccgcagcctttgtcaaagatccgttcgaactggtcgcgcgtaaagacgtcgatgtcgtcgtcgaattgttcggcggcacgggcattgccaaagatgcggtgttgaaagccattgaaaacggcaaacacatcgttaccgccaacaaaaaactgctcgccgaatacggcaacgaaatcttcccgctggcggaagaaaaaaatgtcatggtgcaatttgaagcggcagtagcgggcggtatcccaatcatcaaagccctgcgcgaaggtttggcggcaaacaggattaaatccatcgccggcattattaacggcaccagcaacttcatcctctccgaaatgcgtgaaaaaggcagcgcgtttgccgatgtactgaaagaagcgcaggcactgggctatgccgaagccgacccgaccttcgacatcgaaggacatgacgcgggccataaaatcaccatcatgagcgcgctggcattcggcacgccgatgaacttttccgcctgctacctcgaaggcatcagcaaactcgacagccgcgacatcaaatacgccgaagaacttggctaccgcatcaaactgttgggcatcacccgcaaaaccggcaaaggcatcgagctgcgcgtccaccctaccctgattcccgaaagccgcctcttggcaaacgtcaacggcgtgatgaacgccgtgcgcgtcaacgccgatatggttggcgaaaccttatattacggcgcgggcgcgggcgcattgccgaccgcttccgccgtggttgccgatatcatcgacatcgcccgcctggttgaagccgataccgcccaccgcgtaccgcatctggcgttccaacccgcgcaagtccaagcgcaaaccatcctgcctatggacgaaattaccagcagctactacctgcgcgtccaagccaaagacgaaccgggcacgctggggcaaatcgccgcgctgttggcacaagaaaacgtgtccatcgaagcactgattcaaaaaggcgtgattgatcagaccactgccgaaatcgtgattctgacccacagcacggtcgaaaaacacatcaagtcggcaatcgcagccatcgaagcactggattgcgtggaaaaaccgattaccatgatccgcatggaaagcctgcatgactga

SEQ ID NO: 6455 - protein, 488 aa, Neisseria meningitidis FAM18
MQNQTNSCRISGFHLTSPADFRRHLIQSAAQLYRQRIFSSFNIYISVGLQGDTMKPVNIGLLGLGTVGGGTAAVLRDNAEEISRRLGREVRISAVCDLSEEKARQICPSAAFVKDPFELVARKDVDVVVELFGGTGIAKDAVLKAIENGKHIVTANKKLLAEYGNEIFPLAEEKNVMVQFEAAVAGGIPIIKALREGLAANRIKSIAGIINGTSNFILSEMREKGSAFADVLKEAQALGYAEADPTFDIEGHDAGHKITIMSALAFGTPMNFSACYLEGISKLDSRDIKYAEELGYRIKLLGITRKTGKGIELRVHPTLIPESRLLANVNGVMNAVRVNADMVGETLYYGAGAGALPTASAVVADIIDIARLVEADTAHRVPHLAFQPAQVQAQTILPMDEITSSYYLRVQAKDEPGTLGQIAALLAQENVSIEALIQKGVIDQTTAEIVILTHSTVEKHIKSAIAAIEALDCVEKPITMIRMESLHD

SEQ ID NO: 6456 - DNA, 1362 bp, Acidovorax sp. JS42
  CDS (1)..(1362): transl_table=11
atgaaaccgatccaagtgggcctgctgggcattggcaccgtgggcagcggcgtgttcaacgtcctgtcgcgcaaccaggaagaaatccgccgccgcgccggccgcggcatcgagattgcttgtgtggccgacctggacaccgcccgcgcacgcgccatcgtgggcgagaacgcccgcttggtgggcgatgcgcgcgaagtgatcgccaaccctgagatcgacatcgtggtcgagctgatcggcggctacggcatcgccaagcagctggtgctggaggcgatcgccgccggcaagcatgtcgtgacggccaacaaggccctgctggccgtgcatggcacggagatcttcaaggccgcggccgagaagggggtggtggtcgcctacgaggcggcggtggccggcggcattccgatcatcaaggcgctgcgcgaaggcctggcggccaaccagatccagtgggtggccggcatcatcaacggcacgaccaacttcatcctgtccgagatgcgcgacaagggcctggacttcgatgtggtgctcaaggaagcccaagcgttgggctacgccgaggccgaccccaccttcgacatcgagggcgtggacgccgcccacaaggccaccatcatgagcgccatcgccttcggtatcccggtgcagttcgacaaggcctacgtggagggcatcaccaagctgtccgccgtcgacatccgctatgccgagcaactgggctaccgcatcaagctgctggggatcgccaagcgccgccagggcgacgcgaccaagcgcacgcccgatggcgtggagctgcgcgtgcaccccgcgctggtaccggccaagcgcctgatcgccaatgtcgaaggcgcgatgaacgccgtggtggtgcacggggacgccgtgggcaccacgctgtactacggcaagggcgcgggcagcgagcccaccgccagcgccgtgatcgccgacctggtggacatcacccgcctgatcgaggccgaccccgcgcaccgcgtgccgccgctggccttccagagccacacgctgcgcgaggcggggcaggagctgcccgtgctgcccatggccgacgtggtcaccagctactacctgcgcatccgcgtggccgacgaggccggcgtgctggccaagatcaccggcatcctggccggcgcgggcatcagcatcgacgccgtgctgcagcgcgaggccgacgaggtgggcggcgaaggcagcacgcagaccgacctgatcatcctcacgcacgacacgcgcgagggcgacatggacgccgcgctcgcccaaatccagggcctgcccacggtgctggccagcatcacgcgcatccgcaaggaagagctcaacaactaa

SEQ ID NO: 6457 - protein, 453 aa, Acidovorax sp. JS42
MKPIQVGLLGIGTVGSGVFNVLSRNQEEIRRRAGRGIEIACVADLDTARARAIVGENARLVGDAREVIANPEIDIVVELIGGYGIAKQLVLEAIAAGKHVVTANKALLAVHGTEIFKAAAEKGVVVAYEAAVAGGIPIIKALREGLAANQIQWVAGIINGTTNFILSEMRDKGLDFDVVLKEAQALGYAEADPTFDIEGVDAAHKATIMSAIAFGIPVQFDKAYVEGITKLSAVDIRYAEQLGYRIKLLGIAKRRQGDATKRTPDGVELRVHPALVPAKRLIANVEGAMNAVVVHGDAVGTTLYYGKGAGSEPTASAVIADLVDITRLIEADPAHRVPPLAFQSHTLREAGQELPVLPMADVVTSYYLRIRVADEAGVLAKITGILAGAGISIDAVLQREADEVGGEGSTQTDLIILTHDTREGDMDAALAQIQGLPTVLASITRIRKEELNN

SEQ ID NO: 6458 - DNA, 1416 bp, Acidovorax sp. JS42
  CDS (1)..(1416): transl_table=11
atgttcgtagaaccccagctcagcccctcgcccgaggtgcacgccagtgcgcgccgcgccccggccccgccccctgccctgcgcgtgggcatgatcggcgccggcaccgtgggcagcggcgtgtggcgggtgctgcggcgcaaccgggacctcatcaacgcacgcgccgggcgcgccatcgagatcgtcgcggtcgccgcgcgcaacaccgcgcgtgccgctacggcgctggacggcgcgcccggcgtgcgcctgctggccgacccgctgcaactggccaccgaccccggtgtggacgtggtgctggagctggccggcggcaccggcgccgcacgcgactgggtgcaggccgcgctggtgcatggcaagcatgtggtgaccgccaacaaggccctgctggccacgcacggcgaggcgctggcgcagactgccgcgcgccacggccgggtgctggcctatgaagcggccgtggccggcagcgtacccgtgatcaaggcgctgcgcgaagggctggcggccaaccgcatcaccgcgctggcaggcgtgctcaacggcaccagcaactacatcctcacgcgcatgcaggcggcgggcctcggctttgccgccgcgctcaccgaagcccaggcactgggctatgccgaggccgatccggccttcgacgtggacggcaccgacgccgcgcacaagctggcgctgctggccgccaacgcgttcggcatgccggtgcggctggacgccgtgcatgtcgagggcatccgcgacctgcagcggggcgacgtggccgccgccgcgcatctgggctacgccgtcaagctgctggccgtggccgagcagcaggagtgcgagggccgcgtggccatccagctgcgcgtgcacccggccctggtgcccgcgcggcattcgctggcgctgctggacggcgcgaccaacgggctgctggtgcgcggcgacgcagccggcagcgcctttttcagcggcgcgggcgccggcggcgagcccacggcgagcgccgtgctggcggacctgatcgacctggcgcgcctgccggccgtttcttccccgacacccacgggccctggcgtgcccacactgggcacccaccgccgcgcggacgcccccgccgtactgccgatggcctcagtgaagacgccgcacctgctgcgcctgctgcccggtgcggccctgtgcgaaacggcagtgctacgggcgctggcgcgcgacggcgtcacggtgcggcgccgcacgtgggcggcacccgtcaccccgggcggagcgcccgagttgctgctgctcaccgcgccgacgcccgatgcgctggccgcagaggccacggcgcggttgcagacgcacacgggtgcgcaggtgcggcggctgcgcgtggagctgtgcagcgccctcacggatgaacaatag

SEQ ID NO: 6459 - protein, 471 aa, Acidovorax sp. JS42
MFVEPQLSPSPEVHASARRAPAPPPALRVGMIGAGTVGSGVWRVLRRNRDLINARAGRAIEIVAVAARNTARAATALDGAPGVRLLADPLQLATDPGVDVVLELAGGTGAARDWVQAALVHGKHVVTANKALLATHGEALAQTAARHGRVLAYEAAVAGSVPVIKALREGLAANRITALAGVLNGTSNYILTRMQAAGLGFAAALTEAQALGYAEADPAFDVDGTDAAHKLALLAANAFGMPVRLDAVHVEGIRDLQRGDVAAAAHLGYAVKLLAVAEQQECEGRVAIQLRVHPALVPARHSLALLDGATNGLLVRGDAAGSAFFSGAGAGGEPTASAVLADLIDLARLPAVSSPTPTGPGVPTLGTHRRADAPAVLPMASVKTPHLLRLLPGAALCETAVLRALARDGVTVRRRTWAAPVTPGGAPELLLLTAPTPDALAAEATARLQTHTGAQVRRLRVELCSALTDEQ

SEQ ID NO: 6460 - DNA, 1290 bp, Magnetospirillum magnetotacticum MS-1
  CDS (1)..(1290): transl_table=11
atgaccaaggcctcccctcttaaaatcgccatcgccggactgggcaccgtcggcggcggcaccgttcatctgctgcatgatcaggccgagttgctggccgcccgcgccgggcgccccctggccctggtcgccgccgccgccctggtcaagcccgccgatctgccgctggacggggtgacgttcttcgccgacgcccgcgacatggccaagacctgcgattacgacgtgctggtggaactgatcggcggcgccaagggcatcgctctcgacgtggtcaggacggcgctggagcgcggcaagtcggtggtcaccgccaacaaggccatgatcgcccataacggcatcgaactggcccgtctggccgaggccaagggcggcaatatcggcttcgaagccagtgtcggcggcggcattcccatcatcaagtccttgcgcgaaggcctggctggcaaccgcgtcagcaaggtgatgggcatcctcaacggcacctgtaactatatcctcaccaccatgcgcgattcggggcgcgacttcgccgacgtgctggccgaggcccaggccctgggctatgccgaggctgaccccagcttcgacatcgacggcaccgacaccgctcacaagctggccatcctggcctccctggctttcgccatgcccctggacatcgattccgtggcgtgcgagggcatccgcaatatcagcgcgctggacatccgctacgccgacgaactgggctaccgcatcaagctgctgggcgtggcctcggtttccgatcagggcgtcgagacccgcgtctatcccgccatggtaccgctggccttcccgctggcccatgtgagcggccccttcaacgccatcgtcaccgagggcgatttcgtcggccgcaccgtcctggaaggacggggcgcgggggcgcgccccaccgcgtccgccgtggtcgccgatctgatggatctggccaccggccgcgtgggccccacattcggcctgccggtcggcgtcctcaaggctttgcccgccgcgcccgctggcgcccaccgcagcgcctattacatccgcctgatggtcagggacgagcccggcgtcttcgccgacgtggcgggcgtcttgaaggcgcacaaagtctccatggagcagatcatccagcgcggccgctcgccgtcggaggtggtgccggtggtgatgaccgtgcacgagaccgacgaggcctccatgctgggcgccgtgaaaagcatccgggcgctggcttcggtcaccgatcttcagctcatccgcatcgagtcgctctag

SEQ ID NO: 6461 - protein, 429 aa, Magnetospirillum magnetotacticum MS-1
MTKASPLKIAIAGLGTVGGGTVHLLHDQAELLAARAGRPLALVAAAALVKPADLPLDGVTFFADARDMAKTCDYDVLVELIGGAKGIALDVVRTALERGKSVVTANKAMIAHNGIELARLAEAKGGNIGFEASVGGGIPIIKSLREGLAGNRVSKVMGILNGTCNYILTTMRDSGRDFADVLAEAQALGYAEADPSFDIDGTDTAHKLAILASLAFAMPLDIDSVACEGIRNISALDIRYADELGYRIKLLGVASVSDQGVETRVYPAMVPLAFPLAHVSGPFNAIVTEGDFVGRTVLEGRGAGARPTASAVVADLMDLATGRVGPTFGLPVGVLKALPAAPAGAHRSAYYIRLMVRDEPGVFADVAGVLKAHKVSMEQIIQRGRSPSEVVPVVMTVHETDEASMLGAVKSIRALASVTDLQLIRIESL

SEQ ID NO: 6462 - DNA, 1287 bp, Listeria monocytogenes str. 1/2a F6854
  CDS (1)..(1287): transl_table=11
gtggaagcaaagttacaagtaggtgtgttaggatttggaacggtaggtagcggtgttattcatattttagaagagcatcaagaaaaaattagtcaagtaactggatacaatatttctgttaagaaagtgctagttcgtgacttagaaaaaaatcgccgttatgaaacaaaaggttttgaactaaccaccaatccgtttgatgtactggatgatccagagattgctgttgttgtcgaggttatgggcagcatcacaactgcgcgggaatacattttgcaggccttgaaagctggaaaacatgtagtaactgcgaataaggatttgattgcgctacacggcgacgaattagtggcagttgcacaagctaataattgtgatttgttttatgaagcgagcgttgcaggtggaattccgattttacgtactatcgtaaacagcctagcggcggataaaattcaaaaagtaatgggtatcgtcaacgggacaaccaatttcatgctaacaaaaatgacgacagagaaaaagtcatacgaagatgttttagcagaagcccaagcactaggctttgccgagtctgacccaacgaatgacgtggacggaatcgatgcagctagaaaaatggttattatgacaagactcgcatttggaatgaatgtgaatttagataatgtagaaacaaacggtattcgtgggatttctcctgaagatatcgaagtagcgtaccaattaggctacaaaattaaactagtaggtactgccgaagaaacaaatggcacagttaatgtcaatgttgggccagtgttattaccaaaagcacatccacttgccggcgttaactatgaaaataatgccgtatttgtaacaggtgcagctgtcggagaaacaatgttttatggtcccggagccggcgaattaccaacagcgacaagtgttgttagtgatttgattactgttgcgaaaaatagccgtctaggtacaaacggtaatgctttcaacagctacaaacacgaaacaaaacatacaccaaaggaacaagttttctctaaatactatcttcgtctaacaatggacgataaaacaggaaccttccttaagttgacgcaaatttttgcagaagccggcgttggttttgataaaattttacaacaaccgtatgatgatttcacggcgaccgttgttatcgtgacacactcaacaagtcaagcgcaattagaacaagcaatcgctagggtcaaagatgagccagaaatgcaaatgctcgcaaaatattccgttgtggagggttaa

SEQ ID NO: 6463 - protein, 428 aa, Listeria monocytogenes str. 1/2a F6854
MEAKLQVGVLGFGTVGSGVIHILEEHQEKISQVTGYNISVKKVLVRDLEKNRRYETKGFELTTNPFDVLDDPEIAVVVEVMGSITTAREYILQALKAGKHVVTANKDLIALHGDELVAVAQANNCDLFYEASVAGGIPILRTIVNSLAADKIQKVMGIVNGTTNFMLTKMTTEKKSYEDVLAEAQALGFAESDPTNDVDGIDAARKMVIMTRLAFGMNVNLDNVETNGIRGISPEDIEVAYQLGYKIKLVGTAEETNGTVNVNVGPVLLPKAHPLAGVNYENNAVFVTGAAVGETMFYGPGAGELPTATSVVSDLITVAKNSRLGTNGNAFNSYKHETKHTPKEQVFSKYYLRLTMDDKTGTFLKLTQIFAEAGVGFDKILQQPYDDFTATVVIVTHSTSQAQLEQAIARVKDEPEMQMLAKYSVVEG

SEQ ID NO: 6464 - DNA, 1299 bp, Crocosphaera watsonii WH 8501
  CDS (1)..(1299): transl_table=11
gtggccgttaaaattggtttactgggtttgggaacagtgggaacgggaacagcacaaattttactcgaccccacaggtagaaaccccctgttagaagaaattaccatcagcaaagtaggggtacgatcgcccgataaaccccgtcaggtggaattaagcgaaggggtgatcaccaccgacttagaaagtattgtcaacgatccagaaattgcgatcgtcgtggaattattgggaggactcgaacctgccagatccctcattttacaagctattgccaacaaaaagcacgtagtgacagcaaataaagcagtaattgctcgttatggcgatgaaatctacgaagcagccaacgaagccggagtatatgttctcttagaagctgccgtgggtggtggtattcccatcattaaacccctgaaacagtctttaggggcaaatcggatcgtcagtattattggtattatcaacggcactaccaactatattttgaccaaaatgacctcagatggggcagactttggggaagtgttagccgaagcgcaacaattaggttatgctgaagccgatcccactgccgatgtggacgggttagatgcggccgataaaatcgctattttagcctctttagggttcgcaggaagggttaaacgagaagatatctactgtgaaggtatccgtgaaatcagtgcaacggatattacctacgccgagcaactaggttttgtgatcaaattattagccattgctcagggaacagaaggagaaaactcccaacaactagaattaagggttcatcccaccttagtaccgaaaaatcatcctttagccagtattaacggcgtttataacgctgttttggtagaaggaaaacccctgggacaagtgatgttttttggaccaggtgctggtgcgggacccacggccagcgcagtggtttctgatattatgaacattgtggcaattctcaagagtagtggtacaaataacaatcttgatcccttattaagttgtgttcatcagcatttttgtcaaattactcccatagaagccattaatacccgtttttatgcccgtttcctcaccaaagatttacctggggtaatcggttatttagggacaacctttggtgatcatcaggttagtttagagtcggtggttcaaattggttttcaaggggaacttgctgagattgtcgtcgtcactcactatgtccgtgaaggaaatttcaacactgctttagatgaaattcgtaatctagaagcgatcgatagtatccccagtattgtcagggttttgtag

SEQ ID NO: 6465 - protein, 432 aa, Crocosphaera watsonii WH 8501
MAVKIGLLGLGTVGTGTAQILLDPTGRNPLLEEITISKVGVRSPDKPRQVELSEGVITTDLESIVNDPEIAIVVELLGGLEPARSLILQAIANKKHVVTANKAVIARYGDEIYEAANEAGVYVLLEAAVGGGIPIIKPLKQSLGANRIVSIIGIINGTTNYILTKMTSDGADFGEVLAEAQQLGYAEADPTADVDGLDAADKIAILASLGFAGRVKREDIYCEGIREISATDITYAEQLGFVIKLLAIAQGTEGENSQQLELRVHPTLVPKNHPLASINGVYNAVLVEGKPLGQVMFFGPGAGAGPTASAVVSDIMNIVAILKSSGTNNNLDPLLSCVHQHFCQITPIEAINTRFYARFLTKDLPGVIGYLGTTFGDHQVSLESVVQIGFQGELAEIVVVTHYVREGNFNTALDEIRNLEAIDSIPSIVRVL

SEQ ID NO: 6466 - DNA, 1287 bp, Sulfitobacter sp. EE-36
  CDS (1)..(1287): transl_table=11
atgtcacaaccgcttcgtcttgggattgccggattgggcaccgttggggttggcgtggtgcggatcatccgcaagcaggctgccttgatcgaggcccgcacgggtcgccccgtcaccatcaccgccgtctctgcccgcagccgcgacaaggaccgcggcgtgacattgtcgggctacgcgtgggaagatgatcccgtcgcactggcaaaacgtgacgatgtggatgtctttgtcgaactgatgggcggcgacgaaggccccgccaaggacgcgaccgaagccgcgctcgcctcgggcaaggatgtggtcaccgccaacaaggcgctgctggcgatccacggtcaggcgctggccgaacaagccgaagccgcgggctgcctgatccgctatgaagccgccgtggccgggggcatccccgtgatcaaggcgctgacggaaagccttgccgggaacgagatcacccgcgtcatgggcgtgatgaacggcacctgcaactatatcctgacccgcatggaagagaccggaaacggctacaactccctgttcgaagaggccgaggcgcttggctatcttgaagcggacccgaaccttgatgtcggcgggattgacgcggcgcataagctggcgatcctgtcgtcgatcgcgtttggcacacaggtggatttcgacgggatcgagattgaaggcatccagcgcgtcagcatcgacgacattcaggctgccgcgaatatgggatacaagatcaagcttctcggcgtcgcgcaaatgaccggccgcgggctggaacagcgcatgcagccctgtcttgtgcccgacagctctccgctggggcaactcgcgggcgggaccaatatgatcgtgctggaaggcgatgcgatcgggcagatcgtcctgcgcggccccggtgccggcgaaggcccaaccgccagcgccgtattgtcggacatttgcgatatcgcacgcggctggcatggcccggtctttggccagcaggcggcaacgctcgcctcggccaccgcggccctgtcgcagcgccccgccgccttctatctgcgcatgggcctgctggacaaacccggtgccctggccaaagtcgccaccgttctgggcgaggccggcatcagcatcgaccgcatgcgccagaccgaacaccgcagcgatcaggcacccgtcttgatcgtcacccataaatgcagccgcaccgcgctggacgaggctctggccgcgatggcgaaaaccggtgtgctggcaagcgatcccgtggcgctgcggatcgaggatctgtaa

SEQ ID NO: 6467 - protein, 428 aa, Sulfitobacter sp. EE-36
MSQPLRLGIAGLGTVGVGVVRIIRKQAALIEARTGRPVTITAVSARSRDKDRGVTLSGYAWEDDPVALAKRDDVDVFVELMGGDEGPAKDATEAALASGKDVVTANKALLAIHGQALAEQAEAAGCLIRYEAAVAGGIPVIKALTESLAGNEITRVMGVMNGTCNYILTRMEETGNGYNSLFEEAEALGYLEADPNLDVGGIDAAHKLAILSSIAFGTQVDFDGIEIEGIQRVSIDDIQAAANMGYKIKLLGVAQMTGRGLEQRMQPCLVPDSSPLGQLAGGTNMIVLEGDAIGQIVLRGPGAGEGPTASAVLSDICDIARGWHGPVFGQQAATLASATAALSQRPAAFYLRMGLLDKPGALAKVATVLGEAGISIDRMRQTEHRSDQAPVLIVTHKCSRTALDEALAAMAKTGVLASDPVALRIEDL

SEQ ID NO: 6468 - DNA, 1287 bp, Roseovarius nubinhibens ISM
  CDS (1)..(1287): transl_table=11
atgagccagcctctgcgccttgggattgccggtctggggaccgtcggcaccggagtggtcaagattgtccgccaaaaggccaatctcctgtcgatgcgcgccggtcggcccatcgagatcaccgccgtgtccgcccgctcgcgcagcaaggaccggggcatcaacatcaaccattacgcctgggaagatgatcccgtggtgctcgcccagcgcgacgatgtcgatgtcttcgtcgagctcatgggcggcagcgacggccccgccaaggccgcgaccgaggccgccatcgccgccggcaaagatgtggtcaccgccaacaaggcgcttttggcgcatcacggtcaggccctcgcgctcagcgccgaagaggccggccgcgtgatccggttcgaggctgccgtcgcgggcggcatcccggtgatcaaggcactgaccgaaggtctcgccgggaatgaaatcacccgcgtcatgggcgtgatgaacggcacctgcaactatatcctgacccggatgcaatcggcgggcctgccctatgatgtggtctttgaagaggccaatcagctcggctatctcgaggccgatccgacgctcgacgtgggcggcatcgacgccggtcacaaactgtcgctgctggcctccatcgcctttggcacacaggtcgatttcggcgcggtcgaactggaagggatcgagcggatcaccatccaggacattcaccacgccgctgatctcggcttccggatcaaacttctgggcgtgtgccagatgaccggtcgcgggctcgaacagcgcatgtcgccctgtctcgtcccggccgagagcccactgggccagctcgagggcggcacgaacatgtgcgtgctcgaaggcgatatggtcgaacagatcgtgctccgtggtcccggcgcgggcgaaggcccgaccgccagcgccgtgatgggcgatgtgatggatatcgcgcgtggcttccgggtctcgacctttggcatgcccgcagccgagctgagcgccgccaaaccggcccaggccgtgacccccgccccctattacctgcgcatttcgctcgacgacaaacccggggcgctggccaaggtcgccaaggcgctgggcgaggcgggcgtttccatcgaccgcatgcgtcaggtccgccatgacgaggccaccgcgccggttctcatcgtcacccataaaaccacccgcgccgcgctcgaagaggcgctggcccatatggccggtctcgatgtcattgccgagacgccggtggcgctgcgcatcgaaaaggtctga

SEQ ID NO: 6469 - protein, 428 aa, Roseovarius nubinhibens ISM
MSQPLRLGIAGLGTVGTGVVKIVRQKANLLSMRAGRPIEITAVSARSRSKDRGININHYAWEDDPVVLAQRDDVDVFVELMGGSDGPAKAATEAAIAAGKDVVTANKALLAHHGQALALSAEEAGRVIRFEAAVAGGIPVIKALTEGLAGNEITRVMGVMNGTCNYILTRMQSAGLPYDVVFEEANQLGYLEADPTLDVGGIDAGHKLSLLASIAFGTQVDFGAVELEGIERITIQDIHHAADLGFRIKLLGVCQMTGRGLEQRMSPCLVPAESPLGQLEGGTNMCVLEGDMVEQIVLRGPGAGEGPTASAVMGDVMDIARGFRVSTFGMPAAELSAAKPAQAVTPAPYYLRISLDDKPGALAKVAKALGEAGVSIDRMRQVRHDEATAPVLIVTHKTTRAALEEALAHMAGLDVIAETPVALRIEKV

SEQ ID NO: 6470 - DNA, 1287 bp, Oceanicola batsensis HTCC2597
  CDS (1)..(1287): transl_table=11
atgagcggcaggatacgtctgggaatcgccggattgggcaccgtcggggtcggcgtggtgcgcatcgtccggcgcgaagcggcccttctgtcggcccgcaccggcaaggagatcgtgatttccgccgtctcggcccggacccgcgacaaggaccgtggcgtgccgctgacggggtatgactgggaagacgacccggtgaccctggccacccgcgacgacgtggatgtcttcgtcgaactcatgggcggctcggacgggccggccaaggccgcgaccgaggccgcgctcaaggccggcaaggatgtcgtgaccgcgaacaaggcgatgctggccgtgcacggtcaggcgctggccgaactcgccgagggcaacgggcgggtgatccgctacgaagccgcggtcgccggggggatcccggtggtcaagtccctgatcgaggggctggccggcaatgccatcacccgcgtcatgggggtgatgaacggcacctgcaattatatcctcacccggatggaaagcgccggcctgccttacgacgccgtctttgaagaggccaaccagctggggtttctcgaggccgacccggaactggacgtgggcggcatagacgccggtcacaagcttgcgctgctggcctccgccgccttcggcactcaggtcgccttcgacgcgatggaacttgagggtatcggccggctgacgatcgaggacatccgggcggccggggacatgggctatcggatcaagctgctgggcgtcgcgcggatgactgggcggggtctggaacagcgcatggcgccctgcctcgtgcccatgacctcgccgctcgggcaactcgaaggcggcaccaacatggtcgttctcgaaggcgacacggtcgagcagatcgtcctgcgcggaccgggcgcgggcgaaggtccgacggcctcggccgtcctggcggacatctgcgacatcgcccggggggtacgcctgcccgtcttcggccagcccgcctcgacccttgccgccgccacgcccgcgagatcggtaacacccgcggcctactacctgcgcatgacgctgcaggacaagccgggcgcgctggccaagatcgccgccgttcttggcgaggccgggatctcgatcaaccggatgcgccagtacgatcacgagggcgagcacgccccggtcctgatcgtgacgcaccgcaccggccgggacgcgctggatcgcgcgctgtcggcgatggagcggaccggcgtcgtcaagtcctcgccggtggccatccggatcgaggaagtctga

SEQ ID NO: 6471 - protein, 428 aa, Oceanicola batsensis HTCC2597
MSGRIRLGIAGLGTVGVGVVRIVRREAALLSARTGKEIVISAVSARTRDKDRGVPLTGYDWEDDPVTLATRDDVDVFVELMGGSDGPAKAATEAALKAGKDVVTANKAMLAVHGQALAELAEGNGRVIRYEAAVAGGIPVVKSLIEGLAGNAITRVMGVMNGTCNYILTRMESAGLPYDAVFEEANQLGFLEADPELDVGGIDAGHKLALLASAAFGTQVAFDAMELEGIGRLTIEDIRAAGDMGYRIKLLGVARMTGRGLEQRMAPCLVPMTSPLGQLEGGTNMVVLEGDTVEQIVLRGPGAGEGPTASAVLADICDIARGVRLPVFGQPASTLAAATPARSVTPAAYYLRMTLQDKPGALAKIAAVLGEAGISINRMRQYDHEGEHAPVLIVTHRTGRDALDRALSAMERTGVVKSSPVAIRIEEV

SEQ ID NO: 6472 - DNA, 1326 bp, Erythrobacter sp. NAP1
  CDS (1)..(1326): transl_table=11
ttggctaccaacgcgtccacttcatcgcctctgcgcatcgccatcgccgggctcggcacggttggcgtcggggtcatccggctgctcggcaccaaccgcgacctgatcgccgcacgcgctggccgtgcgatcgaagtcgtcgcggtgagcgcgcgcgaacggcacaaggatcgcggcgtagaaaccggctcctatgcctgggaagatgacatgacggcgcttggcgcgcgcgatgatgtcgatgtggtggtcgagcttgtcggcggatcggacgggcccgcgctcgccttgtcgcgcgcggcgctcaaaggcggcaaggggctggtcaccgcgaacaaggcgatggtcgcgcatcatgggcttgagcttgccgaggctgccgaagctgcgggcgcgccgctcaaattcgaagcagctgtagccggcgggattccggtggtgaaaggccttcgcgaaggcaccagcgccaacgcgctcaccaaggtctacggcatcctcaacgggacctgcaattacatcttgtccgagatggaagagaccggcgcggatttcgccgaaacgctctccgaagcgcaggcgctgggttatgccgaggccgacccgaccttcgatatcgaggggatcgacgccgcccacaagctcgcaattcttgcagcgatcgggtttggcgcaaaggttgatttcgccagcgtcgccaccaccggcatcgtccaggtgcgcgctgccgatattgcgcaggccgatgcgctcggcttcgtcatccgcctgatcgcagaggccgatgtgcaggacgaagacggtacgcccaagctgctacagcgcgtgcgcccgtgccttgtcgccaagggccaccccttgagctcggtcgatgggcccaccaatgcggttgtcgcagaaggcaatttttcaggccgcctgctgtttcagggcgcgggcgccggcgatggaccgactgcgagcgcggtggttgccgaccttatcgacattgcgcgctctgaagtgggcgcaccattctcgatgccagtcgatcagctgcaggcgctcggccccgcacagcccggccaccgcacagagcgaacctatctgcgcttcaccgtcaaggaccgccctggcgtgctcgcagagatcacagccgcgatgcgcgacgccgatgtctcgatcgagagcctgatccagcaggggcgcgagcatggcggcggcgaagtgctggtcgcgatggtcacgcatgaagggcctgaagcgaacgtcaccgaggcgctcgcgctgctcgaaggatcggaaagcctgaccggcgagccgctggttctgcctatcctgccggcctag

SEQ ID NO: 6473 - protein, 441 aa, Erythrobacter sp. NAP1
MATNASTSSPLRIAIAGLGTVGVGVIRLLGTNRDLIAARAGRAIEVVAVSARERHKDRGVETGSYAWEDDMTALGARDDVDVVVELVGGSDGPALALSRAALKGGKGLVTANKAMVAHHGLELAEAAEAAGAPLKFEAAVAGGIPVVKGLREGTSANALTKVYGILNGTCNYILSEMEETGADFAETLSEAQALGYAEADPTFDIEGIDAAHKLAILAAIGFGAKVDFASVATTGIVQVRAADIAQADALGFVIRLIAEADVQDEDGTPKLLQRVRPCLVAKGHPLSSVDGPTNAVVAEGNFSGRLLFQGAGAGDGPTASAVVADLIDIARSEVGAPFSMPVDQLQALGPAQPGHRTERTYLRFTVKDRPGVLAEITAAMRDADVSIESLIQQGREHGGGEVLVAMVTHEGPEANVTEALALLEGSESLTGEPLVLPILPA

SEQ ID NO: 6474 - DNA, 1317 bp, Oceanospirillum sp. MED92
  CDS (1)..(1317): transl_table=11
atgcgaggtgcaggtttgaaaccggttaaagtaggtatctgcgggcttggtacagtcggtggtggcacatttaatgtgctgaagcgtaatgccgaagagattgctcgtcgggcaggacgtaagattattgttgaagagattggtgcgcgtcgcattaatccagactgcgataccaaaggcacccagatgaccagcgatgttttagaagtcgctcgtaatccggaaattgatgttgttgttgaattgattggtggttatgacgtggcgaaagagctcgttttaactgctatcgagcatggcaagcatgttgtaacagcgaataaagcgctgattgctgttcatggtaatgagatctttgaagctgcgcagaagaaaaatgtcatggtggcatttgaagcatcagtcgcaggcggaatcccgatcattaaggcgatccgtgaaggtctgtctgcgaacaagattaactggcttgcgggtatcattaatggtactggcaacttcatcatgacagagatgcgcgataaaggccgcgactttgatgatgtgctaaaagaggcgcaggagctgggttatgctgaagctgatccaacctttgatgttgaaggtattgatgcagcccacaagttgactattcttgcttctctggcatttggcatgcctctgcagtttgagaaagcgtttactgaagggatcagtaaaattacccgtgatgatgttcagtacgctgaagagctaggttatcgcattaagcatctgggtattacgcgccgtgcagaaaacggtgtagaactgcgtgtacacccgactttgattccagaaactgctttgatcgctaatgttaatggtgtgatgaacgctgtgcttgttgacggtgatgctgtaggacagacaatgtattacggcccaggagcaggtgcagaaccaacggcttctgcggttgtagctgatatcgttgatgtggttcgtaccctgacagctgatcgcgataatcgtgttcctcatcttgcgttccagcctagtgagctatctgatgcagcaatcttaccggttgagcaaacagaatctgcttactacctgcgtatgaatgcagaagaaaagccgggagtgctcgcgaaaattaccagtattctgggtgaacagggaatcaatattgaagcgattatccagaaagaaacttctgaagatcaggtgcctgtgattatcctgacgcagtctgtcctggagcagaaattaaacgacgctattgctcaaattgaagcgctagctgaaatcggtggcagcgtgactcgtattcgcgttgagcactttgacagctaa

SEQ ID NO: 6475 - protein, 438 aa, Oceanospirillum sp. MED92
MRGAGLKPVKVGICGLGTVGGGTFNVLKRNAEEIARRAGRKIIVEEIGARRINPDCDTKGTQMTSDVLEVARNPEIDVVVELIGGYDVAKELVLTAIEHGKHVVTANKALIAVHGNEIFEAAQKKNVMVAFEASVAGGIPIIKAIREGLSANKINWLAGIINGTGNFIMTEMRDKGRDFDDVLKEAQELGYAEADPTFDVEGIDAAHKLTILASLAFGMPLQFEKAFTEGISKITRDDVQYAEELGYRIKHLGITRRAENGVELRVHPTLIPETALIANVNGVMNAVLVDGDAVGQTMYYGPGAGAEPTASAVVADIVDVVRTLTADRDNRVPHLAFQPSELSDAAILPVEQTESAYYLRMNAEEKPGVLAKITSILGEQGINIEAIIQKETSEDQVPVIILTQSVLEQKLNDAIAQIEALAEIGGSVTRIRVEHFDS

SEQ ID NO: 6476 - DNA, 1281 bp, Oceanobacter sp. RED65
  CDS (1)..(1281): transl_table=11
gtgaaaccggtaaaagtaggaatatgcggcctaggtaccgtcggtggcggcaccttcaatgtacttactgagaacaatcatgacattgcacgtcgtgccggtcgtgagattattattgagcaggtaggtacgcgtcgccctaatcctgcctgtgataccagtaacacacaggtaacggatgatatttttgccgtagccgagaatccagaaatcgatatcttagttgagctgattggtggttatgatgttgctcgtgagctggttttaaaggcgattgagaacggcaagcacgtagttacggcgaacaaagcgcttattgcagtgcatggtgccgaaatttttgcagcggcgaaaaaagcgggtgtgactgtgggatatgaagcgggcgtagctggtggtatccctgtgattaaagcaattcgcgagggcttggccgcgaatcacattgagcgtgtcgcaggtatcatcaatggtacgggtaattttatcttgaccgagatgcgcgacaaggggcgtgatttcgatgatgtactgcaagaagcacaagcattaggttacgcagaagccgatccaacgtttgacgtggaaggtattgatgcagctcataagctgaccatcctatcttctattgcctatggtattccgctacagtttgagaattgtttcacagaaggtatcagcaaaattactcgtgatgatgtgcaatatgctgaagagcttggctatcgtatcaagcacttagggattagcgcgcgcaccagcactgggatcgatttgcgtgtgcatccaacgcttgtgccactagacaacatgattgctaaagtagacggtgttatgaatgctgtggctgtaaagggtaacgctgtaaatgatacgttattctgcggtccaggtgctggggctggtccgacggcatctgcggtggttgcggatattattgatatcgctcgagagatctctattgaaccactggcgtttaatagcttagaagatgtgcgcgtattgccaatcgaagaagttgaaactggatactacttacgcatgcaagctttggataaagccggtgtaatggcacgtgttgccagtatcctaagtaataacggcatcaacatcgaagccattattcagaaagagcctgccgaaggcgaaattcttgttcccattatcatgctgactcacaaggtccaagaaaaggtgatgaaccaagctatcgccgaaattgaagattacggggatatcaacggcagtgttacaaaaatccgtgttgagcatcttaattaa

SEQ ID NO: 6477 - protein, 426 aa, Oceanobacter sp. RED65
MKPVKVGICGLGTVGGGTFNVLTENNHDIARRAGREIIIEQVGTRRPNPACDTSNTQVTDDIFAVAENPEIDILVELIGGYDVARELVLKAIENGKHVVTANKALIAVHGAEIFAAAKKAGVTVGYEAGVAGGIPVIKAIREGLAANHIERVAGIINGTGNFILTEMRDKGRDFDDVLQEAQALGYAEADPTFDVEGIDAAHKLTILSSIAYGIPLQFENCFTEGISKITRDDVQYAEELGYRIKHLGISARTSTGIDLRVHPTLVPLDNMIAKVDGVMNAVAVKGNAVNDTLFCGPGAGAGPTASAVVADIIDIAREISIEPLAFNSLEDVRVLPIEEVETGYYLRMQALDKAGVMARVASILSNNGINIEAIIQKEPAEGEILVPIIMLTHKVQEKVMNQAIAEIEDYGDINGSVTKIRVEHLN

SEQ ID NO: 6478 - DNA, 1296 bp, Desulfitobacterium hafniense DCB-2
  CDS (1)..(1296): transl_table=11
atgcaggtcgttaagattggactgctgggtctcggaaccgtcggcagtggcgtaattcagatccttgagcaaaatgctaatgatatacagaaccgttccctaagtcagattaaagtctccaaggtcctggtgcggaaccttaaggctccccgctcaatcgcaggggattttactctaaccgatcaagccgccgatgttctcaccgaccccgacatcagtattgtcgtcgaagtgatgggcggcattgaaccggccaaaacctatatattagaagcttttaaacaagggaagaatgtggtgaccgccaataaggaccttttggcccttcatgggcaagagcttttggatgcggctaaagaagctggcaaagatctttattttgaagccagtgtagccggcggcattcctattatcgccgccctgaagcagtctctggccgggaatagaatctctgaagtcctggggattattaacggcaccaccaactatatcctgaccgctatgaccgagcagggccgggattatcaggaagtcctgaaggaagctcaagagttaggttatgcggaagccgacccgaccgcagatgtggacggactggatgccgcccgcaagctggccatcctcgcctccatcgcctttaactcccgggtcaccgtcaatgatgtctatgtggaagggatcgccaagatcacttccgaagacatcgcctatgcccgtgaactcaattccaccatcaaacttctggctgtggctaaagctcaggccgacggcatcgaggttcgtgtccaccctgcctttgtgcccgacaaccatcccctggctgctgtcagcggagtttttaatgctatctatgtggtgggagacgccgttggcgaaaccatgttctatggccggggtgccgggtccctgcccactggaagtgccgttgtctccgatatcattcaagtggtccggaatatcaatgcggattctacggctaacattaattgcacttgttacaatgaattagccatcaaaagcgaacaggattttaaaagcgctttctatatccggctgcgggtcaaggatgaaccccgggttctggctaccctagccctgcttttcgccgaagccggggtgagctttgcttccatcattcaaaaacagaaaaaacgccaggaagcggaaatcgtcctggtcacccaccccactcaggaatcctgcttgcgtgaagctctggattcggtccgggcctacagcaaagtgctctccatccacaatgtgattcgttttgaatcaggtgagcattacgactag

SEQ ID NO: 6479 - protein, 431 aa, Desulfitobacterium hafniense DCB-2
MQVVKIGLLGLGTVGSGVIQILEQNANDIQNRSLSQIKVSKVLVRNLKAPRSIAGDFTLTDQAADVLTDPDISIVVEVMGGIEPAKTYILEAFKQGKNVVTANKDLLALHGQELLDAAKEAGKDLYFEASVAGGIPIIAALKQSLAGNRISEVLGIINGTTNYILTAMTEQGRDYQEVLKEAQELGYAEADPTADVDGLDAARKLAILASIAFNSRVTVNDVYVEGIAKITSEDIAYARELNSTIKLLAVAKAQADGIEVRVHPAFVPDNHPLAAVSGVFNAIYVVGDAVGETMFYGRGAGSLPTGSAVVSDIIQVVRNINADSTANINCTCYNELAIKSEQDFKSAFYIRLRVKDEPRVLATLALLFAEAGVSFASIIQKQKKRQEAEIVLVTHPTQESCLREALDSVRAYSKVLSIHNVIRFESGEHYD

SEQ ID NO: 6480 - DNA, 1311 bp, marine gamma proteobacterium HTCC2080
  CDS (1)..(1311): transl_table=11
atgacgagtctaaaaattggagtttgtggcttgggtaccgttggaagcggtgtcatcaagctctttaataatcatcaaggtcttattcagcagcgctgtaacgctgatttacagttagtgcatattggtgcccgccgcgataacgctggttgtgacacaagcaggtatcgcgttagccgggatattttcgaggtcgtgcgtgaccctgaagtggatatcgtggtggaattaatcggtggcaccacggtggcacgcgatctagttacccaggcgattcaagcgggtaagcatgtggttacagccaataaagcgcttattgccgaatttggaaatgaactgatcgccttggcagagcaagcccaagtcgcactgagattcgaagcagctgttgccggtggcataccggtgattaaagtgcttcgcgaatctctggcggctaatgttgttagtggtgtggcaggcattatcaacggcacaggcaatttcattttgaccgaaatggccaatgcaggccgtagctttgatgatgtactggcagaagcgcaggcgctggggtacgcagaagctgatccaaccttcgatgttgatggaaccgatgctgcccataagctggttatattggcatccattgccttcggtataccgctggacgccaatgctcccattatggaaggcattgacaccgtgacccctgaagatcttaattttgccaaagagctgggcttctgcgttaagcatttggggattgccaggcgctgcggagacgcgattgatttgcgggttcaccccacgttgattccgtcgaatcgccaaatagctcgggtcgatggcgttttaaatgccgttatgattgaggctgacgctgtgggcgaaattgtactgacagggcccggagcgggatcattgccaacagcatcgtcggtatgcagcgacctaatggatttgggtaaggttctcaaccacactaaaatcgatcctgcgccgatactaggagtgcccagcgatcagcttcaggctctgccgttagtacctagagatgaggtttctggtgtttggtatctgcgcctagtcgtcgaggatcgcccgggtgtcatggcggacataaccggcttactgagtgagcgcggcatcagcattgagtcgcttattcagcgtcccccggtcgccggatctagccaggtcacggtcgtaatacttactgactctgtggcgtgtggtcggctcgatgctgcaatctgtgatatggaatctctgcccgcactcagtggctcggtggtgcggctgcgagttgagagctttaaggaggtctga

SEQ ID NO: 6481 - protein, 436 aa, marine gamma proteobacterium HTCC2080
MTSLKIGVCGLGTVGSGVIKLFNNHQGLIQQRCNADLQLVHIGARRDNAGCDTSRYRVSRDIFEVVRDPEVDIVVELIGGTTVARDLVTQAIQAGKHVVTANKALIAEFGNELIALAEQAQVALRFEAAVAGGIPVIKVLRESLAANVVSGVAGIINGTGNFILTEMANAGRSFDDVLAEAQALGYAEADPTFDVDGTDAAHKLVILASIAFGIPLDANAPIMEGIDTVTPEDLNFAKELGFCVKHLGIARRCGDAIDLRVHPTLIPSNRQIARVDGVLNAVMIEADAVGEIVLTGPGAGSLPTASSVCSDLMDLGKVLNHTKIDPAPILGVPSDQLQALPLVPRDEVSGVWYLRLVVEDRPGVMADITGLLSERGISIESLIQRPPVAGSSQVTVVILTDSVACGRLDAAICDMESLPALSGSVVRLRVESFKEV

SEQ ID NO: 6482 - DNA, 1317 bp, Candidatus Desulfococcus oleovorans Hxd3
  CDS (1)..(1317): transl_table=11
atgaaacagatcaacataggcatcttgggctgcggcaccgtgggcagcggcacggcccgtatcctgctggaaaaacagaagctgatttcagaccgcaccggcatcaatgttcacctgaaaagcattgccgacattgatcccacccggggcaaagacctgcccctggcagacggggtcatgacaaccgatgccggggccgtggtggacgacccggaaattcagatcatcgtggagctgatcggcggcaagaccctggccaaggagctgatcacccgggccattgacaacggcaagcacattgtcaccgccaacaaggccctgctgtcggcccatggcaacaccctctttcccctggccgcacaaagaggggtggacctggcctacgaggccagtgtgggcgggtgcatgcccattatcaagtcgatccgggagtccctggtgggcaacgccatcggctccatccggggtattttaaacggcacctgcaactacattctctcccgcatgaccgccgagggatgcgcctttgacgaggtgctggccgacgcccaggcaaacgggtttgccgaggccgatcccacccttgacgtagacgggtttgacgcggcccacaaactggccatcttaaacgccatcgccttcggcatgaccatcaacctggaggacgtctatgtagagggcattcgccggatcacgcccatggacatcgagtttgccgcggacttcggctacacggtcaagctgctggccatcagcaagcagaccaacggcgccgtggaggcgcgggtccatcccaccatgatctcccacgataatatcctggccagcgtcaacggctcgttaaacgcggtaacggtttccggcgactgcgtggaaaatgttctgctttacggccacggcgcggggaaaatgcccacggccagcgccgttgtaagcgacatcgtggacatcgcccgcaacctcgtgttcggggcccctggccggattccggcccttgcttaccggcccgaagcgattcgcaccataccggtgctgcccatcgaccggctgcacacccgctactacctgcgatttaccgcggaaaaccagcccggcgtgctctccaagatcgccggtgccctgggcagccacaacatcagcatcaagtcggtcaaccagaagggccggttttacggagaccacacccccctggtgatgatgacctacaaggcctgcgaggcggacatgaaaaaggccctggccgacatcgcggcccttcacatcgtggccgacgatcccatcgtggtccgcatcgaagaggacaacggcggtttataa

SEQ ID NO: 6483 - protein, 438 aa, Candidatus Desulfococcus oleovorans Hxd3
MKQINIGILGCGTVGSGTARILLEKQKLISDRTGINVHLKSIADIDPTRGKDLPLADGVMTTDAGAVVDDPEIQIIVELIGGKTLAKELITRAIDNGKHIVTANKALLSAHGNTLFPLAAQRGVDLAYEASVGGCMPIIKSIRESLVGNAIGSIRGILNGTCNYILSRMTAEGCAFDEVLADAQANGFAEADPTLDVDGFDAAHKLAILNAIAFGMTINLEDVYVEGIRRITPMDIEFAADFGYTVKLLAISKQTNGAVEARVHPTMISHDNILASVNGSLNAVTVSGDCVENVLLYGHGAGKMPTASAVVSDIVDIARNLVFGAPGRIPALAYRPEAIRTIPVLPIDRLHTRYYLRFTAENQPGVLSKIAGALGSHNISIKSVNQKGRFYGDHTPLVMMTYKACEADMKKALADIAALHIVADDPIVVRIEEDNGGL

SEQ ID NO: 6484 - DNA, 1353 bp, Pseudomonas putida GB-1
  CDS (1)..(1353): transl_table=11
atgtttcacggtcggcaagcgtgtcgaccgttcaatggggagttcacagtgaaaccggtcaaagtaggcatctgtgggttggggaccgtcggtggcggaaccttcaatgtacttcagcgcaacgccgaggagattgcccgccgtgccgggcgcggtattgaagtggcacagatcgccatgcgctcgcagaacccgaactgccagattaccggtacccccattaccgctgacgtgttcgaagttgcgagcaacccggagattgacattgtcatcgagctgatcggtggctataccatcgcccgcgacctggtgcttaaggccatcgaaaacggcaagcacgtggtcaccgccaacaaggcgctgattgccgtgcacggcaacgaaattttcgctaaagcccgcgagaagggcgtcattgtcgccttcgaagcggctgtggccggtggcatcccggtcatcaaggctatccgcgaaggcctgtcggccaaccgcatcaactggctggccggcatcatcaacggcaccggcaacttcatcctcaccgaaatgcgtgagaagggccgcgccttcccggacgtgctcgccgaagcgcaggcgctgggttacgccgaagccgacccgacgttcgacgtcgaaggcatcgacgccgcgcacaagctgaccatcctggcgtccatcgcgttcggcattccgctgcaattcgacaaggcctacaccgaaggcatcacccagctgaccacggcggacgtgaactacgccgaggccctgggctaccgcatcaagcacctgggtgttgcccgtcgcaccgccgaaggtatcgagctgcgcgtgcacccgacgctgatcccagccgaccgcctgatcgccaacgtcaacggcgtgatgaacgccgtcatggtcaacggtgacgcggccgggtctaccctgtactacggcgcgggcgctggtatggagcccaccgcttcgtcggtggtcggcgacctggtcgacgtggtccgtgccatgacctccgacccggaaaaccgcgtgccgcacctggccttccagccagactcgttgtcggcccacccgatcctgccgattgaagcctgcgaaagcgcctactacctgcgcattcaggccaaggatcacccgggcgtactggcccaggtggccagcattctctcggagcgtggcatcaacatcgagtcgatcatgcagaaggaagccgaggagcaggacggcctggtgccgatgatcctgctgacccatggtgtggtcgagcagcgtatcaacgatgccatcatcgccctggaagccctgcaggacgtggtcggcaaggttgtgcgcattcgcgtcgaacagctcaactaa

SEQ ID NO: 6485 - protein, 450 aa, Pseudomonas putida GB-1
MFHGRQACRPFNGEFTVKPVKVGICGLGTVGGGTFNVLQRNAEEIARRAGRGIEVAQIAMRSQNPNCQITGTPITADVFEVASNPEIDIVIELIGGYTIARDLVLKAIENGKHVVTANKALIAVHGNEIFAKAREKGVIVAFEAAVAGGIPVIKAIREGLSANRINWLAGIINGTGNFILTEMREKGRAFPDVLAEAQALGYAEADPTFDVEGIDAAHKLTILASIAFGIPLQFDKAYTEGITQLTTADVNYAEALGYRIKHLGVARRTAEGIELRVHPTLIPADRLIANVNGVMNAVMVNGDAAGSTLYYGAGAGMEPTASSVVGDLVDVVRAMTSDPENRVPHLAFQPDSLSAHPILPIEACESAYYLRIQAKDHPGVLAQVASILSERGINIESIMQKEAEEQDGLVPMILLTHGVVEQRINDAIIALEALQDVVGKVVRIRVEQLN

SEQ ID NO: 6486 - DNA, 1302 bp, Marinobacter sp. ELB17
  CDS (1)..(1302): transl_table=11
ttgaaacaggtcagtgtcggaatttgcggactcggaaccgtgggcagcggaaccttcaaggtactcactcgcaacgcggcgatcattgccggcaggtcagggtgcaacatccagattacccgcattgccagccgaaccccccgctcagacattgacctgggcggggttcccttcagcactgacatctatgacgtggtgaacgatcccgccattgatattgtggtggaagtgattggcggctacgatgccgctaaagagctggtgctgaccgcgatcaaaaacggcaagcacgtggtcaccgccaacaaagcgctgattgcagagcacggcaccgaaattttcgccgcagctgaaaaagccggcgtaatcgtggcttatgaagctggcgtggccggtggtattccggttataaaagccattcgtgaaggcctggcgggcaaccgcattgactggattgccggcatcatcaacggcaccggtaactacattctgaccgaaatgcgcgccggccgtgaatttgccggcgtgttgaaagaagcccaggctctgggctacgccgaagcagacccgacctttgacgtggaaggcatagatgcggcccacaagctcaccattctggcctcggccggcttcggtgtgccgctgcagttcaacaaagcctacaccgaaggtatctccaaaattaccccttacgacatcgcccacgccgaacagttgggttatcgcatcaagcatctgggcattgcccgccgccgcgaaaacggcatagagctgcgagttcaccccacgcttgtgcccgagaaccacctgattgcacgggtagacggcgtgctgaacgccattctggtagacggcgacgccgttggccaaaccatgtactacggccccggtgccggcgacgaagccaccggttccgccgtggttgccgacattatcgacgttgcccgcatcgtcgcgagcggcagcagcttgcgcgtaccctttctgggttttgcaccagaagcgatggaaaatctacccgtattggaaatggaagacgtgcagtcggcgtattatctgcgtatcaccgcgtttgatcgcccaggtgtgctggccaacatcgcggctattttgagcgacagcggcatcaacatagaatccatcatgcaaaaagaattcgaagtgaaagacggccgcatcccggtgattatcctgactcacacagtgcaggaacggcagatgaacggcgccattgcagaattggaaaacctgccggacatagacggccaggttgttcgtattcgcgctgaaaactttaactaa

SEQ ID NO: 6487 - protein, 433 aa, Marinobacter sp. ELB17
MKQVSVGICGLGTVGSGTFKVLTRNAAIIAGRSGCNIQITRIASRTPRSDIDLGGVPFSTDIYDVVNDPAIDIVVEVIGGYDAAKELVLTAIKNGKHVVTANKALIAEHGTEIFAAAEKAGVIVAYEAGVAGGIPVIKAIREGLAGNRIDWIAGIINGTGNYILTEMRAGREFAGVLKEAQALGYAEADPTFDVEGIDAAHKLTILASAGFGVPLQFNKAYTEGISKITPYDIAHAEQLGYRIKHLGIARRRENGIELRVHPTLVPENHLIARVDGVLNAILVDGDAVGQTMYYGPGAGDEATGSAVVADIIDVARIVASGSSLRVPFLGFAPEAMENLPVLEMEDVQSAYYLRITAFDRPGVLANIAAILSDSGINIESIMQKEFEVKDGRIPVIILTHTVQERQMNGAIAELENLPDIDGQVVRIRAENFN

SEQ ID NO: 6488 - DNA, 1302 bp, Streptomyces clavuligerus
  CDS (1)..(1302): transl_table=11
atgatgctgacgcgtccgctgaaggtggcgctgctgggctgtggagtggtcggctcagaggtggcgcgcatcatgacgacgcacggcgacgaccacgccgccaggatcggcgcccccgtcgaactggcgggggtggccgtgcgcaggccctccaaggtacgggcgggcatcccgcaggagctcatcaccaccgacgccaccgcgctcgtcaaacgcggcgacatcgacgtcgtcatcgaggtcatcggcggcatcgagcccgcccgcaccctcatcaccaccgccttcgagcacggcgcctccgtcgtctccgccaacaaggcgctgctggccgaggacggtgcgacgctctacgccgccgccgagcgccacggccgcgacctctacttcgaggccgcggtcgccggggcgatcccgctgatcaggccgttgcgcgagtcctcgccggggaacaaggtcaaccgggtgctcggcatcgtcaacggcaccaccaacttcatcctggaccggatggacagctccggcgccggctacaccgaggccctggacgaggccaccgcgctcggctacgccgaggccgaccccaccgccgacgtcgagggcttcgacgccgccgccaaggccgccatcctcgccgggatcgccttccacacccgggtccggctcgacgatgtgcaccgcgaggggctgaccgaggtcaccgccgccgacatggcctcggcccggcggatgggctgcaccgtcaagctgctcgccatctgcgagcgcgccgccgacggccggtcggtcacggcccgggtgcaccccgcgatgatcccgctcagccacccgcttgcctccgtgcgcgaggcgtacaacgcggtcttcgtcgagtcggaggccgccgggcagctcatgttctacggcccgggcgccggcggtgcccccaccgcgtccgccgtcctcggcgacctcgtcgccgtgtgccgcaacaagctcgccggtgcgacagggccgggggagtccgcgtacacccagctccccgtgagccccatgggcgaggtggtcacgcggtaccacatcagtctcgacgtggccgacaagccgggtgtcctcgcccaggtcgcgacggtcttcgccgagcacggggtgtcgatcgacaccgtgcgccagcaaggacgacaggactcctccggcgaggcgtcgctcgtcgtcgtcacccaccgcgcgcccgacgccgcccttcaggggaccgtcgaggcgctgcgctcgctcgacaccgtgcgcggtgtcgccagcatcatgcgtgttgaaggggagtaa

SEQ ID NO: 6489 - protein, 433 aa, Streptomyces clavuligerus
MMLTRPLKVALLGCGVVGSEVARIMTTHGDDHAARIGAPVELAGVAVRRPSKVRAGIPQELITTDATALVKRGDIDVVIEVIGGIEPARTLITTAFEHGASVVSANKALLAEDGATLYAAAERHGRDLYFEAAVAGAIPLIRPLRESSPGNKVNRVLGIVNGTTNFILDRMDSSGAGYTEALDEATALGYAEADPTADVEGFDAAAKAAILAGIAFHTRVRLDDVHREGLTEVTAADMASARRMGCTVKLLAICERAADGRSVTARVHPAMIPLSHPLASVREAYNAVFVESEAAGQLMFYGPGAGGAPTASAVLGDLVAVCRNKLAGATGPGESAYTQLPVSPMGEVVTRYHISLDVADKPGVLAQVATVFAEHGVSIDTVRQQGRQDSSGEASLVVVTHRAPDAALQGTVEALRSLDTVRGVASIMRVEGE

SEQ ID NO: 6490 - DNA, 1287 bp, Carnobacterium piscicola
  CDS (1)..(1287): transl_table=11
atgaaaaaacaaattcaagtaggtatattaggttttggaacagtaggtagtggtgtgattcgcattttaaaagatcataatgaaaaaattggtcaagtaacaggtgaagaaatttcgataaaaaaggtcttagtccgaaatattgaaaaaaatcgaggattaatttctgaagggatcgaattaacgacaaatgcagatgacattttaaatgattctgaaattgcagttgtattagaagtgatgggaagtatagatgttgctaaagagtatattagtcgagcattaaaagctggaaaacatgttgtcacagccaataaggatttaattgctttacatggcaaggaattagtagctttagctaaagaaaatcaatgtgacctttattatgaagcaagtgttgctggaggaattcccattttaagaacaattgtggatagtctagcttcagataatatcaaaaaagttttgggtattgtaaatggaacaactaattttatgttgactaaaatgacagctgaaaataaatcgtatgaagaggttctaaaagaggctcaagatttaggttttgctgagagcgatcctacaaatgatgtcgatgggattgatgctgctcgtaagatggttattttaacacggttagcttttgggatgcatgttgatttagaccaaatcgaaactcgaggaatccgtcatgtgaaatcaattgacattgagactgctaaacaattgggttataaaatcaagttaattggttcagctgaagaggccaatggcagtgttgttgttgatgtagggcctgtattggttccacaagatcatcctctagcaggggtgcacaatgagaataatgcagtagttgttcaaggagcagctgtaggtgaaacgatgttttatggtccaggagcaggagaattgccaacggcaacgagtgtcgtaagtgatttgattactgtagctaaaaatattcgtttaggtacaacgggaaatgtatttaactcttatcagttagagactaaattgactccagatgaagaagtttatgcaaaatattatttagcaattgaaatgttagacaaaacgggattatttttagaattaactaagatttttgcagcgagtgatgttggatttgataagattatccaagaaccgcaagctagtcaaacatctaaagtcgttattattacccataaaatgaataagaaacaacaaaaagaaattttaaaacaagtggaacaagcaaaagatatggacttgttagttcattttaaagtaatggaaggctaa

SEQ ID NO: 6491 - protein, 428 aa, Carnobacterium piscicola
MKKQIQVGILGFGTVGSGVIRILKDHNEKIGQVTGEEISIKKVLVRNIEKNRGLISEGIELTTNADDILNDSEIAVVLEVMGSIDVAKEYISRALKAGKHVVTANKDLIALHGKELVALAKENQCDLYYEASVAGGIPILRTIVDSLASDNIKKVLGIVNGTTNFMLTKMTAENKSYEEVLKEAQDLGFAESDPTNDVDGIDAARKMVILTRLAFGMHVDLDQIETRGIRHVKSIDIETAKQLGYKIKLIGSAEEANGSVVVDVGPVLVPQDHPLAGVHNENNAVVVQGAAVGETMFYGPGAGELPTATSVVSDLITVAKNIRLGTTGNVFNSYQLETKLTPDEEVYAKYYLAIEMLDKTGLFLELTKIFAASDVGFDKIIQEPQASQTSKVVIITHKMNKKQQKEILKQVEQAKDMDLLVHFKVMEG

SEQ ID NO: 6492 - DNA, 1314 bp, Methylobacillus flagellatum
  CDS (1)..(1314): transl_table=11
atgaaacccatcaatgttggcctgcttggcatcggtactgtcggtggcggcacctataccgttcttacacgcaatcaggaagaaatcgcgcgccgtgctggtcgcccgattgccatcacgcgcgttgccgaccgcaatctggaattggcccgcaaggtcacggcaggtcaagttgacgtgactgacgacgcatttgccgtggtggcagatcccagcatcgacatcgtggtcgagctgatcggcgggtgcactgtcgcacgcgaattggtgatgaaggcgatcgaacatggcaagcatgtggtcaccgccaacaagggcctgatcgcgttgcacggtaacgagatttttgccgcggcgcagcagaagggggtgatcgttgcttttgaagctgcggtggcagggggtattcccatcatcaaggccgtacgcgagggcctggccgccaaccgtatcgagtggattgcgggcatcatcaacggtaccaccaatttcatcctctcggaaatgcgtgagaaggcgctggcctttgctgatgtgctcaaggaggcgcagcgcctgggctatgccgaggccgacccgaccttcgacgttgagggtgtggatgcggcgcacaagctcatgatcctggctgcaattggcttcggtatcccaatgcagttcgacaaggcctatgttgaaggcatcagcaagctggactccattgatatccgttatgcggaagagctgggctaccgcgtcaagctgcttggcattaccaagcgcaccagccaaggcgtggagctgcgcgtgcacccgaccttgatccccgaaaagcgcctgattgccaatgtcaacggcgccatgaatgcggtgctggtgaagggggacgcggttgggcctaccttgtattacggcgcaggcgcaggtgccgagcccaccgctagcgccgtggtggctgatattgtcgacgtaacgcgcacacacacgaccgatgtgcaccaacgcgtccctcacctggcgttccaacccgaccagctcgtggatttgcccatcctggcaatcggcgaggtgagcagcgcttattacctgcgcgtgcgcgcggtggacaagccaggcgtgctggccgatgtgacccgcatcctgggtgaccgccagatttcgattgatgccatgatccagaaagaaccacaggaaggcgaagaccaggccgatatcatcatcctgacccatgtcacggccgagaagaacatggatgacgcgattgccgccatcgaggcattgcctgccatttccggcagcgtgacccgcttgcgtatggaagagctgagccgataa

SEQ ID NO: 6493 - protein, 437 aa, Methylobacillus flagellatum
MKPINVGLLGIGTVGGGTYTVLTRNQEEIARRAGRPIAITRVADRNLELARKVTAGQVDVTDDAFAVVADPSIDIVVELIGGCTVARELVMKAIEHGKHVVTANKGLIALHGNEIFAAAQQKGVIVAFEAAVAGGIPIIKAVREGLAANRIEWIAGIINGTTNFILSEMREKALAFADVLKEAQRLGYAEADPTFDVEGVDAAHKLMILAAIGFGIPMQFDKAYVEGISKLDSIDIRYAEELGYRVKLLGITKRTSQGVELRVHPTLIPEKRLIANVNGAMNAVLVKGDAVGPTLYYGAGAGAEPTASAVVADIVDVTRTHTTDVHQRVPHLAFQPDQLVDLPILAIGEVSSAYYLRVRAVDKPGVLADVTRILGDRQISIDAMIQKEPQEGEDQADIIILTHVTAEKNMDDAIAAIEALPAISGSVTRLRMEELSR

SEQ ID NO: 6494 - DNA, 1287 bp, Lactococcus lactis subsp
  CDS (1)..(1287): transl_table=11
atggcagtaaatatagcaattttggggtttgggacagttggcacagggcttccaactttactttcagagaataaagagaaattagcaaaaatattggatgaagaaatcgtcatttcaaaagttttgatgagagataataaggcaattgaaaaggccagaagtcaaggttttaattatgattttgtcttaaatttggacgatattttagctgattcagaaatttcaattgtcgttgagctgatgggacgaattgaacctgctaagacctacattactcaagcgatagaagcaggtaaaaacgtcgtcacggctaacaaagacttgctggctgttcatggggtggaacttcggagtttagctcaaaaacatcatgtagccctttattatgaagcggcagtcgctgggggaattcctattttaagaactttggctaattcattttcatctgataaaattacacatctgttgggaattcttaatggaacaagtaattttatgatgacgaaaatgagtgaagaaggctggacttatgatgaatccttggctaaagctcaagaacttggttatgctgaatccgacccaacaaatgatgtagacggaattgatgccagttataaattagctattttaagtgaatttgcatttggaatgacgcttgcgccggatgacattgctaaatctggtttgagaagtattcaaaaaactgatgtcgagattgcacaacaatttggttatgttttaaagttgactggtgaaattaacgaagttgattcaggaatttttgctgaagttagtccaacttttctgcctaaatcacatccacttgccagtgtaaatggggtcatgaatgctgtattcattgaatcagagggcattggagattcggtgttttatggtgcaggagcgggtcaaaaacccacagctacgagtgttttagcagatattgtccgaattgttaaacgtgtcaaagatgggacaattggaaaatcatttaatgaatatgcacgttctacaagtctagctaatccccatgatattgaaaataaatattatttttcagttgagacacctgattcaacaggacagcttttgctcttggttgagctatttacaagtgaaaatgtttcttttgaacaagttttgcaacaaaaaggaaatggcaagcgggcagttgttgtgattattagtcataaaattaatcgtgttcaactttcggccattcaagataaattgaatcaagaaaaagattttaaattacttaatcgtttcaaagtattgggggactaa

SEQ ID NO: 6495 - protein, 428 aa, Lactococcus lactis subsp
MAVNIAILGFGTVGTGLPTLLSENKEKLAKILDEEIVISKVLMRDNKAIEKARSQGFNYDFVLNLDDILADSEISIVVELMGRIEPAKTYITQAIEAGKNVVTANKDLLAVHGVELRSLAQKHHVALYYEAAVAGGIPILRTLANSFSSDKITHLLGILNGTSNFMMTKMSEEGWTYDESLAKAQELGYAESDPTNDVDGIDASYKLAILSEFAFGMTLAPDDIAKSGLRSIQKTDVEIAQQFGYVLKLTGEINEVDSGIFAEVSPTFLPKSHPLASVNGVMNAVFIESEGIGDSVFYGAGAGQKPTATSVLADIVRIVKRVKDGTIGKSFNEYARSTSLANPHDIENKYYFSVETPDSTGQLLLLVELFTSENVSFEQVLQQKGNGKRAVVVIISHKINRVQLSAIQDKLNQEKDFKLLNRFKVLGD

SEQ ID NO: 6496 - DNA, 1326 bp, Mycobacterium leprae
  CDS (1)..(1326): transl_table=11
gtgttcagtgatgaaaggacggtcggtgtagcggtactcgggttgggcaatgtcggcagcgaagttgttcgcattatcgagggcagcgctgacgacctcgcggctcgtatcggcgctccattgatgctgcgtggcatcggggtgcgtcgtgtcgccgtcgaccggggtgttccggtcgatttgttgaccgacaacattgaagaactcgtctcccgtgcggacgtcgacattgtcgttgaagtgatgggaccagttgagctgtctcgcaaggcgatcttgtcagcgctcgaacatggcaagtctgtcgtcacggcgaacaaggcgttgcttgccgcctccactggtgaattggcgcaggctgccgaaagtgcgcatgtcgacttgtattttgaagctgcagtagcaggtgccatcccggtaatccgcccattaacccagtcactggccggtgacaccgtgctgcgggtggctggtattgtgaacggtaccaccaactacatcttgtctgcgatggacagcaccggtgccgactacgacagcgcgctggccggtgcgagagcgctcggctacgccgaagccgatcccaccgcggacgtcgaaggccatgacgctgcggctaaggccgcgatcctggcatcgatcgctttccacactcgggtaaccgccgatgatgtctatcgcgagggcatcaccaagatcactccggccgacttcgtgtcggcgcgggcgttaggttgcaccattaagctgctgttcatttgcgagcgcattaccgccgccgatggccagcaacgagtttcggcccgcgtttatcctgcattggtccccatgtcacatccgcttgccacggtcagcggagcgttcaacgccgtggtggtggaggctgaggccgccgggcggctgatgttctacggccagggcgccggtggtgctcctaccgcgtcggcggtgactggtgacttggtaatggcggcgcgcaaccgagtgctcggcagtcgcggtccaaaagaatccaagtatgctcaattgcctatggaaacaataggtttcatttctactcgatattacgtgagcatgaatgtagccgacaagcctggtgtattatcaggggtagcagcagaattcgccaagcgcgaagtgagcatcgccgaagttcgtcaagaaggtgtggtggatgacggcggacgacgggtgggagcccgtattgtagtggtcactcatggcgccaccgacgccgcgctctccgaaaccgtcgatgcgttggctgacttagacgtcgtgcagggtgtcacaagtgtgttgcgactggaaggaatcagcctgtga

SEQ ID NO: 6497 - protein, 441 aa, Mycobacterium leprae
MFSDERTVGVAVLGLGNVGSEVVRIIEGSADDLAARIGAPLMLRGIGVRRVAVDRGVPVDLLTDNIEELVSRADVDIVVEVMGPVELSRKAILSALEHGKSVVTANKALLAASTGELAQAAESAHVDLYFEAAVAGAIPVIRPLTQSLAGDTVLRVAGIVNGTTNYILSAMDSTGADYDSALAGARALGYAEADPTADVEGHDAAAKAAILASIAFHTRVTADDVYREGITKITPADFVSARALGCTIKLLFICERITAADGQQRVSARVYPALVPMSHPLATVSGAFNAVVVEAEAAGRLMFYGQGAGGAPTASAVTGDLVMAARNRVLGSRGPKESKYAQLPMETIGFISTRYYVSMNVADKPGVLSGVAAEFAKREVSIAEVRQEGVVDDGGRRVGARIVVVTHGATDAALSETVDALADLDVVQGVTSVLRLEGISL

SEQ ID NO: 6498 - DNA, 1302 bp, Synechocystis sp
  CDS (1)..(1302): transl_table=11
gtgacagttaaaattggtttactcggtctaggtaccgtcggcagtggcacagtggaaattttgcaggatccgcagggtcgtagtcccctgctcaaagccattgaggttaaagcagtgggggtgcgttccttggataaaccccgccaagtaaatttgccgccggaggttttgaccaccgacctagaagccattgtcaccgatcctgacattgccattgtggtggagttgatgggaggattggaacccgctagatccctcattctccaggcgatcgcccataaaaaacacattgtcaccgccaacaaagcggtcattgcccgttacggcccagaaatttacgaagcggccaatcaacacggcgtttatgtcctcctggaagcggcggtggggggcggcattcccatcattaagcccctcaagcaatccctgggaggcaaccgcatccaaagtatcgtcggtattctcaatggcaccactaactatattctttcccgcatgaccagtgagggggcggattttgacgaggtattaacggccgctcaacaattgggttatgccgaagcggatcccagtgccgatgtggatggattggatgcggcggacaaaattgccatccttgcttccctcggttttggcggccgggttaaacgggaagatgtggcctgtgaaggcattagatccgttagtgcggtggatattgcctacgccgatcgcctgggctttgtgattaaactactggcgatcgccgatggtaatgcgggggaagattcagaagcattgcaactgcgggtacatcccactttaatcgccaaggatcatcccctcgccagcgttaatggagtttacaacggtgtgttggtgactggagatcccctggggcaagtaatgttctacggtcggggagcgggagctggccccactgccagtgcggtggtatccgatgtaattaacattgttggcattattaccagcagtgacgaaaatcctgcccttgatcccctgctcagttgcacccaccaacactactgccaggtttcccccattgaagatctagttacccgtttttattgccgcttcctctgtgctgacgtgccgggggtaattggccatttaggcatgggttttggcaaccacggggttagcttagaatccctagtgcaaattggcttcaccgatggctgtgcagaaattgtcgtcgttacccatgatgtgcgggaaggggattaccgggccgccctggaggaaattagccaactagaagcagtgaaggaaattcctagtgtgatccgggtgctgtcctaa

SEQ ID NO: 6499 - protein, 433 aa, Synechocystis sp
MTVKIGLLGLGTVGSGTVEILQDPQGRSPLLKAIEVKAVGVRSLDKPRQVNLPPEVLTTDLEAIVTDPDIAIVVELMGGLEPARSLILQAIAHKKHIVTANKAVIARYGPEIYEAANQHGVYVLLEAAVGGGIPIIKPLKQSLGGNRIQSIVGILNGTTNYILSRMTSEGADFDEVLTAAQQLGYAEADPSADVDGLDAADKIAILASLGFGGRVKREDVACEGIRSVSAVDIAYADRLGFVIKLLAIADGNAGEDSEALQLRVHPTLIAKDHPLASVNGVYNGVLVTGDPLGQVMFYGRGAGAGPTASAVVSDVINIVGIITSSDENPALDPLLSCTHQHYCQVSPIEDLVTRFYCRFLCADVPGVIGHLGMGFGNHGVSLESLVQIGFTDGCAEIVVVTHDVREGDYRAALEEISQLEAVKEIPSVIRVLS

SEQ ID NO: 6500 - DNA, 1239 bp, Methylobacillus glycogenes
  CDS (1)..(1239): transl_table=11
atgaaacccatcaatgttggcctgctcggcatcggtactgtcggtggcggcacctatactgttttaacccgtaaccaggaagaaatcgcacgccgtgctggacgcccaatcgccattacccgtgttgccgatcgtaatctggagctggctcgccaggtgactggtggaaaaattgatgtcaccgatgatgcttttgccatcgtgtctgatccggcaattgatattgttgttgaactgatcggtggctacaccgtggcgcgtgaactggtgctgaaggccattgagaatggcaagcacgtggtcacggccaataaggccttgattgcctgcatggcaatgaaatttttgccgctgcgcagaaaaaaggcgtcatcgtcgcttttgaagctgccgttgctggtggtatccccattattcaaggccgtacgtgaaggcctggcggccaatcgtattgagtggattgctggcatcatcaatggcacgaccaatttcattctctcggaaatgcgtgaaaagggtctggcgtttgctgatgtgcttaaggaagctcaacgcctgggttatgccgaggcagacccgactttcgatgtcgaaggcattgatgctgcgcacaagctcatgatccttgctgcgatgctttggctattcgtgcacagcttatgtcgaggcatcacgaagctggatgccgtggatatcaccaagcgtaccgataagggcgtggagttgcgtgtgcacccaaccttgatcccggaaaagcgcttgatttgccaatgtgaatggcgcaatgaatgctgtgctggtcaagggcgatgctgttggcctaccttgtattatggtgccggtgctggtgcagaacctaccgctagtgcggttgccgacttggtcgatggtaccgaccgtggcatcagctgtccacacctggctttccagccagaccgcttggtagacttgcccatcctgcctatcggcgagattagcagtgcctattacctgcgcctgcgtgcagtggataagccaggcgtgctcgctgacgtgacccgtatcctcggtgaccgtcagatttcgatcgatgcgatgatccagaaagagccacaagagggcgaagaccaggccgacatcatcattctcacccacgtcacagttgagaaaaacatggatgatgccatcgccgccattgaggcactacctgccatttccggcaaggtcacgcgtttgcgcatggaagaactaagccgataa

SEQ ID NO: 6501 - protein, 412 aa, Methylobacillus glycogenes
MKPINVGLLGIGTVGGGTYTVLTRNQEEIARRAGRPIAITRVADRNLELARQVTGGKIDVTDDAFAIVSDPAIDIVVELIGGYTVARELVLKAIENGKHVVTANKALIACMAMKFLPLRRKKASSSLLKLPLLVVSPLFKAVREGLAANRIEWIAGIINGTTNFILSEMREKGLAFADVLKEAQRLGYAEADPTFDVEGIDAAHKLMILAAMLWLFVHSLCRGITKLDAVDITKRTDKGVELRVHPTLIPEKRLICQCEWRNECCAGQGRCCWPTLYYGAGAGAEPTASAVADLVDGTDRGISCPHLAFQPDRLVDLPILPIGEISSAYYLRLRAVDKPGVLADVTRILGDRQISIDAMIQKEPQEGEDQADIIILTHVTVEKNMDDAIAAIEALPAISGKVTRLRMEELSR

SEQ ID NO: 6502 - DNA, 20 bp, Artificial sequence
  primer
atgcggctcttttctctgcg

SEQ ID NO: 6503 - DNA, 20 bp, Artificial sequence
  primer
ttagttgagctgttcgacgc

SEQ ID NO: 6504 - protein, 462 aa, Artificial sequence
  consensus sequence
  Variant (2)..(3): Xaa in position 2 to 3 is any amino acid
  Variant (5)..(5): Xaa in position 5 is any amino acid
  Variant (10)..(10): Xaa in position 10 is any amino acid
  Variant (12)..(25): Xaa in position 12 to 25 is any amino acid
  Variant (26)..(27): Xaa in position 26 to 27 is any or no amino acid
  Variant (29)..(65): Xaa in position 29 to 65 is any amino acid
  Variant (66)..(74): Xaa in position 66 to 74 is any or no amino acid
  Variant (76)..(77): Xaa in position 76 to 77 is any amino acid
  Variant (80)..(82): Xaa in position 80 to 82 is any amino acid
  Variant (83)..(83): Xaa in position 83 is any or no amino acid
  Variant (85)..(90): Xaa in position 85 to 90 is any amino acid
  Variant (92)..(94): Xaa in position 92 to 94 is any amino acid
  Variant (97)..(97): Xaa in position 97 is any amino acid
  Variant (104)..(104): Xaa in position 104 is any amino acid
  Variant (106)..(106): Xaa in position 106 is any amino acid
  Variant (108)..(109): Xaa in position 108 to 109 is any amino acid
  Variant (111)..(111): Xaa in position 111 is any amino acid
  Variant (113)..(116): Xaa in position 113 to 116 is any amino acid
  Variant (118)..(124): Xaa in position 118 to 124 is any amino acid
  Variant (125)..(126): Xaa in position 125 to 126 is any or no amino acid
  Variant (129)..(129): Xaa in position 129 is any amino acid
  Variant (131)..(131): Xaa in position 131 is any amino acid
  Variant (136)..(143): Xaa in position 136 to 143 is any amino acid
  Variant (145)..(148): Xaa in position 145 to 148 is any amino acid
  Variant (150)..(153): Xaa in position 150 to 153 is any amino acid
  Variant (156)..(156): Xaa in position 156 is any amino acid
  Variant (160)..(160): Xaa in position 160 is any amino acid
  Variant (162)..(162): Xaa in position 162 is any amino acid
  Variant (165)..(166): Xaa in position 165 to 166 is any amino acid
  Variant (168)..(169): Xaa in position 168 to 169 is any amino acid
  Variant (170)..(170): Xaa in position 170 is any or no amino acid
  Variant (172)..(177): Xaa in position 172 to 177 is any amino acid
  Variant (179)..(180): Xaa in position 179 to 180 is any amino acid
  Variant (183)..(183): Xaa in position 183 is any amino acid
  Variant (193)..(193): Xaa in position 193 is any amino acid
  Variant (195)..(196): Xaa in position 195 to 196 is any amino acid
  Variant (198)..(198): Xaa in position 198 is any amino acid
  Variant (202)..(202): Xaa in position 202 is any amino acid
  Variant (204)..(205): Xaa in position 204 to 205 is any amino acid
  Variant (208)..(210): Xaa in position 208 to 210 is any amino acid
  Variant (213)..(220): Xaa in position 213 to 220 is any amino acid
  Variant (221)..(225): Xaa in position 221 to 225 is any or no amino acid
  Variant (228)..(233): Xaa in position 228 to 233 is any amino acid
  Variant (235)..(235): Xaa in position 235 is any amino acid
  Variant (236)..(237): Xaa in position 236 to 237 is any or no amino acid
  Variant (239)..(241): Xaa in position 239 to 241 is any amino acid
  Variant (242)..(242): Xaa in position 242 is any or no amino acid
  Variant (244)..(246): Xaa in position 244 to 246 is any amino acid
  Variant (250)..(259): Xaa in position 250 to 259 is any amino acid
  Variant (260)..(269): Xaa in position 260 to 269 is any or no amino acid
  Variant (272)..(272): Xaa in position 272 is any amino acid
  Variant (274)..(276): Xaa in position 274 to 276 is any amino acid
  Variant (278)..(282): Xaa in position 278 to 282 is any amino acid
  Variant (284)..(284): Xaa in position 284 is any amino acid
  Variant (286)..(289): Xaa in position 286 to 289 is any amino acid
  Variant (292)..(299): Xaa in position 292 to 299 is any amino acid
  Variant (301)..(304): Xaa in position 301 to 304 is any amino acid
  Variant (305)..(305): Xaa in position 305 is any or no amino acid
  Variant (307)..(307): Xaa in position 307 is any amino acid
  Variant (311)..(311): Xaa in position 311 is any amino acid
  Variant (312)..(312): Xaa in position 312 is any or no amino acid
  Variant (319)..(320): Xaa in position 319 to 320 is any amino acid
  Variant (322)..(352): Xaa in position 322 to 352 is any amino acid
  Variant (353)..(371): Xaa in position 353 to 371 is any or no amino acid
  Variant (373)..(376): Xaa in position 373 to 376 is any amino acid
  Variant (378)..(379): Xaa in position 378 to 379 is any amino acid
  Variant (381)..(394): Xaa in position 381 to 394 is any amino acid
  Variant (396)..(400): Xaa in position 396 to 400 is any amino acid
  Variant (402)..(413): Xaa in position 402 to 413 is any amino acid
  Variant (414)..(431): Xaa in position 414 to 431 is any or no amino acid
  Variant (434)..(459): Xaa in position 434 to 459 is any amino acid
  Variant (460)..(461): Xaa in position 460 to 461 is any or no amino acid
GXXGXGTVGXGXXXXXXXXXXXXXXXXGXXXXXXXXXXXXXXXXXXXXXXXXXXXXXXXXXXXXXXXXXXXXXXEXXGGXXXXAXXXXXXAXXXGKXVVTANKXLXAXXGXEXXXXAXXXXXXXXXEAXVXGGIPXXXXXXXXLXXXXIXXXXGIXNGTXNXILXXMXXXGXXXXXXLXXAQXLGYAEADPTXDXXGXDAAXKXXILXXXAFXXXXXXXXXXXXXGIXXXXXXDXXXAXXXXGXXXKLLXXXXXXXXXXXXXXXXXXXXRVXPXXXPXXXXXAXVXXXXNAXXXXXXXXGXXXXXGXGAGXXPTASAVXXDXXXXXXXXXXXXXXXXXXXXXXXXXXXXXXXXXXXXXXXXXXXXXXXXXXRXXXXDXXGXXXXXXXXXXXXXXSXXXXXQXXXXXXXXXXXXXXXXXXXXXXXXXXXXXXTHXXXXXXXXXXXXXXXXXXXXXXXXXXXXR

SEQ ID NO: 6505 - protein, 36 aa, Artificial sequence
  protein pattern
  Variant (2)..(3): Xaa in position 2 to 3 is any amino acid
  Variant (5)..(5): Xaa in position 5 is Gln or Thr
  Variant (6)..(6): Xaa in position 6 is any amino acid
  Variant (9)..(9): Xaa in position 9 is Phe or Tyr
  Variant (12)..(12): Xaa in position 12 is any amino acid
  Variant (15)..(15): Xaa in position 15 is Ala, Gly, Ser or Thr
  Variant (16)..(16): Xaa in position 16 is any amino acid
  Variant (18)..(18): Xaa in position 18 is Ile or Val
  Variant (19)..(19): Xaa in position 19 is any amino acid
  Variant (21)..(21): Xaa in position 21 is any amino acid
  Variant (23)..(23): Xaa in position 23 is any or no amino acid
  Variant (25)..(25): Xaa in position 25 is any amino acid
  Variant (26)..(26): Xaa in position 26 is any or no amino acid
  Variant (28)..(29): Xaa in position 28 to 29 is any amino acid
  Variant (30)..(30): Xaa in position 30 is Ile, Leu or Val
  Variant (31)..(31): Xaa in position 31 is Ile, Leu or Met
  Variant (32)..(35): Xaa in position 32 to 35 is any amino acid
  Variant (36)..(36): Xaa in position 36 is Phe, Trp or Tyr
LXXAXXLGXAEXDPXXDXXGXDXAXXKXXXXXXXXX

SEQ ID NO: 6506 - protein, 42 aa, Artificial sequence
  protein pattern
  Variant (2)..(2): Xaa in position 2 is any or no amino acid
  Variant (4)..(4): Xaa in position 4 is any or no amino acid
  Variant (6)..(6): Xaa in position 6 is Ala or Gly
  Variant (11)..(12): Xaa in position 11 to 12 is Ile, Leu or Val
  Variant (13)..(14): Xaa in position 13 to 14 is any amino acid
  Variant (15)..(15): Xaa in position 15 is Phe, Ile, Leu, Met or Val
  Variant (16)..(17): Xaa in position 16 to 17 is any amino acid
  Variant (18)..(18): Xaa in position 18 is Ala, Cys, Asp, Gly, Asn or Ser
  Variant (19)..(20): Xaa in position 19 to 20 is any amino acid
  Variant (21)..(21): Xaa in position 21 is Ala, Gly, Ser, Thr or Val
  Variant (22)..(22): Xaa in position 22 is Asp or Asn
  Variant (23)..(23): Xaa in position 23 is any amino acid
  Variant (24)..(24): Xaa in position 24 is Phe, Ile, Leu, Met or Val
  Variant (25)..(28): Xaa in position 25 to 28 is any amino acid
  Variant (29)..(29): Xaa in position 29 is Ala or Gly
  Variant (30)..(30): Xaa in position 30 is Ile or Val
  Variant (31)..(31): Xaa in position 31 is Ile, Leu, Met or Val
  Variant (35)..(35): Xaa in position 35 is Ala, Cys, Gly, Ser or Thr
  Variant (37)..(37): Xaa in position 37 is Phe or Tyr
  Variant (38)..(38): Xaa in position 38 is Ile or Met
  Variant (39)..(39): Xaa in position 39 is Phe, Leu, Met or Val
  Variant (40)..(40): Xaa in position 40 is Ser or Thr
  Variant (41)..(41): Xaa in position 41 is any amino acid
EXAXVXGGIPXXXXXXXXXXXXXXXXXXXXXNGTXNXXXXXM

SEQ ID NO: 6507 - protein, 17 aa, Artificial sequence
  protein pattern
  Variant (2)..(2): Xaa in position 2 is any amino acid
  Variant (6)..(8): Xaa in position 6 to 8 is any amino acid
  Variant (11)..(11): Xaa in position 11 is any or no amino acid
  Variant (13)..(13): Xaa in position 13 is Ala, Ser or Val
  Variant (15)..(15): Xaa in position 15 is any amino acid
  Variant (16)..(16): Xaa in position 16 is any or no amino acid
GXGAGXXXTAXSXVXXD

SEQ ID NO: 6508 - protein, 18 aa, Artificial sequence
  protein pattern
  Variant (2)..(2): Xaa in position 2 is Phe, Ile, Leu, Met or Val
  Variant (3)..(5): Xaa in position 3 to 5 is any amino acid
  Variant (7)..(7): Xaa in position 7 is any amino acid
  Variant (8)..(8): Xaa in position 8 is any or no amino acid
  Variant (10)..(10): Xaa in position 10 is any or no amino acid
  Variant (15)..(16): Xaa in position 15 to 16 is any amino acid
  Variant (17)..(17): Xaa in position 17 is Ile, Leu, Met or Val
AXXXXKXXVXTANKXXXA

SEQ ID NO: 6509 - protein, 20 aa, Artificial sequence
  protein pattern
  Variant (2)..(2): Xaa in position 2 is any amino acid
  Variant (4)..(4): Xaa in position 4 is any amino acid
  Variant (5)..(5): Xaa in position 5 is Phe, Ile, Leu or Met
  Variant (6)..(6): Xaa in position 6 is Ile, Leu or Val
  Variant (7)..(11): Xaa in position 7 to 11 is any amino acid
  Variant (12)..(12): Xaa in position 12 is Ile, Leu or Met
  Variant (14)..(14): Xaa in position 14 is any amino acid
  Variant (16)..(19): Xaa in position 16 to 19 is any amino acid
VXPXXXXXXXXXAXVXXXXN

SEQ ID NO: 6510 - DNA, 399 bp, Azotobacter vinelandii
  CDS (1)..(399): transl_table=11
atgactgaactcgaacaggacgacccggttccccaaggcgatctggccctgcagatcaccgcgctgccccgcgacgccaacggattcggcgatatctacggcggctggctggtcgcccagatggacctggccggcaccgccacggccagccggctggccggcgggcgggtggccacggtggcgatcgaccgcatggccttcatggtgccggtggcggtcggcgcccagctctccttctataccaagcccctgcagcagggccgcagctcgatccagatgctggtcgaggtatggagcgacgacccgctgtccagcgaatggcgcaaggtgaccgaggcggtgttcgtcttcgtcgccatcgacggcagcggccgcacccgcgcggtgccgcgccgctag

SEQ ID NO: 6511 - protein, 132 aa, Azotobacter vinelandii
MTELEQDDPVPQGDLALQITALPRDANGFGDIYGGWLVAQMDLAGTATASRLAGGRVATVAIDRMAFMVPVAVGAQLSFYTKPLQQGRSSIQMLVEVWSDDPLSSEWRKVTEAVFVFVAIDGSGRTRAVPRR

SEQ ID NO: 6512 - DNA, 405 bp, Pseudomonas aeruginosa
  CDS (1)..(405): transl_table=11
atgatcgagcttgaacaagaagaccccattccccagggagacctggccttgcagattaccgcgctgccgcgcgaaaccaacggtttcggcgatatctacggcggttggctggtatcccagatggacctggcgggaaccgccatggccagcaagatcgccggcggccgtatcgccaccgtcgccatcgaccgcatggccttcatggtgccggtcgcggtaggtgcccagctttccttctatacccagaccctggaagtcggccgcagctcgatccgcatgctggtcgaggtgtggagcgacgacccgctgtccagcgaatggcgcaaagtcaccgaggcggtgttcgtgttcgtcgccatcgatggcagcgggcgcacccgcccggtcccgccacgccggggctag

SEQ ID NO: 6513 - protein, 134 aa, Pseudomonas aeruginosa
MIELEQEDPIPQGDLALQITALPRETNGFGDIYGGWLVSQMDLAGTAMASKIAGGRIATVAIDRMAFMVPVAVGAQLSFYTQTLEVGRSSIRMLVEVWSDDPLSSEWRKVTEAVFVFVAIDGSGRTRPVPPRRG

SEQ ID NO: 6514 - DNA, 366 bp, Klebsiella pneumoniae subsp. pneumoniae MGH 78578
  CDS (1)..(366): transl_table=11
atggttttacgcaccctggcaatgccggcggataccaatgccaacggggatatttttggcggctggctgatgtcgcagatggatattggcggcgccattatggccaaagagatcgcccagggtcgcgtggtgaccgtgcgggtggatgggatgacctttttacgcccggtcgccgttggcgacgtggtgtgctgctacgcccgctgcgtgaagcgcggcaacacctcggtgacaatcaatatcgaagtgtgggtgaaaaaagtttcttcagaaccgattggccagcgctacaaggcgacggaagcgctgtttatctacgttgccgttgataatcagggaaaaccacgtcctctgccagcggaataa

SEQ ID NO: 6515 - protein, 121 aa, Klebsiella pneumoniae subsp. pneumoniae MGH 78578
MVLRTLAMPADTNANGDIFGGWLMSQMDIGGAIMAKEIAQGRVVTVRVDGMTFLRPVAVGDVVCCYARCVKRGNTSVTINIEVWVKKVSSEPIGQRYKATEALFIYVAVDNQGKPRPLPAE

SEQ ID NO: 6516 - DNA, 399 bp, Xanthobacter autotrophicus Py2
  CDS (1)..(399): transl_table=11
atgctcgataaagaggcccatatgccggacgaggtcccggtgatccggaccatcgccatgccggcggacaccaatcccaacggcgatattttcggcggctggctgatgtcgcagatggaccttgccgctggcaacgtggcggcgcggcgctcgcgcgggcgcgcggcgacggtggcggtggaggccatgagcttcctgtcgccggtggcagtgggcgacgaggtgagcctgttcgcccgcgtcgccaagctgggccgcacctccatgcgcatcgaggtggaggcctggcggcgcgcccgcgccagcgagcagaccaccaaggtgacggaagccgtcttcaccttcgtcgccatcgacgaggagggccgcccccgccccatcccgcaggacgagggctga

SEQ ID NO: 6517 - protein, 132 aa, Xanthobacter autotrophicus Py2
MLDKEAHMPDEVPVIRTIAMPADTNPNGDIFGGWLMSQMDLAAGNVAARRSRGRAATVAVEAMSFLSPVAVGDEVSLFARVAKLGRTSMRIEVEAWRRARASEQTTKVTEAVFTFVAIDEEGRPRPIPQDEG

SEQ ID NO: 6518 - DNA, 396 bp, Mesorhizobium loti MAFF303099
  CDS (1)..(396): transl_table=11
atggtgcactacgcggacggacggccgatcggagacctgacgctgcgcacgctcgccatgccttcggacgccaacgccgccggcgacattttcggcggctgggtgatggcgcagatggaccttgcctgcggcatccgcgccgccgagcgcgccaggggccgcgtggtgacggcggcggtcaaggagatgtccttcgccaagccgatgaagatcggcgacacgctgtgcatctacacccatgtcgaacgcgtcggccgcacctcgatgacgctcaaggtcgaagcctgggcgcagcgctatctctccgatttgatggaaaaggtcacccacgccgatttcgtcatggtggcgctggacggcgagggcaagccgaaggccgttccggccgagggttga

SEQ ID NO: 6519 - protein, 131 aa, Mesorhizobium loti MAFF303099
MVHYADGRPIGDLTLRTLAMPSDANAAGDIFGGWVMAQMDLACGIRAAERARGRVVTAAVKEMSFAKPMKIGDTLCIYTHVERVGRTSMTLKVEAWAQRYLSDLMEKVTHADFVMVALDGEGKPKAVPAEG

SEQ ID NO: 6520 - DNA, 441 bp, Vibrio cholerae O1 biovar eltor str. N16961
  CDS (1)..(441): transl_table=11
ttgtttgctgtggatccccaaatgaatcaaaccgtaaattcacctaaaggccagcttctgctgcgcacactcgcaatgcctgccgatacgaatgcaaatggcgatatttttggcggctggatcatgtctcaactcgacttagcgggcggtattctcgctaaagagatctcctgtggacgcatcgtgactgtttctgtttccagtatcacttttaaaaaacctgtcaaagtcggtgacgtggtatgttgctacggcgaatgcaccaagattggccgcacatcgatgtcgatcaatctcgaagtgtgggttaagccggtcaaagaagagggggtcggcgaacgttttcaagtgtgtgaagccacctttaactatgtggcgattgatgcaaatggccgccccagagcaataagcctcagcaatggatcacagaaatcatcttga

SEQ ID NO: 6521 - protein, 146 aa, Vibrio cholerae O1 biovar eltor str. N16961
MFAVDPQMNQTVNSPKGQLLLRTLAMPADTNANGDIFGGWIMSQLDLAGGILAKEISCGRIVTVSVSSITFKKPVKVGDVVCCYGECTKIGRTSMSINLEVWVKPVKEEGVGERFQVCEATFNYVAIDANGRPRAISLSNGSQKSS

SEQ ID NO: 6522 - DNA, 474 bp, Bacillus halodurans C-125
  CDS (1)..(474): transl_table=11
atgatccaatcttatccggttgaacgatcaagaacgatacaaacgaggctcgtattaccaccagatacgaatcatctagggacgatttttggtgggaaagttctcgcatatatcgatgaaatagctgctttaacagcgatgaagcatgctaattctgcggtggttactgcttcaatcgattctgttgactttaagtcgtcggctactgtgggtgatgcccttgaacttgaagggtttgtcacacatacaggaagaacgtcgatggaagtatatgtgagggttcattcgaacaacttattgacaggagaacggacgttaacaaccgagtcgtttctaacgatggtcgccgttgacgaatcaggtaaaccaaaaccagtgccccaggtcgagcctcagaccgaagaggaaaaacggctatacgaaaccgcgcctgcacgaaaagaaaaccggaaaaaacgagcagccttaagataa

SEQ ID NO: 6523 - protein, 157 aa, Bacillus halodurans C-125
MIQSYPVERSRTIQTRLVLPPDTNHLGTIFGGKVLAYIDEIAALTAMKHANSAVVTASIDSVDFKSSATVGDALELEGFVTHTGRTSMEVYVRVHSNNLLTGERTLTTESFLTMVAVDESGKPKPVPQVEPQTEEEKRLYETAPARKENRKKRAALR

SEQ ID NO: 6524 - DNA, 444 bp, Pasteurella multocida subsp. multocida str. Pm70
  CDS (1)..(444): transl_table=11
atgacaactcacgttgatacttcaaaaagctgtgatactcgaggcacattattactacgtactctcgcaatgccttctgatacgaatgccaatggtgatatttttggtggctggattatgtcacaaatggatatgggcggtgcgattttagcgaaagaaatcgcacatggtcgcgtcgtcactattgcagtcgacagcatgacctttatccgtcctattgcggtaggcgatgtggtttgctgttacggtaaatgtttaagtgtgggacgttcatctattaaaattaaagtagaagtgtgggtgaaaaaagtcgccagtgaaccgattggggaacgctattgtgtgactgaggcagtctttacgtttgttgctgtcgataaagaaggacgacctcgcgcggtaccacgagaaaataacccagaattaactcaagcactctcttaa

SEQ ID NO: 6525 - protein, 147 aa, Pasteurella multocida subsp. multocida str. Pm70
MTTHVDTSKSCDTRGTLLLRTLAMPSDTNANGDIFGGWIMSQMDMGGAILAKEIAHGRVVTIAVDSMTFIRPIAVGDVVCCYGKCLSVGRSSIKIKVEVWVKKVASEPIGERYCVTEAVFTFVAVDKEGRPRAVPRENNPELTQALS

SEQ ID NO: 6526 - DNA, 447 bp, Neisseria meningitidis MC58
  CDS (1)..(447): transl_table=11
atgcagcacgaagaaggcaaccgccaacgccctcaaggcgaactgctcctgcgtaccgtcgctatgccgcgcgataccaatcccaaccaagacattttcggcggctggattatgtcgcagatggatttgggcggcggcatattggcggcggaaatcgcgcggggacgcatcgttaccgtcgccgttcaggaaatgaacttcatccgcccggtcaaggtcggcaacgtcgtctgctgctacgggcattgcgtccgcgtgggcaacacttccctccagcttaaagtcgacgtctgggtgaaaactttgatgaacgattgcgttaccgaagaccgctacctcgtaaccgaagccgtgttcacttatgttgccatcgatgcggaaggcaatccgcgcccgattccgaaagaaggcaaccccaaattggcgggcttattgcctactccgtaa

SEQ ID NO: 6527 - protein, 148 aa, Neisseria meningitidis MC58
MQHEEGNRQRPQGELLLRTVAMPRDTNPNQDIFGGWIMSQMDLGGGILAAEIARGRIVTVAVQEMNFIRPVKVGNVVCCYGHCVRVGNTSLQLKVDVWVKTLMNDCVTEDRYLVTEAVFTYVAIDAEGNPRPIPKEGNPKLAGLLPTP

SEQ ID NO: 6528 - DNA, 447 bp, Neisseria meningitidis Z2491
  CDS (1)..(447): transl_table=11
atgcagcacgaagaaggcaaccgccaacgccctcaaggcgaactgctcctgcgtaccgtcgctatgccgcgcgataccaatcccaaccaagacattttcggcggctggattatgtcgcagatggatttgggcggcggcatattggcggcggaaatcgcgcggggacgcatcgttaccgtcgccgttcaggaaatgaacttcatccgcccggtcaaggtcggcaacgtcgtctgctgctacgggcattgcgtccgcgtgggcaacacttccctccagcttaaagtcgaagtctgggtgaaaactttgatgaacgattgcgttaccgaagaccgccacctcgtaaccgaagccgtgttcacttatgtcgccatcgatgcggaaggcaatccgcgcccgattccgaaagaaggcaaccccatattggcgggcttattgcctactccgtaa

SEQ ID NO: 6529 - protein, 148 aa, Neisseria meningitidis Z2491
MQHEEGNRQRPQGELLLRTVAMPRDTNPNQDIFGGWIMSQMDLGGGILAAEIARGRIVTVAVQEMNFIRPVKVGNVVCCYGHCVRVGNTSLQLKVEVWVKTLMNDCVTEDRHLVTEAVFTYVAIDAEGNPRPIPKEGNPILAGLLPTP

SEQ ID NO: 6530 - DNA, 399 bp, Escherichia coli O157:H7 EDL933
  CDS (1)..(399): transl_table=11
atgtctacaacacataacgtccctcagggcgatcttgttttacgtactttagccatgcccgccgataccaatgccaatggtgacatctttggtggttggttaatgtcacaaatggatattggcggcgctattctggcaaaagaaattgcccacggtcgcgtagtgactgtgcgggttgaaggaatgactttcttacggccggttgcggtcggcgatgtggtgtgctgctatgcacgctgtgtccagaaagggacgacatcggtcagcattaatattgaagtgtgggtgaaaaaagtagcgtctgaaccaatcgggcaacgctataaagcgacagacgcattatttaagtatgtcgcggttgatcctgaaggaaaacctcgcgccttacctgttgagtaa

SEQ ID NO: 6531 - protein, 132 aa, Escherichia coli O157:H7 EDL933
MSTTHNVPQGDLVLRTLAMPADTNANGDIFGGWLMSQMDIGGAILAKEIAHGRVVTVRVEGMTFLRPVAVGDVVCCYARCVQKGTTSVSINIEVWVKKVASEPIGQRYKATDALFKYVAVDPEGKPRALPVE

SEQ ID NO: 6532 - DNA, 669 bp, Deinococcus radiodurans R1
  CDS (1)..(669): transl_table=11
gtggctgtgcgggtatgctgccatgcgccgccgggggtgtcaaatcatttgtttactttttgcgccggcaacttgacaacaggctttagtggtgggtcggtcacttcgcaaaagggcggcgcggcaggtctacctacgtgttcgcggaggtgcccgcgcgggtgtctgcccggcagtgaccccctgccccggcacccgcgccggtatgctccgccggtgactcctcccgtgaccccgcccaccacgcccgcgccgcgcagccgcgcccgtatgctcgaactggtgtttcccaaagacaccaactaccacggcaccgcgttcgggggctgggtgctggcgctgatggacaaggccgccagtgtcgccgccgtccggcacgccgggggcaacgtggtcaccgcccgcatggacggcgtggactttcacgtgcccatccgggtgggcgacgccgtggcgctcgacgcccgcgtcatccgggtggggcgctcgtccatgaccatccgggtggacgtgtaccgcgaaaacatggcgtcgggcgagcagcaactcgccaccggggggctctttaccttcgtggcgctcggcgaggacggcaagccccgcccggtgcctccccttccagaaggcagcaccgacagcgagcagcccgactacgaggcgcggccctga

SEQ ID NO: 6533 - protein, 222 aa, Deinococcus radiodurans R1
MAVRVCCHAPPGVSNHLFTFCAGNLTTGFSGGSVTSQKGGAAGLPTCSRRCPRGCLPGSDPLPRHPRRYAPPVTPPVTPPTTPAPRSRARMLELVFPKDTNYHGTAFGGWVLALMDKAASVAAVRHAGGNVVTARMDGVDFHVPIRVGDAVALDARVIRVGRSSMTIRVDVYRENMASGEQQLATGGLFTFVALGEDGKPRPVPPLPEGSTDSEQPDYEARP

SEQ ID NO: 6534 - DNA, 453 bp, Agrobacterium tumefaciens str. C58
  CDS (1)..(453): transl_table=11
ttggctgaaaggacggggttgtttaagtccggcagcgggaggtttgtgaaaggaattcgagacatggaccagcaaccgcccgccgatatggaactcacgctcagaacgcttgccatgcccgccgatgccaatccggccggcgatattttcggcggttgggtcatgtcgcagatggaccttgccgctttcgtccgcgccaatgatgtggccggcggccgcaccgtgaccgtggcagtccatgaaatagtcttcaagaagccggtcaagatcggcgatacgctgtgtgtctacacgcggatcgaaaagatcgggcgcacgtccgtcacgctgaagatcgaggcatggacccgcaggcactatcaggattcacgcgacaaggtcaccgaagccgtcttcatcatggttgccgtggatgagaatggcgagccacgcccggtgcgcaaggaggcgtga

SEQ ID NO: 6535 - protein, 150 aa, Agrobacterium tumefaciens str. C58
MAERTGLFKSGSGRFVKGIRDMDQQPPADMELTLRTLAMPADANPAGDIFGGWVMSQMDLAAFVRANDVAGGRTVTVAVHEIVFKKPVKIGDTLCVYTRIEKIGRTSVTLKIEAWTRRHYQDSRDKVTEAVFIMVAVDENGEPRPVRKEA

SEQ ID NO: 6536 - DNA, 390 bp, Sinorhizobium meliloti 1021
  CDS (1)..(390): transl_table=11
atgaacgcagcaagcaagccgaatggcgaactgaccttgcgcacgctcgcaatgcccggcgacgccaatgccgccggcgacatcttcggcggctgggtcatggcgcagatggacctttcctgcggtatccgggccgccgagcgcgccaggggccgcgtcgtgactgcggcggtaaaggaaatggccttcgccatgccggtgaagatcggcgacacactctgcatctataccgacatcgtcacggtcgggcggacgtcgatgacgctcaaggtcgaggcatgggcgcagcgttacctctcgcatgtcatggaaaaggtcaccgacgcgatcttcgtgatggtggcgctcgactcgaccggcaagccgacgccggttccgtccgagcaatag

SEQ ID NO: 6537 - protein, 129 aa, Sinorhizobium meliloti 1021
MNAASKPNGELTLRTLAMPGDANAAGDIFGGWVMAQMDLSCGIRAAERARGRVVTAAVKEMAFAMPVKIGDTLCIYTDIVTVGRTSMTLKVEAWAQRYLSHVMEKVTDAIFVMVALDSTGKPTPVPSEQ

SEQ ID NO: 6538 - DNA, 459 bp, Caulobacter crescentus CB15
  CDS (1)..(459): transl_table=11
atgtcgacgccgccgggcactagcttggacggcgacgccatcgcggcgaacgcgcgggccgagacgctcgccgaggcgtgggaaaaggccgagtggccgcaggaggcgccggtgctgcgcgccatcgccatgccgtccgacaccaatcccgagggcgacatcttcggcggttggcttttgtcgcagatggacctggccgccgcctcgatcgccttccatcgcgcggccggccgctgcgccaccatcgcgatcgacggcatgacctttctcagcccggtgttcgtcggcgacgaggtcagtctgttcgccaaggtggtccataccggccgcacctcgctgaaggtcgccgtcgaggcctggcgccgccggcgggacggcgaacaagctaacaaggtgaccgagggcgtcttcaccttcgtggccatcgacgagaaccgaaagtctcgccccctgccatag

SEQ ID NO: 6539 - protein, 152 aa, Caulobacter crescentus CB15
MSTPPGTSLDGDAIAANARAETLAEAWEKAEWPQEAPVLRAIAMPSDTNPEGDIFGGWLLSQMDLAAASIAFHRAAGRCATIAIDGMTFLSPVFVGDEVSLFAKVVHTGRTSLKVAVEAWRRRRDGEQANKVTEGVFTFVAIDENRKSRPLP

SEQ ID NO: 6540 - DNA, 393 bp, Agrobacterium tumefaciens str. C58
  CDS (1)..(393): transl_table=11
atgaccgacctgcccatcaaaccgaccggcgagctgacgctcaggacactcgccatgccggccgacgccaatccggccggtgatattttcggtggctgggtcatgtcccagatggacttggcaagcggcatccgcgctgcggaacgctcacgctgtcgcgtcgtcacggcggcggtcaaggaaatggccttcgaactgccggtgaagatcggcgacacgctgtcgatctatacagatatcgcccgtctcggccgcacctcgatcacgctgacggtcgaagcctgggcgcagcggtcgcgttacgacaagctggaaaaggtcaccgccggtaccttcatcatggtggcgatggacgaaaacgggcagcctacgcccattcctgcggcggagtga

SEQ ID NO: 6541 - protein, 130 aa, Agrobacterium tumefaciens str. C58
MTDLPIKPTGELTLRTLAMPADANPAGDIFGGWVMSQMDLASGIRAAERSRCRVVTAAVKEMAFELPVKIGDTLSIYTDIARLGRTSITLTVEAWAQRSRYDKLEKVTAGTFIMVAMDENGQPTPIPAAE

SEQ ID NO: 6542 - DNA, 477 bp, Agrobacterium tumefaciens str. C58
  CDS (1)..(477): transl_table=11
atggtggccataccggaaggtgaggacgccgcgagctatgtcctgcccgaactcctcactgaagagacacctgatccaagcgatgccgtcaccatggtcgagatcgtctttccggatcaggcaaacagcgccggccggatgttcgggggcgaagctattgcctatatgaccaaagccgcttttgttgcagcgtcgcgctactgcggcaagctggtggtgctggcctcatccgagcgcatcgattttgcaagggcaatcgagatcggcgaaattgtcgaggcgcaggcacacgtcgaacgcgtgggccgcagctccatgtcgatccagacaaaactctggtccgaaaatcttctgacaggcgagagacacatcacggccaccggacacttcaccatggtggcggtcgacaaggaccaccggccggctaccattcgcgacccggccgaagccttttccctggaaaagggaggagcataa

SEQ ID NO: 6543 - protein, 158 aa, Agrobacterium tumefaciens str. C58
MVAIPEGEDAASYVLPELLTEETPDPSDAVTMVEIVFPDQANSAGRMFGGEAIAYMTKAAFVAASRYCGKLVVLASSERIDFARAIEIGEIVEAQAHVERVGRSSMSIQTKLWSENLLTGERHITATGHFTMVAVDKDHRPATIRDPAEAFSLEKGGA

SEQ ID NO: 6544 - DNA, 390 bp, Agrobacterium tumefaciens str. C58
  CDS (1)..(390): transl_table=11
atggaccagcaaccgcccgccgatatggaactcacgctcagaacgcttgccatgcccgccgatgccaatccggccggcgatattttcggcggttgggtcatgtcgcagatggaccttgccgctttcgtccgcgccaatgatgtggccggcggccgcaccgtgaccgtggcagtccatgaaatagtcttcaagaagccggtcaagatcggcgatacgctgtgtgtctacacgcggatcgaaaagatcgggcgcacgtccgtcacgctgaagatcgaggcatggacccgcaggcactatcaggattcacgcgacaaggtcaccgaagccgtcttcatcatggttgccgtggatgagaatggcgagccacgcccggtgcgcaaggaggcgtga

SEQ ID NO: 6545 - protein, 129 aa, Agrobacterium tumefaciens str. C58
MDQQPPADMELTLRTLAMPADANPAGDIFGGWVMSQMDLAAFVRANDVAGGRTVTVAVHEIVFKKPVKIGDTLCVYTRIEKIGRTSVTLKIEAWTRRHYQDSRDKVTEAVFIMVAVDENGEPRPVRKEA

SEQ ID NO: 6546 - DNA, 399 bp, Brucella melitensis 16M
  CDS (1)..(399): transl_table=11
atgactttgatgaatactgaaaacgagccgacagggatgctgaccatccgcgtttccgccatgccgaaggatgccaattcagcctatgatattttcggcggctgggtgatggcacagatggatatggctgctggaatccgttctgccgagcgcgccagggggcgcacggtgacagcagcggtgcgcgaaatggcattcgcccgaccagtgaagattggtgacacgctctgtgtttatacggatataacgcgggtgggccgtacgtccatcacgctccgggttgaagcgtgggcaaagcgctatctcagcgataagcgtgacctcgtcacgcatgctgaattcatcatggttgcgctggatgcggacggcaagcctaccccggcaccgcaggaagattag

SEQ ID NO: 6547 - protein, 132 aa, Brucella melitensis 16M
MTLMNTENEPTGMLTIRVSAMPKDANSAYDIFGGWVMAQMDMAAGIRSAERARGRTVTAAVREMAFARPVKIGDTLCVYTDITRVGRTSITLRVEAWAKRYLSDKRDLVTHAEFIMVALDADGKPTPAPQED

SEQ ID NO: 6548 - DNA, 594 bp, Streptomyces coelicolor A3(2)
  CDS (1)..(594): transl_table=11
gtgtggccccggcataaggtggaggccatgacagaccaggcagaacaggcctcggccgcgcagtcgacggccccggagatcccgggcaagccgacctcggcgtcccgcaccaccctcagtcacatcatgacgcacagcgacaccaaccttctgggcacggtgcacggcggtgtgatcatgaagctcgtcgacgacgcggcgggcgccgtggccggacggcactccggcggacccgccgtcaccgcgtccatggacgagatggcgttcctcgaaccggtccgcgtcggcgacctcgtccatgtgaaggcccaggtcaactggaccggccgcagttccatggaggtgggcgtccgggtcctggccgagcgctggaacgagtccaccccggccacccaggtcggctcggcctacctggtcttcgcggccgtggacgccgacggcaagccgcgcacggtgccgccggtgctgcccgagaccgagaaggacaagcggcgctaccaggaggcccagatccgccgcacccaccgcctggcccgccgccgggcgatcatggaactgcgggagcggcgggtggcggaggggtacgaggactga

SEQ ID NO: 6549 - protein, 197 aa, Streptomyces coelicolor A3(2)
MWPRHKVEAMTDQAEQASAAQSTAPEIPGKPTSASRTTLSHIMTHSDTNLLGTVHGGVIMKLVDDAAGAVAGRHSGGPAVTASMDEMAFLEPVRVGDLVHVKAQVNWTGRSSMEVGVRVLAERWNESTPATQVGSAYLVFAAVDADGKPRTVPPVLPETEKDKRRYQEAQIRRTHRLARRRAIMELRERRVAEGYED

SEQ ID NO: 6550 - DNA, 492 bp, Xanthomonas campestris pv. campestris str. ATCC 33913
  CDS (1)..(492): transl_table=11
gtgattggccaacaacgtgatctgacatttcgtttcctggccgagcccagcgacgtcaacttcggcggcaaggtgcacggcggcgtggtcatgaagtggatcgaccaggtgggttttgcagccgccagtggctggagcgggcattactgcgtcaccgtggcggtgggcggcatccgcttcgtggcgccggtgcgcattggcgatctggtcgcggtgtcggccaagctggtctacaccggccgcagcagcatgcatttcgccatcgacgtacgcgcgcgcagcccgatgggcggcgactcgcgtttgtgcacccactgcatcatcgtgttcgtggcgatggatccagacggcgtcagcccggtggaagtgccgtcatggcggccgtccacaccggaagaccaacgcctggccgaatacgcgctcaaggtgatggagctgagcaagggcatcgaagacacgatggcgcattaccaggctgatagcggacgctga

SEQ ID NO: 6551 - protein, 163 aa, Xanthomonas campestris pv. campestris str. ATCC 33913
MIGQQRDLTFRFLAEPSDVNFGGKVHGGVVMKWIDQVGFAAASGWSGHYCVTVAVGGIRFVAPVRIGDLVAVSAKLVYTGRSSMHFAIDVRARSPMGGDSRLCTHCIIVFVAMDPDGVSPVEVPSWRPSTPEDQRLAEYALKVMELSKGIEDTMAHYQADSGR

SEQ ID NO: 6552 - DNA, 402 bp, Xanthomonas axonopodis pv. citri str. 306
  CDS (1)..(402): transl_table=11
atgaccagttccacgcctgttgcacccaccgaagcccgcatggccgagatcgtgtttcccaatcacaccaatcacctgggcacgctgttcggtgggcaggcgctggcgtggatggacaaggccgcgtttctcgccgcctcgcgctatgcgcgccgcaccgtggtgacggcgcgttcggatcaggtggatttcaagctgccgatccgccagggccagatggtggaaaccattgcccgcgtggtgttggtggggcgtagctcgatcacggtggaagtggaattgatcgccgaagacttgctcagcggcgcgcgcgagctgtgcacgcgcgggcagttcgtgatgattgcgctcgatgccgatggcaagccgacggcggtgccgccgttgccagcggcgcactaa

SEQ ID NO: 6553 - protein, 133 aa, Xanthomonas axonopodis pv. citri str. 306
MTSSTPVAPTEARMAEIVFPNHTNHLGTLFGGQALAWMDKAAFLAASRYARRTVVTARSDQVDFKLPIRQGQMVETIARVVLVGRSSITVEVELIAEDLLSGARELCTRGQFVMIALDADGKPTAVPPLPAAH

SEQ ID NO: 6554 - DNA, 399 bp, Pseudomonas putida KT2440
  CDS (1)..(399): transl_table=11
atgattgagctcgaacaagaagatccaatcccgcaaggcgacctggccttgcaaatcaccgcattgccgcgagaaaccaacgggtttggcgatattttcggcggttggctggttgcgcagatggacctggcaggcacggccatggccagccgtgtcgccggcggccgcgtagccaccgtcgccatcgaccgcatggccttcctggtacccgtcgcggtcggcgcacagctgtctttctatacccagaccctggaaatcggccgcagctcgatccagatgatggtcgaggtgtggagcgacgacccgctgtccagcgaatggcgcaaggtcaccgaagcggtattcgtcttcgtcgccatcgacggcagtggtcgtacccgctcggtgcctcgtcgctga

SEQ ID NO: 6555 - protein, 132 aa, Pseudomonas putida KT2440
MIELEQEDPIPQGDLALQITALPRETNGFGDIFGGWLVAQMDLAGTAMASRVAGGRVATVAIDRMAFLVPVAVGAQLSFYTQTLEIGRSSIQMMVEVWSDDPLSSEWRKVTEAVFVFVAIDGSGRTRSVPRR

SEQ ID NO: 6556 - DNA, 486 bp, Pseudomonas putida KT2440
  CDS (1)..(486): transl_table=11
atggaacctggaaacgcccagctgagcatgaccgtcctgatgaccccggacatggccaacttttctggcaacgtacatggcggcaccctgctcaagtacctcgacgaagtggcttatgcatgcgccagccgttatgccggcagttatgtggtaaccctgtcggtcgaccaggtgatcttccgtgaacccgtgcacgtgggtgaactggtgaccttcctggcgtcggtcaactacaccggcaacacttcgatggaagttggcatcaaagtcgtgaccgagaacattcgcgagcgctcggtgcgccattccaacagttgcttcttcaccatggtcgcggtcgacgacaaccgccgcccggtgccggtgccaccacgccagccgcacagcagcgaagaaaagcgccgcttcctgcaaggccagcagcgccgtcagatccgccaggaactggaaaagcgctatcaggacttgaaaaccgacgccatttaa

SEQ ID NO: 6557 - protein, 161 aa, Pseudomonas putida KT2440
MEPGNAQLSMTVLMTPDMANFSGNVHGGTLLKYLDEVAYACASRYAGSYVVTLSVDQVIFREPVHVGELVTFLASVNYTGNTSMEVGIKVVTENIRERSVRHSNSCFFTMVAVDDNRRPVPVPPRQPHSSEEKRRFLQGQQRRQIRQELEKRYQDLKTDAI

SEQ ID NO: 6558 - DNA, 432 bp, Bradyrhizobium japonicum USDA 110
  CDS (1)..(432): transl_table=11
atgaccgacacgcacgtcaaaacccctttcagctccgataccgagccgagcggcgatctctgcattcgcacgctggcgatgcccgccgacaccaacgccaatggcgacattttcggcggctggctgctcagccagatggacgtcggcggcggcgtgttcgcctcgaaggtcgcgaagtcgcgcaccgtaaccgttgcgatcgaggcgatgaattttcgcaaagcggtgtatgtcggcgatctcgtctcggtctacgccaatctcgtgcgggtcggacgcacctcgctcaccgtgcatctcgaagcctgggcgcttcgccgcagggaggcggacccgttcctcgtcaccgacggcaacttcacctatgtctcgatcgacgatcacggccgtccgcagtcgataacccccaccgatacgccgatcgcgacgtag

SEQ ID NO: 6559 - protein, 143 aa, Bradyrhizobium japonicum USDA 110
MTDTHVKTPFSSDTEPSGDLCIRTLAMPADTNANGDIFGGWLLSQMDVGGGVFASKVAKSRTVTVAIEAMNFRKAVYVGDLVSVYANLVRVGRTSLTVHLEAWALRRREADPFLVTDGNFTYVSIDDHGRPQSITPTDTPIAT

SEQ ID NO: 6560 - DNA, 402 bp, Pseudomonas syringae pv. tomato str. DC3000
  CDS (1)..(402): transl_table=11
atgatcgagctcgaacaagaagatccaactccgcaaggcgaccttgcgctgcaaattactgctcttccccgtgaaaccaacggcttcggcgatatcttcggcggctggctggtgtctcagatggacctggccgggactgcaatggccagcaaagtggccggcggtcgcgtggcgaccgtggctatcgatcgcatggcgtttctggtgccggtcgcagtcggcgagcagctttccttttatacgcgcaccctggaagtggggcgcacctcgatcaagatgatggtcgaagtgtggagcgatgacccggttaccagcgagtggcgtaaggtaacagaggctgcgttcgtgttcgtggccatagattccagcggccggacacgctcggttcctgcacgacggtaa

SEQ ID NO: 6561 - protein, 133 aa, Pseudomonas syringae pv. tomato str. DC3000
MIELEQEDPTPQGDLALQITALPRETNGFGDIFGGWLVSQMDLAGTAMASKVAGGRVATVAIDRMAFLVPVAVGEQLSFYTRTLEVGRTSIKMMVEVWSDDPVTSEWRKVTEAAFVFVAIDSSGRTRSVPARR

SEQ ID NO: 6562 - DNA, 396 bp, Vibrio parahaemolyticus RIMD 2210633
  CDS (1)..(396): transl_table=11
atgagccaagaatttaactctccgaaaggccagcttctgcttcgtacccttgcaatgcccgctgatacaaatgcaaacggcgatatctttggtggttggataatgtctcaacttgacttggcgggtgcgattctggcgaaagagatctgttctggtcgcgtcgttaccgtttctgtttcaagcattacatttaaaaaaccagtcagcgtaggtgacgtggtttgttgttacggcgtgtgtaagaaaatcggccgtacatcgatgagcgttgacctagaagtttgggtgaaaccagtgaaagtagacggcattgaagatcgtttcatggtttgtgaagcaacctttaactatgtagccatcgacagtgaaggcaaaccacgtccagtacaaagctaa

SEQ ID NO: 6563 - protein, 131 aa, Vibrio parahaemolyticus RIMD 2210633
MSQEFNSPKGQLLLRTLAMPADTNANGDIFGGWIMSQLDLAGAILAKEICSGRVVTVSVSSITFKKPVSVGDVVCCYGVCKKIGRTSMSVDLEVWVKPVKVDGIEDRFMVCEATFNYVAIDSEGKPRPVQS

SEQ ID NO: 6564 - DNA, 471 bp, Haemophilus ducreyi 35000HP
  CDS (1)..(471): transl_table=11
atgaacaaaaataagcctaatgagcaaccttcgggtaaattattactcagaacgcttgctatgccgtcagatgccaatgcaaatggagatatttttggtggttggattatgtcacaaatggatctggggggggcaattttagctaaagaagtagctaaaggacgtgtagttacggtgaccgtggataaaatgatttttcatcgtccaatttcagtgggtgatgtagtctgttgttatggctcggtggtaaaagttggccgttcttcgatgcaagttaaagtggaaatatttattaaacaggtttacgatggctcacgtgagcgttttcgggtcactgaagcattatttacttatgttgccattgataatataggtaaatcacgcgccattccacgtgataataatccggagttagatgaagctttagtaagaattgaacgatgtttagctgaacaagcgatcaagtcttaa

SEQ ID NO: 6565 - protein, 156 aa, Haemophilus ducreyi 35000HP
MNKNKPNEQPSGKLLLRTLAMPSDANANGDIFGGWIMSQMDLGGAILAKEVAKGRVVTVTVDKMIFHRPISVGDVVCCYGSVVKVGRSSMQVKVEIFIKQVYDGSRERFRVTEALFTYVAIDNIGKSRAIPRDNNPELDEALVRIERCLAEQAIKS

SEQ ID NO: 6566 - DNA, 411 bp, Bordetella pertussis Tohama I
  CDS (1)..(411): transl_table=11
atgaccaacccacccaaatcccccttcaccagcctgcccagcgggcgcgagccggtcctgcgcgtcatgcccatgcccgccgatgccaatatccatggcgacgtgttcggcggctggatcatggcgcaggtggatatcgccggctcgatccctgccgcccggcgcgccgccggacgcgtggccaccgtggccgtcaacgcattccagttcaagcaaccggtattcgtcggcgacctgctcagtttctatacctccatcacgcgcaccggcacgacctcggtcacggtgtcggtcgaagtgtatgctgaacgccagcgcctggacgccgaagtcgtgaaggtcaccgaagcggtgctcacctacgtcgccaccgacgaagcccggcgcagccgcccgctgcccaccctttga

SEQ ID NO: 6567 - protein, 136 aa, Bordetella pertussis Tohama I
MTNPPKSPFTSLPSGREPVLRVMPMPADANIHGDVFGGWIMAQVDIAGSIPAARRAAGRVATVAVNAFQFKQPVFVGDLLSFYTSITRTGTTSVTVSVEVYAERQRLDAEVVKVTEAVLTYVATDEARRSRPLPTL

SEQ ID NO: 6568 - DNA, 378 bp, Chromobacterium violaceum ATCC 12472
  CDS (1)..(378): transl_table=11
atggaacagcaggaacaccggacgccggtattgcgggtgcgcgccttgcccaccagcaccaacgcttacggccgggtgcaggcgggctggctgatgagccagatcgacatggccggcagcctggatgccgagcgtttgtcccgcgggccggtgacgaccgtggcggtcaacgcttttcagttcgccgcgcccatcctgctgggcgacgtggtggacatgtacgtggagcgcctgcgcatcggccagaaatcgatcacgctgaagatttccgtcgaggccgagcgcatggacggctcgcacgtgcgcatcacggaagtgatcgcgactttcgtcgcggtcgacgccgaaggcaagtccagattgctgggcgacgcctag

SEQ ID NO: 6569 - protein, 125 aa, Chromobacterium violaceum ATCC 12472
MEQQEHRTPVLRVRALPTSTNAYGRVQAGWLMSQIDMAGSLDAERLSRGPVTTVAVNAFQFAAPILLGDVVDMYVERLRIGQKSITLKISVEAERMDGSHVRITEVIATFVAVDAEGKSRLLGDA

SEQ ID NO: 6570 - DNA, 432 bp, Photorhabdus luminescens subsp. laumondii TTO1
  CDS (1)..(432): transl_table=11
atgacacaacaacaattacctaacggagagttagtcctccgcacactggctatgcccgctgataccaacgccaatggagatatttttggtggatggttaatgtcacaaatggatattggtggtgcaattctggcaaaagaaattgcggaaggccgtgttgtcactgtcagagtagatggtattactttcttgaaacctgttgccgttggtgatgtcgtctgctgctatgcacattgcctcaaaaccggtaacagttcgattaccatcaacattgaagtctgggtgaagaaagtcgcctctgaacctgtcggccaacgctatcgtgcaaccgaagcggtattcacttatgttgcggtaaatgaagataatacttcacgtcggttaccagaaggtaaaacccactttcaactcgctagcagtactagcgaataa

SEQ ID NO: 6571 - protein, 143 aa, Photorhabdus luminescens subsp. laumondii TTO1
MTQQQLPNGELVLRTLAMPADTNANGDIFGGWLMSQMDIGGAILAKEIAEGRVVTVRVDGITFLKPVAVGDVVCCYAHCLKTGNSSITINIEVWVKKVASEPVGQRYRATEAVFTYVAVNEDNTSRRLPEGKTHFQLASSTSE

SEQ ID NO: 6572 - DNA, 417 bp, Herminiimonas arsenicoxydans
  CDS (1)..(417): transl_table=11
atggcaagcgaacaccacacagacctgcctgcagggaaaatcccgcaaatgcgcgtcgtaccgatgccgcatgattccaatatgcatggcgacgtattcggcggctggatcatggcgcaggtcgatctggcgggtgccgtatgcgccacccgccgcgccaacggtcgtgttgtcacgattgcagtgaattcatttttattcaagcatccggtattcgtcggcgacctgttgtcgatctacgctgaaattgtcaaggtcggcaatacctcgatcaccgtgaacgtggaatgctacgcagaacgcaatcgcctggaagtagaaattgtgaaagtgacagaagccaccctgacctacgtcgccaccgatgacaaccgcaagccgcgccacctgccgccgccgatcctgccacacaaataa

SEQ ID NO: 6573 - protein, 138 aa, Herminiimonas arsenicoxydans
MASEHHTDLPAGKIPQMRVVPMPHDSNMHGDVFGGWIMAQVDLAGAVCATRRANGRVVTIAVNSFLFKHPVFVGDLLSIYAEIVKVGNTSITVNVECYAERNRLEVEIVKVTEATLTYVATDDNRKPRHLPPPILPHK

SEQ ID NO: 6574 - DNA, 411 bp, Burkholderia vietnamiensis G4
  CDS (1)..(411): transl_table=11
atgaaagcccccgccatgaccgatccgatcctcgagctcccgcagaaacagcccgccctgcgcgtcgtcccgcaaccgcacgacgccaacgtccacggcgacgtgttcggcggctggatcatgtcgcaggtcgacatcgccggctcgattccggcgagccagcgtgccaacggccgcgtcgcgacggtcgcggtcaattcgttcgtgttcaagcagccggtgttcgtcggcgacgtgctgagcttctacgcgacgatcatgcgcaccggcaacacgtcggtgacggtcgacgtcgaggtgtacgcgcagcgcatgcggctgatgggcgaaatcgtgaaggtcaccgaagccacgctcacctacgtcgcaaccggcgccgaccgcaagccgcgcccgctgccgccgctgtga

SEQ ID NO: 6575 - protein, 136 aa, Burkholderia vietnamiensis G4
MKAPAMTDPILELPQKQPALRVVPQPHDANVHGDVFGGWIMSQVDIAGSIPASQRANGRVATVAVNSFVFKQPVFVGDVLSFYATIMRTGNTSVTVDVEVYAQRMRLMGEIVKVTEATLTYVATGADRKPRPLPPL

SEQ ID NO: 6576 - DNA, 444 bp, Dichelobacter nodosus VCS1703A
  CDS (1)..(444): transl_table=11
atgaattccgaaaaaaaacttgaacgcagcgaacctcaaggtgaattggtattgcgcagtttagcgatgcccgccgataccaatcctaatcaagatatttttggcggctggattatgtcgcaaatggatatgggtgctggcattcttgctgcagaaatcacacgcggtcgcgcggtcaccattgccgtgcaagaaatgacttttatgcaccccgtgcgcgttggtaacgtagtttgttgttatggtcgttgcgtgcatattgggcgaacgtctttgcaaattaaaattgaagtttgggtgaaaatatttgggcaaagcggttttgaagagagccgaaaattggttactgaagcgatttttacctacgttgccatcgatgaaaacggcaatccgcgtccgattcccaaagaaaataatccgaaactcgctgatgtgaatttataa

SEQ ID NO: 6577 - protein, 147 aa, Dichelobacter nodosus VCS1703A
MNSEKKLERSEPQGELVLRSLAMPADTNPNQDIFGGWIMSQMDMGAGILAAEITRGRAVTIAVQEMTFMHPVRVGNVVCCYGRCVHIGRTSLQIKIEVWVKIFGQSGFEESRKLVTEAIFTYVAIDENGNPRPIPKENNPKLADVNL

SEQ ID NO: 6578 - DNA, 420 bp, Acinetobacter sp. ADP1
  CDS (1)..(420): transl_table=11
gtgttagacgctcatatcagcccagaagggactttatcacttcaaacgattgccatgcctgcagataccaactggagtggtgatgtatttggtggctggattgtgtcacaaatggatttggctggtgcaattcatgcagaacgttttagtaaaggacgttgtgccacgatttcgatcaatcagatgaccttcctggttcctgtgaaggtcggagatgtgattagctgttataccaaaattctcaaagttggcaacacatctatccagatgcaaatagaagtttgggatagtcatgatagctcacgaccacctaaacgagtgacagagggggtatttacctttgttgctgtggatgtaaaaggcaacaagcgtacaatcgcggaagacctcaaacagcagtttttacaacacgccagttaa

SEQ ID NO: 6579 - protein, 139 aa, Acinetobacter sp. ADP1
MLDAHISPEGTLSLQTIAMPADTNWSGDVFGGWIVSQMDLAGAIHAERFSKGRCATISINQMTFLVPVKVGDVISCYTKILKVGNTSIQMQIEVWDSHDSSRPPKRVTEGVFTFVAVDVKGNKRTIAEDLKQQFLQHAS

SEQ ID NO: 6580 - DNA, 423 bp, Erwinia carotovora subsp. atroseptica SCRI1043
  CDS (1)..(423): transl_table=11
atgagcaaacaaaacgtgttaccacagggtgaactggttctccgtacgctggccatgccagccgatactaatgcgaatggcgatatttttggcggctggctgatgtcgcaaatggacatgggcggtgcgattttggcgaaagaaatcgccgaggggcgtgtcgttaccgtacgggttgatggaatgtcgttcttaaaaccagtcgccgtgggcgatgtcgtttgctgctatgcgcgttgcttacgcactggccgcagctccatcaacgtcaatgttgaggtttgggtaaagaaagtgtcgtctgagccgattggtcagcgctatcgggccaccgaagcgttattcacctacgtcgcagtcgatgaagaaggccagccgcgtgagctgccagcaggtaaaagcaacttcacaccaagcgagtaa

SEQ ID NO: 6581 - protein, 140 aa, Erwinia carotovora subsp. atroseptica SCRI1043
MSKQNVLPQGELVLRTLAMPADTNANGDIFGGWLMSQMDMGGAILAKEIAEGRVVTVRVDGMSFLKPVAVGDVVCCYARCLRTGRSSINVNVEVWVKKVSSEPIGQRYRATEALFTYVAVDEEGQPRELPAGKSNFTPSE

SEQ ID NO: 6582 - DNA, 447 bp, Desulfotalea psychrophila LSv54
  CDS (1)..(447): transl_table=11
atggaagaacagccctatgcccccgctggtgaattactgctacgcactctggccatgccctctgacacaaaccccaatggtgacatcttcggtggttggattatgtcacagatggatattgccggtggtattttagccaaggagatcagctgtgcccgtacagtcacagttgccgtagacagtatcgttttcattaaaccggtaagcgtcggcgacgtagtctgctgccatggcaaggtaattcatatcggcaccacatcgatgaaaataaatttggaggtctggacaaaaaagacctccgcatccggtacagcccacgcccatgaacgttttttagttaccaaggcagcctttacctatgtggccatcgatgccatgggaaaaaagcaggtcattgacaaggagagtccctgctttcaggagtttatgcaaaatctccccctataa

SEQ ID NO: 6583 - protein, 148 aa, Desulfotalea psychrophila LSv54
MEEQPYAPAGELLLRTLAMPSDTNPNGDIFGGWIMSQMDIAGGILAKEISCARTVTVAVDSIVFIKPVSVGDVVCCHGKVIHIGTTSMKINLEVWTKKTSASGTAHAHERFLVTKAAFTYVAIDAMGKKQVIDKESPCFQEFMQNLPL

SEQ ID NO: 6584 - DNA, 498 bp, Symbiobacterium thermophilum IAM 14863
  CDS (1)..(498): transl_table=11
atgcacacgcccgaacagcacctggagcccaagcccgcccgcctgagcgcctgcgagatgacggagatcgtcatgcccaacgacgccaacccgctgggcatcatgctcggcgggcggctgctgcacatcatggacatcgccgcgaccatcgccgcgatgcgccacgccggccatccctgcgtcaccacctccttcgactcggtcgacttccacacgcccatccacatcggcgaggtctgcatcgtgagggcgcgggtgacctggaccggccgcacctcgctggaagtgggcatcgacgtcttcgcggaatcgcccatcaagggcgagcggcgtcacacgacgtcggcgtttgcgaccttcgtcgccctggaccaggagaccggccggccgacgcgggtgccgccgctgctcctcgaaaccgacgaggaccggcgttgcttcgccgaaggcgaacagcggcggcagctgaggctggcgcgccggcacgccaggggttga

SEQ ID NO: 6585 - protein, 165 aa, Symbiobacterium thermophilum IAM 14863
MHTPEQHLEPKPARLSACEMTEIVMPNDANPLGIMLGGRLLHIMDIAATIAAMRHAGHPCVTTSFDSVDFHTPIHIGEVCIVRARVTWTGRTSLEVGIDVFAESPIKGERRHTTSAFATFVALDQETGRPTRVPPLLLETDEDRRCFAEGEQRRQLRLARRHARG

SEQ ID NO: 6586 - DNA, 465 bp, Mannheimia succiniciproducens MBEL55E
  CDS (1)..(465): transl_table=11
atgactgacaaaactaacataataagagaacccgaaggttcattgattctgcgcacattagctatgccttccgacaccaatgccaacggcgatatattcggcggctggattatgtcacaaatggatatgggcggtgctattttagccaaagaaataggtaaaggcagagtggtcacggtttgcgtagataaaatgacgttcctacgccctatttccgtgggggatgtagtttgttgctatggtaaattagtgaaaatcgggcgctcttccatgcaagtcaaggtggaagtttggatcaaaaaagtttacgatggcgttcgtgatcgtcattgcgtaaccgaagcgctttttacttatgtcgctattgataaagagggtaaaccgagagccgtaccgcgagaagacaatcccgaattggaacaggctttagcattactcaacaaccacactacagaggaaaactaa

SEQ ID NO: 6587 - protein, 154 aa, Mannheimia succiniciproducens MBEL55E
MTDKTNIIREPEGSLILRTLAMPSDTNANGDIFGGWIMSQMDMGGAILAKEIGKGRVVTVCVDKMTFLRPISVGDVVCCYGKLVKIGRSSMQVKVEVWIKKVYDGVRDRHCVTEALFTYVAIDKEGKPRAVPREDNPELEQALALLNNHTTEEN

SEQ ID NO: 6588 - DNA, 381 bp, Legionella pneumophila subsp. pneumophila str. Philadelphia 1
  CDS (1)..(381): transl_table=11
atgcaaacacctaaaggagagttgactatccaaactttggccatgcctttaaatactaatgccaatggcgatatatttggcggatggatagtctcccaaatggatttggcagcaggtgttttggcaaagagaatttcccatgggcgtgtcgctaccgttgcaattaattcaatgacttttttaaaacctgtgcatgtaggcgatgtagtgagctgccacgttgaattagtgaaagtaggtaatacctctatgactattcgggttgaggtatgggcttactcatcgatcaaaatggaaaaataccaggttactgaagggatatttgtttttgttgcgattgatgaaaatggaaagccgaggcaggtacccaaaacacaatga

SEQ ID NO: 6589 - protein, 126 aa, Legionella pneumophila subsp. pneumophila str. Philadelphia 1
MQTPKGELTIQTLAMPLNTNANGDIFGGWIVSQMDLAAGVLAKRISHGRVATVAINSMTFLKPVHVGDVVSCHVELVKVGNTSMTIRVEVWAYSSIKMEKYQVTEGIFVFVAIDENGKPRQVPKTQ

SEQ ID NO: 6590 - DNA, 414 bp, Burkholderia pseudomallei K96243
  CDS (1)..(414): transl_table=11
atggaagcttcaatcatgaccgattcgccgatgcaactcccgcaaaaaccgcccgcgctgcgcgtcgtcccgcaaccgtccgacgcgaacgttcacggcgacgtgttcggcggctggatcatggcgcaggtcgacgtcgcgggctcgattccggcgagccgccgcgcgaacggccgggtcgcgacggtcgcggtcaattcgttcctgttcaagcagccggtgttcgtcggcgatctgctcagcttctacgcgagcatcgtgaagacgggcaacacgtcggtgacggtcgacgtcgaagtctacgcgcagcggatgagcctgatgagcgagatcgtcaaggtgacggaggcgacgctcacctacgtcgcgaccgactccgatcgccgcccgcgcgcgctgccgccgctcgaataa

SEQ ID NO: 6591 - protein, 137 aa, Burkholderia pseudomallei K96243
MEASIMTDSPMQLPQKPPALRVVPQPSDANVHGDVFGGWIMAQVDVAGSIPASRRANGRVATVAVNSFLFKQPVFVGDLLSFYASIVKTGNTSVTVDVEVYAQRMSLMSEIVKVTEATLTYVATDSDRRPRALPPLE

SEQ ID NO: 6592 - DNA, 411 bp, Azoarcus sp. EbN1
  CDS (1)..(411): transl_table=11
atgtccgatgtttcaacgaccccggtgaaattgccgaagaaccgccagccggcgctgcgggtgatgccgatgccgggggacctcaaccccgccggcgacgtattcggtggctggatcatgtcgatggtcgatatcgcgggcggcatcgccgcgcactaccgcgcgcgcggccgctgtgcgacggtcgcggtcaacgccttcacgttcaagcagccggtttcggtcggcgacctggtcagcttttatgccgacgtggtgtcggtcgggcgcacgtcgatcaccgtcgatgtccaggtgttcgccgagcgcaatcccgagagcctgttcgtcgtgaaagtcaccgaggcgaagctgacctacgtggcgctcgacgaccacggcaacaagcgaccggttccgccggccgaatga

SEQ ID NO: 6593 - protein, 136 aa, Azoarcus sp. EbN1
MSDVSTTPVKLPKNRQPALRVMPMPGDLNPAGDVFGGWIMSMVDIAGGIAAHYRARGRCATVAVNAFTFKQPVSVGDLVSFYADVVSVGRTSITVDVQVFAERNPESLFVVKVTEAKLTYVALDDHGNKRPVPPAE

SEQ ID NO: 6594 - DNA, 417 bp, Silicibacter pomeroyi DSS-3
  CDS (1)..(417): transl_table=11
atgcagaaacaaggacaccctgcgatgaccgatccacagccgagcggggaactgacccttcgcacacttgcgatgccgcgcgatgtaaacgtcaacggcgacatctttggcggttgggtgctgagccagatggatatcgccgcgggtcttacagccggcgcgcgggccggtggacgggtgaccacggtggcggtggatgcgatgaagttcatccggcccgtcggcgttggcgacgtgttgtgcatctattgccaggtggtgcgggtcgggcgcagctcgatggcgatcgagatcgaggcctgggcgctgcgtgaccgacaggggctgcgtgaaaaggtgaccgaggctgtgttcacctttgttgccatcgacgaagaaggtcggccccgcccggtcgatgccgccgctgcaggctga

SEQ ID NO: 6595 - protein, 138 aa, Silicibacter pomeroyi DSS-3
MQKQGHPAMTDPQPSGELTLRTLAMPRDVNVNGDIFGGWVLSQMDIAAGLTAGARAGGRVTTVAVDAMKFIRPVGVGDVLCIYCQVVRVGRSSMAIEIEAWALRDRQGLREKVTEAVFTFVAIDEEGRPRPVDAAAAG

SEQ ID NO: 6596 - DNA, 402 bp, Pseudomonas syringae pv. syringae B728a
  CDS (1)..(402): transl_table=11
atgatcgagctcgaacaagaagacccaaccccgcaaggcgaccttgcactgcaaatcaccgcccttccccgcgaaaccaatggctttggcgacatttttggcggctggctggtgtcccagatggacctggcaggcacagcgatggccagcaaagtcgcgggtggccgtgtggcgaccgtcgccatcgatcgcatggcgtttcttgtcccggtcgcagtcggcgaacagctttccttctacacccgcaccctcgaagtcggacgcacctcgatcaagatgatggtcgaagtgtggagcgacgacccgctcaccagcgaatggcgcaaggtcaccgaggctgcgttcgtgttcgtggccatagatgccagcggccggacgcgctcggttcctgcgcgacggtaa

SEQ ID NO: 6597 - protein, 133 aa, Pseudomonas syringae pv. syringae B728a
MIELEQEDPTPQGDLALQITALPRETNGFGDIFGGWLVSQMDLAGTAMASKVAGGRVATVAIDRMAFLVPVAVGEQLSFYTRTLEVGRTSIKMMVEVWSDDPLTSEWRKVTEAAFVFVAIDASGRTRSVPARR

SEQ ID NO: 6598 - DNA, 465 bp, Haemophilus influenzae 86-028NP
  CDS (1)..(465): transl_table=11
atgtctgccaattttactgataaaaatggtcgccaatcaaaaggagttcttttactacgaactttggcgatgccttctgacaccaatgctaacggagatatttttggtggctggattatgtctcaaatggatatgggcggcgcgattttagcgaaagaaatcgcacacggacgcgtggttactgttgccgttgaaagtatgaattttatcaaaccaatctctgtgggcgatgttgtttgttgctacggtgaatgtctcaaagttgggcgttcttccattaaaattaaagtagaagtatgggtaaaaaaagtggcgagtgagccaattggcgaacgttattgtgtcaccgatgcggtatttacttttgttgcagttgataataatggtcgctctcgcacgattccccgtgaaaataaccaagagttagaaaaagcattagccttaatttcagaacaacccttgtaa

SEQ ID NO: 6599 - protein, 154 aa, Haemophilus influenzae 86-028NP
MSANFTDKNGRQSKGVLLLRTLAMPSDTNANGDIFGGWIMSQMDMGGAILAKEIAHGRVVTVAVESMNFIKPISVGDVVCCYGECLKVGRSSIKIKVEVWVKKVASEPIGERYCVTDAVFTFVAVDNNGRSRTIPRENNQELEKALALISEQPL

SEQ ID NO: 6600 - DNA, 477 bp, Colwellia psychrerythraea 34H
  CDS (1)..(477): transl_table=11
atgaatgcaccacaacgtgacataactttaagatttttagccgagccacaagatgtaaattttggtggtaaagtgcatggtggcgctgtgatgaaatggatagatttagctgcttatgcttgtgctgctggttggagtggtcgttattgtgttaccgcctatgctggtggtattcgttttgttgcccctattcatgttggtagtttagttgaagtagaagctaaagttatttacaccggtaactcatcaatacatatagcgctagaagtaaacgcttgcgatcctaaatccttaaaccgtcgtttaactactcactgcattgttatcatggtcgcagttgatcaaaatggtcaatctgaacgtgtgccgcaatggcaacctcaaacggaagcagataaaaaacaacatgagtccgcggtgaaactgatggaaatgcgcaaacaaattggtgaagaaatgcaaatttttgtcgattaa

SEQ ID NO: 6601 - protein, 158 aa, Colwellia psychrerythraea 34H
MNAPQRDITLRFLAEPQDVNFGGKVHGGAVMKWIDLAAYACAAGWSGRYCVTAYAGGIRFVAPIHVGSLVEVEAKVIYTGNSSIHIALEVNACDPKSLNRRLTTHCIVIMVAVDQNGQSERVPQWQPQTEADKKQHESAVKLMEMRKQIGEEMQIFVD

SEQ ID NO: 6602 - DNA, 456 bp, Dechloromonas aromatica RCB
  CDS (1)..(456): transl_table=11
atgaaaactgccgcctttccgggaaaatccggaaacaattcgcaatccggactgaccatgaccattgatcccctcgttcttccaaacaagcactgcacgctgcgtgtcgtcccgatgccggccgacctcaaccagaatggcgatgtcttcggcggctgggtcatggcccaggtcgacgtggctggcgccatcccggcaatgcgtcgggcttgcggcagagtagccaccgtttcggttaattccttcctgttcaagcagccggtttcggtcggcgacattgtcagcctgtacgccgatatcgtgcgggtcggcacgacctcgattaccgttcgagtcgaggtctatgccgaacggaattacgccgcaccaattatcgtcaaggtgactgaggctgagctgacctatgtggcgattgatggcgccgggatgaagcgcaatgttccgaccgaaaaatga

SEQ ID NO: 6603 - protein, 151 aa, Dechloromonas aromatica RCB
MKTAAFPGKSGNNSQSGLTMTIDPLVLPNKHCTLRVVPMPADLNQNGDVFGGWVMAQVDVAGAIPAMRRACGRVATVSVNSFLFKQPVSVGDIVSLYADIVRVGTTSITVRVEVYAERNYAAPIIVKVTEAELTYVAIDGAGMKRNVPTEK

SEQ ID NO: 6604 - DNA, 489 bp, Pseudomonas fluorescens PfO-1
  CDS (1)..(489): transl_table=11
atgttcggtgctgaatcgtttttcccgaagacggctaccaccagcaatacccaacgaagagtcacgggtcagaggccccccggcatgatagagctcgaacaagaagatccgatcccgcaaggcgacctggccttgcaaatcaccgcgcttccccgcgaaaccaacggcttcggcgatattttcggcggctggctggtggcgcagatggacctggccggcacggccatggccagccgtgttgccggtggccgtgtcgcgaccgtggccatcgaccgcatggcgtttctggtgccggtggctgtcggcgcgcaattgtccttttatacccagaccctggaaatcggtcgcagctcgatccagatgatggtcgaggtgtggagcgacgacccgctgtccagcgagtggcgtaaagtgaccgaagcggtgttcgtgttcgtcgccatcgatggcagcggccgcacccgttcggttccgccacgcgcacgttaa

SEQ ID NO: 6605 - protein, 162 aa, Pseudomonas fluorescens PfO-1
MFGAESFFPKTATTSNTQRRVTGQRPPGMIELEQEDPIPQGDLALQITALPRETNGFGDIFGGWLVAQMDLAGTAMASRVAGGRVATVAIDRMAFLVPVAVGAQLSFYTQTLEIGRSSIQMMVEVWSDDPLSSEWRKVTEAVFVFVAIDGSGRTRSVPPRAR

SEQ ID NO: 6606 - DNA, 444 bp, Geobacter metallireducens GS-15
  CDS (1)..(444): transl_table=11
atgaaccgcgactggaccctcatcgagaccctcctcccccaggacaccaattctgcgggaaacatcttcggcggggtgctcatgagcctcatggacaaggcggcggccatcaccgcctggcgctacgcccggtgcgacatggtcaccgccggggccgaggagatcgccttcatccggccggtgcatgtgggggaggtggtcaaggtggaggcccgggtggtctgtaccggccgaacgtccatcgacatggcggtaatggttgaggcggaggatgtcttcacggggcagagttacgaggcggcccggggatacttcaccatggtggccctggacaagggagggaagccgacggaggtcccgccgtgggaaccccgcaccgaggaggagcggcgccgctgcgaagcgtccggggagcgccgggccaggcgccgggagaggaagtga

SEQ ID NO: 6607 - protein, 147 aa, Geobacter metallireducens GS-15
MNRDWTLIETLLPQDTNSAGNIFGGVLMSLMDKAAAITAWRYARCDMVTAGAEEIAFIRPVHVGEVVKVEARVVCTGRTSIDMAVMVEAEDVFTGQSYEAARGYFTMVALDKGGKPTEVPPWEPRTEEERRRCEASGERRARRRERK

SEQ ID NO: 6608 - DNA, 531 bp, Desulfovibrio desulfuricans G20
  CDS (1)..(531): transl_table=11
atgaatgatcgtaaggtgagcgacagcgataccattatgacgcacagaggcttgccgcaggatgccaaccccgccggcaacatccacggcggcaccattctgaagcatatcgatcttgccggtgccgtggcggccatgcgtcacgccagaggccgcacggtggtcaccgcgtccattgacaggatggaattcaaggctgccgtacatgtgggagagcttatggtgctgaaggccagcgtgaacatggtcagtaatacgtccatggaagtgggggtacgtgtggaggctgaaaacctgctcacgggcgaggtgcggcatgctgcttcggcatacctgacatttgtggccatggatgaaaaccgcagaccgactgcagtgccgggcctgatactggaaacgcccgagcagcaccgccgtaaccgcgaagccctgatgcggcgcgaggtgcggcgcgaagagcggcggcgcgaaaaactgtcgcaggaagggcagactctggcccgtgatgaaggcgtgaaagaactgtactga

SEQ ID NO: 6609 - protein, 176 aa, Desulfovibrio desulfuricans G20
MNDRKVSDSDTIMTHRGLPQDANPAGNIHGGTILKHIDLAGAVAAMRHARGRTVVTASIDRMEFKAAVHVGELMVLKASVNMVSNTSMEVGVRVEAENLLTGEVRHAASAYLTFVAMDENRRPTAVPGLILETPEQHRRNREALMRREVRREERRREKLSQEGQTLARDEGVKELY

SEQ ID NO: 6610 - DNA, 453 bp, Rhodospirillum rubrum ATCC 11170
  CDS (1)..(453): transl_table=11
atgagttgtaccgatgacgccaccactggcgcttgccaagtcgaccccggggtggaggctggcgacgaaccgcgcggcacggtgtcgatccgcaccatcgccatgcccgccgataccaacccttcgggcgatattttcggcggctggctgatggcgcagatggatctggccgggggaacccacgcccgcaaggcggccggcggccgggtggtgacggtggcggtgaacggcttctcgttccatctgccggtgaaagtcggcgacgaggtgacctgctataccgagatcatcaagcgcggccgcaccagtttgaccctggatgtgcaggcctgggtctgccggcaggacggcggcgccaagatcaaggtgaccgaaggcgtcttcgttttcgtcgccctggatgccgaggggcgggcccgccccctgccgcccgtcgtttcctctccccgctaa

SEQ ID NO: 6611 - protein, 150 aa, Rhodospirillum rubrum ATCC 11170
MSCTDDATTGACQVDPGVEAGDEPRGTVSIRTIAMPADTNPSGDIFGGWLMAQMDLAGGTHARKAAGGRVVTVAVNGFSFHLPVKVGDEVTCYTEIIKRGRTSLTLDVQAWVCRQDGGAKIKVTEGVFVFVALDAEGRARPLPPVVSSPR

SEQ ID NO: 6612 - DNA, 405 bp, Saccharophagus degradans 2-40
  CDS (1)..(405): transl_table=11
atgtccagttcagatttagacgaagaacccaccccaacaggtgaactcgttttacaaaccctcgccctacccaaagacaccaactccaatggcgatgtatttggcggctggcttatgtcgcaaatggatttagctggcgccatcgctgcacgcgaactggccaaaggccgcgtaaccactgtcgccgtaggtgccatgcactttttgcgccccgtacctgtcggcgcaacggtaagttgttattgcgaaattttagaggtgggtcgctcatccataaaagcgttaatcgaagtgtgggtaaaacattacagcttcgaagagcaacaaaaagtcaccgacggtgagtttgtttatgtgtctattgataatgcagggcgtactcggccggtttatatggataggtaa

SEQ ID NO: 6613 - protein, 134 aa, Saccharophagus degradans 2-40
MSSSDLDEEPTPTGELVLQTLALPKDTNSNGDVFGGWLMSQMDLAGAIAARELAKGRVTTVAVGAMHFLRPVPVGATVSCYCEILEVGRSSIKALIEVWVKHYSFEEQQKVTDGEFVYVSIDNAGRTRPVYMDR

SEQ ID NO: 6614 - DNA, 396 bp, Burkholderia xenovorans LB400
  CDS (1)..(396): transl_table=11
atgaccaatcttcttcaactcccgcaaaagcactgcgcgctgcgcgtggtgccgcagccctcggatgcgaacgtccacggcgacgtgttcggcggctggatcatggcgcaagtggacattgccggctcgatcccggcaagccgccgtgccaacgggcgggtggccaccatcgcggtcaattcgttcgtgttcaagcagccggtgttcgtcggcgatctgctgagcttttacgcggatatcgtcaagacgggcaatacgtcggtcaccgtcgaggtcgaggtctacgcgcagcgcatgagcctcaccgaagacctcgtgaaagtcaccgaagccacgctgacctatgtcgcgaccgatagcgacaggcgtccgcgcgcgctgccgacgctggattga

SEQ ID NO: 6615 - protein, 131 aa, Burkholderia xenovorans LB400
MTNLLQLPQKHCALRVVPQPSDANVHGDVFGGWIMAQVDIAGSIPASRRANGRVATIAVNSFVFKQPVFVGDLLSFYADIVKTGNTSVTVEVEVYAQRMSLTEDLVKVTEATLTYVATDSDRRPRALPTLD

SEQ ID NO: 6616 - DNA, 510 bp, Acidobacteria bacterium Ellin345
  CDS (1)..(510): transl_table=11
atgaccaccgaaaaccttcatcccaagccagtgcgcgattccgcctccgaaatggtggagatcgtcctccccaacgatgccaacccactcggccatcttctcggcggccgcctcatgcactggattgatatctccggcgcgctcgctgcgcaccgccactgccgcaactacgtcgtcaccgcctccatcgaccacctcgatttcctagtccccgtacaggtcggcgatctggttgtcttccaatcgtccgtaaatcgtgcgttcaacacgtctatggagatcggcgtcaaagttctggtcgagaactacatcgcctccacccgccagcacgtcagctcggcctacctcacgttcgtcgccgtggatcgccacggacgaaagctcccggttccgcaagtcatccctgagaccgaagacgagaagcgccgctacgaaggtgccctgcgccgccgcgaagcccgcaaaagcgaactagagcaccgcaaagccgcccgcgccaaaaaggcctag

SEQ ID NO: 6617 - protein, 169 aa, Acidobacteria bacterium Ellin345
MTTENLHPKPVRDSASEMVEIVLPNDANPLGHLLGGRLMHWIDISGALAAHRHCRNYVVTASIDHLDFLVPVQVGDLVVFQSSVNRAFNTSMEIGVKVLVENYIASTRQHVSSAYLTFVAVDRHGRKLPVPQVIPETEDEKRRYEGALRRREARKSELEHRKAARAKKA

SEQ ID NO: 6618 - DNA, 411 bp, Silicibacter sp. TM1040
  CDS (1)..(411): transl_table=11
atgtccacatctcaaccagatactgccccgcaaaatccgcccgagacccaaccgacaatccgcgtcatcgcgatgcccacggacaccaacccggcgggtgatatctttggtggctggctcatgagccagatggatcttgcggcaggcaccatcgcggcaagggtatccaaggggcgggcttcaaccgtctcggtcgaggagattcagtttcatcgccccgttctggtgggcgacgaggtctcgctatatgcggagatgctgaaaatcgggcgcacctcgatgcgcatccgtgtgcgcgcctggcgtcgcgcccgccatcaggaagaaacccagcaggtgacagaagcgatcttcaccttcgtggcgctggacgaccatgcgcggccgaggccggtgctgcgcgaggcgtaa

SEQ ID NO: 6619 - protein, 136 aa, Silicibacter sp. TM1040
MSTSQPDTAPQNPPETQPTIRVIAMPTDTNPAGDIFGGWLMSQMDLAAGTIAARVSKGRASTVSVEEIQFHRPVLVGDEVSLYAEMLKIGRTSMRIRVRAWRRARHQEETQQVTEAIFTFVALDDHARPRPVLREA

SEQ ID NO: 6620 - DNA, 519 bp, Myxococcus xanthus DK 1622
  CDS (1)..(519): transl_table=11
atgaccgacctgagcgcgaagaatccgaaggacacggaggtggtgatgacccagctcatcctgcctccggacgccaacaacctggatgctgccttcggcggcaaggtgatgcagtggattgacatctgcggggccgtggccgcgcagcgccactgccggcaggtcgtggtcacggcctccatggatgatttgcacttccacgcccccatcaaggtcggctgggtcgcgctgctgcacggccgggtgctggccgccttccgcacctccatggaggtgggcgtcacggtgcacgcggagaacccgctcaccggcgagcgtcacctcaccaccagcgcgctgctgaccttcgtggccatcgacaaggacggccagcgcgtgccggtgccgccccttctgatggagacggacgcggaccgcatggccttccaggaggcacagacacgtcggacgctgcgtctggcccggcagaaggagaaccagtcctggttgaaggtgatgacgcccatcgcgggtgcctga

SEQ ID NO: 6621 - protein, 172 aa, Myxococcus xanthus DK 1622
MTDLSAKNPKDTEVVMTQLILPPDANNLDAAFGGKVMQWIDICGAVAAQRHCRQVVVTASMDDLHFHAPIKVGWVALLHGRVLAAFRTSMEVGVTVHAENPLTGERHLTTSALLTFVAIDKDGQRVPVPPLLMETDADRMAFQEAQTRRTLRLARQKENQSWLKVMTPIAGA

SEQ ID NO: 6622 - DNA, 393 bp, Mesorhizobium sp. BNC1
  CDS (1)..(393): transl_table=11
atggctgaaacctctgccgccccgcggggcgagcttacgattcgcacccaggcgatgcccggagatgccaatgccgccggagacattttcggcggctgggtgatgtcgcagatggatctggcaagcggcattagggcagcggaacgggcgcgcgggcgcgtcgtgacggctgccgtcagggaaatgcactttcgcaagccggttcaggtcggtgatacgctttgtgtctatacccaggtgacgaatgttggccgcacctctatcacgctaaaggtggaggcatgggcacagcgttacctgtccgacgtcatggacctggtcaccatggcggacttcgtcatggtcgcgcttgacgggaccggccggccgacaccggtgccgcccgagttctga

SEQ ID NO: 6623 - protein, 130 aa, Mesorhizobium sp. BNC1
MAETSAAPRGELTIRTQAMPGDANAAGDIFGGWVMSQMDLASGIRAAERARGRVVTAAVREMHFRKPVQVGDTLCVYTQVTNVGRTSITLKVEAWAQRYLSDVMDLVTMADFVMVALDGTGRPTPVPPEF

SEQ ID NO: 6624 - DNA, 465 bp, Haemophilus somnus 129PT
  CDS (1)..(465): transl_table=11
atgtcagtatttattgaaactaatacaggtcgtcaatcgaagggagttctcttattacgtaccttagctatgccttcaaatacgaatgcgaatggcgatattttcggcggttggattatgtcaaaaatggatataggcggtgccattttagctaaagaaattgctcatggacgtgttgtaacagtagctgtaaacagtatgacatttatcaaacctattgctgtcggcgatgtggtttgctgttatggggaatgtgtaaaaattggccgctcttccgttcaaatcaaaattgaagtatgggtcaaaaaggttgccagcgaacctattggtgaacgctattgtgtaacggaagctgttttcacttttgttgccgtagatgcacaaggtaaacctcgagccataccaagagacaataatccggaagtagaaaaagcattggcacaaatttcggcaaataactcataa

SEQ ID NO: 6625 - protein, 154 aa, Haemophilus somnus 129PT
MSVFIETNTGRQSKGVLLLRTLAMPSNTNANGDIFGGWIMSKMDIGGAILAKEIAHGRVVTVAVNSMTFIKPIAVGDVVCCYGECVKIGRSSVQIKIEVWVKKVASEPIGERYCVTEAVFTFVAVDAQGKPRAIPRDNNPEVEKALAQISANNS

SEQ ID NO: 6626 - DNA, 387 bp, Rhizobium leguminosarum bv. viciae 3841
  CDS (1)..(387): transl_table=11
atgaccgatgccgccaagccgagaggcgaattaacgctgaggacgcttgccatgccgggcgatgccaatccggctggcgatatcttcggcggctgggtcatggcgcagatggaccttgcctccggcatccgtgcagccgagcgcgccaagggccgcgtcgtcaccgccgccgtcaaggagatggccttcgagctgccggtcaagatcggcgacacgttgtctgtctataccgatatcgaccgcgtcggccgcacctcgatcacgctctgcgtcgaagcctgggcgcaccgcgcacgttacgccaagatggaaaaggtcacagctggcaccttcatcatggtggcgctcgacgaagagggcaaaccgaagcaagtccccgaggagtga

SEQ ID NO: 6627 - protein, 128 aa, Rhizobium leguminosarum bv. viciae 3841
MTDAAKPRGELTLRTLAMPGDANPAGDIFGGWVMAQMDLASGIRAAERAKGRVVTAAVKEMAFELPVKIGDTLSVYTDIDRVGRTSITLCVEAWAHRARYAKMEKVTAGTFIMVALDEEGKPKQVPEE

SEQ ID NO: 6628 - DNA, 390 bp, Magnetococcus sp. MC-1
  CDS (1)..(390): transl_table=11
atgcaaggtgaactgccgagtgaattgaccatacgtaccctggcgatgcccgccgataccaatccgtcgggggatatttttgggggctgggtgatgtcccaaatggacttggccgccggtatctgtgccgggcaacgggcaaggcggcgggtggtgacggtggccgtggatgccatgagctttattcaacccgtgcgggtgggcgacgacctatgcgtctatacccaagtggtcaccgtagggcgtacctcgatgaccatccaagtggaagcatgggcacgtcgtgaccgcatcggggaacgggttaaagtgacccaggcccactttaaatttgttgctctggatgacgaaggccgaccgacccccattcccgcactaagcgaaatctaa

SEQ ID NO: 6629 - protein, 129 aa, Magnetococcus sp. MC-1
MQGELPSELTIRTLAMPADTNPSGDIFGGWVMSQMDLAAGICAGQRARRRVVTVAVDAMSFIQPVRVGDDLCVYTQVVTVGRTSMTIQVEAWARRDRIGERVKVTQAHFKFVALDDEGRPTPIPALSEI

SEQ ID NO: 6630 - DNA, 432 bp, Acidovorax sp. JS42
  CDS (1)..(432): transl_table=11
atgtcccaggatcgccccgcctcccacacccagctgcccgccgacaaggaactggtactcaaggtgatacccatgcccgccgacaccaacggcaatggcgacatcttcggcggctgggtcatggcgcaggtggatctggccggctccgtgctgcccgcgcggtacatccgcggccgcatggccacggtggcggtgaacgaattcatcttcaagcagcccgtgcgcgtgggcgacctgctgtcgttctttgccgaagtcacgcgcatcggcaacacctccatgaccgtgcaggtggaggtctatgccgagcacatccgcacccagggcagctacgtgaaggtgaccgaggcgtcgctgacctatgtggccatcgacgaaaacggccgcccgcgccccattcggaagccgggcgacgaaagcgtcgcgccgtaa

SEQ ID NO: 6631 - protein, 143 aa, Acidovorax sp. JS42
MSQDRPASHTQLPADKELVLKVIPMPADTNGNGDIFGGWVMAQVDLAGSVLPARYIRGRMATVAVNEFIFKQPVRVGDLLSFFAEVTRIGNTSMTVQVEVYAEHIRTQGSYVKVTEASLTYVAIDENGRPRPIRKPGDESVAP

SEQ ID NO: 6632 - DNA, 501 bp, Acidovorax sp. JS42
  CDS (1)..(501): transl_table=11
atgcaccttcccgcgcaccaactcagcatgaccgtgctcatgtcgcccgacatggccaacttctccggcaacgtccacggcggcgccatcctcaagctgctggaccaggtggcctatgcctgcgccagccgctattcgggcagctacgtggtcacgctgagcgtagaccaggtgatgttcctgcagcccatccacgtgggcgaactggtgaccttcctggccagcgtcaaccacacgggcacatcgtccatggagatcggcatcaaggtggtggccgagaacatccgcacccaggtggtgcggcatgtgaacagctgtttcttctcgatggtggcggtggacgatgcgggcaaacccacccccgtgccgccgctggctcccaccagctacgacgagcgccgccgctgggaggccgcgctgctgcgcaaggccctgcgcaaggaacaggccgagcgcttcgcgcagatccgccaggcggcgcaggccagcgccgccggctga

SEQ ID NO: 6633 - protein, 166 aa, Acidovorax sp. JS42
MHLPAHQLSMTVLMSPDMANFSGNVHGGAILKLLDQVAYACASRYSGSYVVTLSVDQVMFLQPIHVGELVTFLASVNHTGTSSMEIGIKVVAENIRTQVVRHVNSCFFSMVAVDDAGKPTPVPPLAPTSYDERRRWEAALLRKALRKEQAERFAQIRQAAQASAAG

SEQ ID NO: 6634 - DNA, 420 bp, Magnetospirillum magnetotacticum MS-1
  CDS (1)..(420): transl_table=11
atgagcgagagccccaggccggaaagcattgagatcagcggggcgccgcgcggccgcctgtccacccgggccattgccatgcccgccgacaccaatccgttcggccatgtgttcggcggctggctgatgagccagatggatctggcgggcggcacccattcctatcgccgggcgcgcggccacacgcccaccgtggcggtggagggcatggaattccatcagccggtttatgtgggcgacgaggtcagctgctacaccgaggtcatccgggtgggacggacctccatctccatccgggtggaggcctgggtgcgccgccatggcggcagcgacgccctggtccgggtgaccagcgccgtcttcacctatgtggcggtggacgatcagggaaagaagcggccggtcccgcccgaggagtga

SEQ ID NO: 6635 - protein, 139 aa, Magnetospirillum magnetotacticum MS-1
MSESPRPESIEISGAPRGRLSTRAIAMPADTNPFGHVFGGWLMSQMDLAGGTHSYRRARGHTPTVAVEGMEFHQPVYVGDEVSCYTEVIRVGRTSISIRVEAWVRRHGGSDALVRVTSAVFTYVAVDDQGKKRPVPPEE

SEQ ID NO: 6636 - DNA, 375 bp, Erythrobacter sp. NAP1
  CDS (1)..(375): transl_table=11
atggctgaccgcgaactcatgatccgcgccaccgcaatgccgaccgatctcaatccgtacggcggggtgttcggcggctggctgatggcgcagatggccttgggcgcgggcgcgctggcgagccgcgtggggaagggcaaggcggtggtggtccacgcaaccgacttcacctttccgggcgcaatggtggtgggcgatgaactcagcgtctattgcgagattacagcgagcgggaccacgtcactgaccatcaaggctgaaggggtcgggcgcgaacgcgatggggaggcgaccaccaaagtgagcgccgggacattcaaatttgtgctgctcgacgagaacgaccgcccgcgcaaagtggatcgcaccaaatga

SEQ ID NO: 6637 - protein, 124 aa, Erythrobacter sp. NAP1
MADRELMIRATAMPTDLNPYGGVFGGWLMAQMALGAGALASRVGKGKAVVVHATDFTFPGAMVVGDELSVYCEITASGTTSLTIKAEGVGRERDGEATTKVSAGTFKFVLLDENDRPRKVDRTK

SEQ ID NO: 6638 - DNA, 402 bp, Oceanospirillum sp. MED92
  CDS (1)..(402): transl_table=11
atgaaccacgaaattgacaacaatcttcagcctgaaggcgaattaagccttcttcttccagccggcagtgacgcgactaatatgtttggtgatgtttttggtggttgggtatcagccaagatggtccaggcatcggagatatatgcagctaaactttccaagggacgtgtttcgactgtctctataggacagatggcatttatgtctcctgttcgagaaggtaccgtgatgtccttctataccaaactgattgaaagtggacgtagctcgttaagagtgagtgttgaagcctggggctgctgcccggatggctctgaactgcgaaaggtcaccgagacagagtgtgttcaagtggctattgatggtcacggccatatccgtgatatcgccgcttttgattaa

SEQ ID NO: 6639 - protein, 133 aa, Oceanospirillum sp. MED92
MNHEIDNNLQPEGELSLLLPAGSDATNMFGDVFGGWVSAKMVQASEIYAAKLSKGRVSTVSIGQMAFMSPVREGTVMSFYTKLIESGRSSLRVSVEAWGCCPDGSELRKVTETECVQVAIDGHGHIRDIAAFD

SEQ ID NO: 6640 - DNA, 399 bp, Oceanobacter sp. RED65
  CDS (1)..(399): transl_table=11
atgactgattttacagaagatacacccttgccaaacgggcgcttaaccttgcgactagtgcccacgcctgccgataccaatgccagtggcgacgtaagcggtggctgggttctaaataaaatggatatggccgcggaagataccgcacgtatgatcgcgaaaggtcgtgtcaccatggtagcgacagaaagtacaacttttttatcaccagttaaagcaggccatgccatttgctgttacaccaaagtcactgaaattggtcgcagctccattcgaattcaagtagaagtgtggagtcaaaatacgttttatgacgagctgacaaaagtcagtgaatccacgtttgtttatgtcgccatggacgagaatgggcgcattcgccctgtaccggatgcctaa

SEQ ID NO: 6641 - protein, 132 aa, Oceanobacter sp. RED65
MTDFTEDTPLPNGRLTLRLVPTPADTNASGDVSGGWVLNKMDMAAEDTARMIAKGRVTMVATESTTFLSPVKAGHAICCYTKVTEIGRSSIRIQVEVWSQNTFYDELTKVSESTFVYVAMDENGRIRPVPDA

SEQ ID NO: 6642 - DNA, 405 bp, marine gamma proteobacterium HTCC2143
  CDS (1)..(405): transl_table=11
atgagtgacgacgatttaaacgacgacataccaaccccagcaggcgaacttgccctaagaactattgcgatgcccgccgacaccaatgccagtaatgatatatttggcggctggttggtttcacaaatggatttggccgccgccgccaccgctacgaaaattgcacgaggaagagtcgtcactgtcgcgatcgatagtatggtttttctaacacccgttcacgttggcgctgtagtgacttgttatgccaacgtcctcgaagttggccgtagttccattaaaattaatgtggaagtatggactaaacaccaaacaacttatgagccaacaaaagtcactgaaggtgattttgtgttcgttgcagttgatgatgccggtaaaacgcgggcggttccagctagctag

SEQ ID NO: 6643 - protein, 134 aa, marine gamma proteobacterium HTCC2143
MSDDDLNDDIPTPAGELALRTIAMPADTNASNDIFGGWLVSQMDLAAAATATKIARGRVVTVAIDSMVFLTPVHVGAVVTCYANVLEVGRSSIKINVEVWTKHQTTYEPTKVTEGDFVFVAVDDAGKTRAVPAS

SEQ ID NO: 6644 - DNA, 405 bp, marine gamma proteobacterium HTCC2080
  CDS (1)..(405): transl_table=11
atgactgaccttgatatgaaccccaccccccagggcgagctaagccttcaggccgtagccatgcctgcggacactaaccctcatggggatatatttggcggctggctaatgtcacaaatggacttggcgggctacgtcacagcttgtgacgtagcgggcggcagagtcgccactgttgctgtagaaggtatggtgtttctgacgcccgttcatgtcggtgcggtagtgagctgctactcagacattttagaaattgggcgtagctcggtgcgggtaatcgtagaggtctggattaactcccgccaagacggagaacccattaaagtcaccgaggggacttttatttatgtcgccattggtggcgataagcgaactcgagccattcaacgcccaggttcagcctga

SEQ ID NO: 6645 - protein, 134 aa, marine gamma proteobacterium HTCC2080
MTDLDMNPTPQGELSLQAVAMPADTNPHGDIFGGWLMSQMDLAGYVTACDVAGGRVATVAVEGMVFLTPVHVGAVVSCYSDILEIGRSSVRVIVEVWINSRQDGEPIKVTEGTFIYVAIGGDKRTRAIQRPGSA

SEQ ID NO: 6646 - DNA, 486 bp, Pseudomonas putida GB-1
  CDS (1)..(486): transl_table=11
atggaacctggaaacgcccagctgagcatgaccgtcctgatgaccccggacatggccaacttttctggcaacgtacatggcggcaccctgctcaagtacctcgacgaagtggcctacgcctgcgccagccgctatgccggtagctatgtggtgaccctgtcggtcgaccaggtgatcttccgcgaacccgtacacgtaggtgaactggtgaccttcctcgcgtcggtcaactacaccggcaacacctcgatggaggtcggcatcaaagtggtgaccgagaacatccgcgagcgctcggtgcgccactccaacagttgcttcttcaccatggttgcagtcgacgacaatcgccgcccggtgccggtgccaccgcgccagccgcatagcagcgaggaaaagcgccgcttcctgcaaggccatcagcggcgccagatccgccaggagctggagaagcgctaccaggacctgaaaaccgacgcgatctaa

SEQ ID NO: 6647 - protein, 161 aa, Pseudomonas putida GB-1
MEPGNAQLSMTVLMTPDMANFSGNVHGGTLLKYLDEVAYACASRYAGSYVVTLSVDQVIFREPVHVGELVTFLASVNYTGNTSMEVGIKVVTENIRERSVRHSNSCFFTMVAVDDNRRPVPVPPRQPHSSEEKRRFLQGHQRRQIRQELEKRYQDLKTDAI

SEQ ID NO: 6648 - DNA, 564 bp, Pseudomonas putida GB-1
  CDS (1)..(564): transl_table=11
gtgggatgttgtgcgaaaactccggtctttatgtcaggcggtttcgcagagtttccctacggccgcccagtgaaacgaaatcggcgtagtatgtttcaagctgaatcgtttacccggcctttgcgccacaccaacgaaagcgtcacgggtcagaggccccatcgcatgattgagctcgaacaagaagatccgatcccgcaaggcgacctggccttgcagatcaccgcactgccgcgcgagaccaacgggtttggcgacatcttcggcggctggctggttgcccaaatggatttggccggcaccgccatggccagccgtgttgctggcggccgcgtggccaccgtggccatcgaccgcatggccttcctggtaccggtggcagtaggcgcgcagctgtcgttctacacccagaccctggaaatcggccgcagctcgatccagatgatggtcgaagtgtggagcgacgacccgctgtccagcgaatggcgcaaggtcaccgaagcggcattcgtcttcgtcgccatcgacggcagtggccgcacccgctccgtgcctcgtcgctga

SEQ ID NO: 6649 - protein, 187 aa, Pseudomonas putida GB-1
MGCCAKTPVFMSGGFAEFPYGRPVKRNRRSMFQAESFTRPLRHTNESVTGQRPHRMIELEQEDPIPQGDLALQITALPRETNGFGDIFGGWLVAQMDLAGTAMASRVAGGRVATVAIDRMAFLVPVAVGAQLSFYTQTLEIGRSSIQMMVEVWSDDPLSSEWRKVTEAAFVFVAIDGSGRTRSVPRR

SEQ ID NO: 6650 - DNA, 402 bp, Marinobacter sp. ELB17
  CDS (1)..(402): transl_table=11
atgagcacttttgacgacgacaacccaatgcccctcggcgagttaatcctgcgaatcattccattccccggcgataccaacgccaacggcgatgtgttcgcgggctggctggtgaagcaaatggatattgctgcggccactttggcagccaggatatcccaaggccgcagcgccactgtggctatggaccggatggagtttttgtcgccggtgcgggttggctcgcaggttggctgctattgcgagctgatcgaaattggccgtagctcaatgaatattaaagtagaagtgtggactatggaccgctactccgaagatcgccgcaaggtgaccgaaggccgcttcgtttacgtggcgattgatgaagtgggccgtatccgcgaagtgccagaccagtcctga

SEQ ID NO: 6651 - protein, 133 aa, Marinobacter sp. ELB17
MSTFDDDNPMPLGELILRIIPFPGDTNANGDVFAGWLVKQMDIAAATLAARISQGRSATVAMDRMEFLSPVRVGSQVGCYCELIEIGRSSMNIKVEVWTMDRYSEDRRKVTEGRFVYVAIDEVGRIREVPDQS

SEQ ID NO: 6652 - DNA, 411 bp, Moritella sp. PE36
  CDS (1)..(411): transl_table=11
atgattatgactataccaaaaggccaactattaacacgtacgttatcaatgccgagtgattgcaatgcaaatggcgatatcttcggtggttggataatgtcacaaatggatatcgcaggtggtattttagcaaaagaggtagcacaaggacgagtagctactatttccgttgatggtatgacatttcataaaccggttgctgttggtgatgtggtttgttgttatggttcgtgtactcgcattggtaattcttcaatgacgattaaattagagatctgggttaagccgttaatcaacgcgcctaaagtgaactaccgttatatcgttactgaagcaacatttacttatgttgctatcgatgataatggtcagtcgcgtaaaattgaacgtatgtgcgaactgccatcgtaa

SEQ ID NO: 6653 - protein, 136 aa, Moritella sp. PE36
MIMTIPKGQLLTRTLSMPSDCNANGDIFGGWIMSQMDIAGGILAKEVAQGRVATISVDGMTFHKPVAVGDVVCCYGSCTRIGNSSMTIKLEIWVKPLINAPKVNYRYIVTEATFTYVAIDDNGQSRKIERMCELPS

SEQ ID NO: 6654 - DNA, 414 bp, Magnetospirillum gryphiswaldense
  CDS (1)..(414): transl_table=11
atgttgggacaagatatgagcgaaagcatcgaaaccacgaccgcgccaaggggccggttgtccatccgcaccgtcgccatgcccgccgacaccaacccgcacggggccattttcggcggctggctgctggcccagatggatctggccggcggcacccacgcgctgcaccgggccaaaggcatggtggtgacggtggcggtggacagcatgaccttccatgaaccggtgttcgtcggcgacgaggtcagctgctataccgacgtggtccgggtcggcaattcgtccatttccgtccgcgtcgaggcctgggtccggcgcgacaacaaagacgaacagatcaaggtgaccagtgccctgttccacttcgtcgccgtcaaccccgaccggtcgaagcggcgggtaccgccggaatga

SEQ ID NO: 6655 - protein, 137 aa, Magnetospirillum gryphiswaldense
MLGQDMSESIETTTAPRGRLSIRTVAMPADTNPHGAIFGGWLLAQMDLAGGTHALHRAKGMVVTVAVDSMTFHEPVFVGDEVSCYTDVVRVGNSSISVRVEAWVRRDNKDEQIKVTSALFHFVAVNPDRSKRRVPPE

SEQ ID NO: 6656 - DNA, 408 bp, Collimonas fungivorans
  CDS (1)..(408): transl_table=11
atgactgatcaaaacaacaatcaattgccacccgacaccatgccgcagctgcgggtgatgccgatgccgtccgacgccaacgtgcacggcgacgtcttcggcggctggatcatggcacaagtcgacattgccggctcgctgccggccacccgtcgcgccaacggccgtgtcgccacgatcgcggtgaactcctttttgttcaagcagccggtgtttgtcggcgacctgctgtcgttttatgccgagatcgtcaaggtcggcaatacttcgatcaccgtcaacgtcgaggtgtatgccgaacgcaaccggctgcagacggaagtcgtgaaagtgaccgaagcgacgctgacttatgtcgccaccgacgcccagcgcaagccgcgtcagctgccgccgctggcgtcctga

SEQ ID NO: 6657 - protein, 135 aa, Collimonas fungivorans
MTDQNNNQLPPDTMPQLRVMPMPSDANVHGDVFGGWIMAQVDIAGSLPATRRANGRVATIAVNSFLFKQPVFVGDLLSFYAEIVKVGNTSITVNVEVYAERNRLQTEVVKVTEATLTYVATDAQRKPRQLPPLAS

SEQ ID NO: 6658 - DNA, 411 bp, Defluvibacter lusatiensis
  CDS (1)..(411): transl_table=11
atgtctgaccgcggcctgccgccttcgaagaacccggcgatccgaacggtcgccatgccggcggatacaaatcccgccggcgatatctttggcggatggctgatgtctcagatggatctcgccgcgggctgtcttgccgcaagcaccgcacgagggcgaagcgccacaatcgcggtcgaggcaatgcggtttctccgccccgtaagggtgggcgacgaggtttcactcttcgccgatctggtctccgtcggccgcagttcgatgcggatccatgtcgaagcctggcgccggagccgcgacagcattgagagcgagaaagtcacccaggcgaatttcacattcgtggcgctcgatccgcaaggacggccgcgatccgtggacgtcgcggcctcacgaagctcagaaaactga

SEQ ID NO: 6659 - protein, 136 aa, Defluvibacter lusatiensis
MSDRGLPPSKNPAIRTVAMPADTNPAGDIFGGWLMSQMDLAAGCLAASTARGRSATIAVEAMRFLRPVRVGDEVSLFADLVSVGRSSMRIHVEAWRRSRDSIESEKVTQANFTFVALDPQGRPRSVDVAASRSSEN

SEQ ID NO: 6660 - DNA, 408 bp, Buchnera aphidicola subsp
  CDS (1)..(408): transl_table=11
atgaacataaaaaatcaaaaaccaaagggtaaaatggtattaagaactttagcaatgccagcagatacaaacgcaaacggagatatattcgggggttggataatgtctcaaatggatattggaggagctatattagctaaagaaatagccagggggcgagtagtgacagtgagtgtgaatggtatgacatttttaaagtcagtatcagtaggtgatgtagttagctgttatgcgcactgcattcgaacaggaaacacatctattactataaaaatagaagtatggattaaaaaagtatcatcagaaccgttaggaaaattttattgtactacagaagcaatatttgtttatgtagccgtagatgaatttggacaacccaaaacattgctaccattcagtattatttaa

SEQ ID NO: 6661 - protein, 135 aa, Buchnera aphidicola subsp
MNIKNQKPKGKMVLRTLAMPADTNANGDIFGGWIMSQMDIGGAILAKEIARGRVVTVSVNGMTFLKSVSVGDVVSCYAHCIRTGNTSITIKIEVWIKKVSSEPLGKFYCTTEAIFVYVAVDEFGQPKTLLPFSII

SEQ ID NO: 6662 - DNA, 450 bp, Zymomonas mobilis
  CDS (1)..(450): transl_table=11
atgagtaatcaggtcacaaaatcggataattcagaacccttagcacctgccggagaacccgccattcgcgttattgctatgccagcaaatacgaatgccgatggtcggatgtttggtggttggctcatgggtatgttggatcaagccgccggtttggttgctgctcgccatgctttggctcgggttgtaaccgtcgctgccgattctatcacttttcatgcgccggttcaggtcggcgatgaattgtcgctttatgctcgattggtgaaagttggccggacttcaatgaaaattgaagtcgaaggttggcggcgtgtccggcatgagctggaaaccataaaagctatttctggcttgtttacttttgttgccattgatgaagatcgtcgcccttgtcaggtgccgccgatgaatgaaacgcggttgttatccgataaagctgataaatag

SEQ ID NO: 6663 - protein, 149 aa, Zymomonas mobilis
MSNQVTKSDNSEPLAPAGEPAIRVIAMPANTNADGRMFGGWLMGMLDQAAGLVAARHALARVVTVAADSITFHAPVQVGDELSLYARLVKVGRTSMKIEVEGWRRVRHELETIKAISGLFTFVAIDEDRRPCQVPPMNETRLLSDKADK

SEQ ID NO: 6664 - DNA, 465 bp, Haemophilus influenzae
  CDS (1)..(465): transl_table=11
atgtctgccaattttactgataaaaatggtcgccaatcaaaaggagttcttttactacgaactttggcgatgccttctgacaccaatgctaacggagatatttttggtggctggattatgtctcaaatggatatgggcggcgcgattttagcgaaagaaatcgcacacggacgcgtggttactgtcgccgttgaaagtatgaattttatcaaaccaatctctgtgggcgatgtggtttgttgctacggtcaatgtctcaaagttgggcgttcttccattaaaattaaagtagaagtatgggtaaaaaaagtggcgagtgagccaattggcgaacgttattgtgtcaccgatgcggtatttacttttgttgcagttgataataatggtcgctctcgcacgattccccgtgaaaataaccaagagttagaaaaagcattagccttaatttcagaacaacccttgtaa

SEQ ID NO: 6665 - protein, 154 aa, Haemophilus influenzae
MSANFTDKNGRQSKGVLLLRTLAMPSDTNANGDIFGGWIMSQMDMGGAILAKEIAHGRVVTVAVESMNFIKPISVGDVVCCYGQCLKVGRSSIKIKVEVWVKKVASEPIGERYCVTDAVFTFVAVDNNGRSRTIPRENNQELEKALALISEQPL

SEQ ID NO: 6666 - DNA, 399 bp, Escherichia coli O6
  CDS (1)..(399): transl_table=11
atgtctacaacacataacgtccctcagggcgatcttgttttacgtactttagccatgcccgccgataccaatgccaatggtgacatctttggtggttggttaatgtcacaaatggatattggcggcgctattctggcgaaagaaattgcccatggtcgtgtagtgaccgtgcgggttgaaggaatgactttcttacggccggttgcggtcggcgatgtggtgtgctgctatgcacgctgtgtccagaaagggacgacatcagtcagcattaatattgaagtgtgggtgaaaaaagtggcgtctgaaccaatcgggcaacgctataaagcaacagaagcattatttaagtatgtcgcggttgatcccgaaggaaaacctcgcgccttacccgttgagtaa

SEQ ID NO: 6667 - protein, 132 aa, Escherichia coli O6
MSTTHNVPQGDLVLRTLAMPADTNANGDIFGGWLMSQMDIGGAILAKEIAHGRVVTVRVEGMTFLRPVAVGDVVCCYARCVQKGTTSVSINIEVWVKKVASEPIGQRYKATEALFKYVAVDPEGKPRALPVE

SEQ ID NO: 6668 - DNA, 402 bp, Salmonella typhi
  CDS (1)..(402): transl_table=11
atgacaacaatggataatactcctcagggcgagctggttttacgtacattggccatgcctgccgataccaatgcgaacggcgatatttttggcggctggctgatgtcgcaaatggatattggcggcgcgatactggccaaagagatcgcgcacggtcgggttgtaaccgtacgcgtggaaggaatgacatttctgcgccccgtcgcggttggcgatgtcgtatgctgctacgcgcgctgcgttaaacgcggtacgacgtctattagcatcaatattgaagtctgggtgaaaaaagtcgcgtcagaaccgattggacagcgctacaaggccaccgaggcgctgtttatttatgttgccgtcgatccggacggtaaacctcgcccgctcccggttcagggttaa

SEQ ID NO: 6669 - protein, 133 aa, Salmonella typhi
MTTMDNTPQGELVLRTLAMPADTNANGDIFGGWLMSQMDIGGAILAKEIAHGRVVTVRVEGMTFLRPVAVGDVVCCYARCVKRGTTSISINIEVWVKKVASEPIGQRYKATEALFIYVAVDPDGKPRPLPVQG

SEQ ID NO: 6670 - DNA, 21 bp, Artificial sequence
  primer
atgactgaactcgaacaggac

SEQ ID NO: 6671 - DNA, 20 bp, Artificial sequence
  primer
ctagcggcgcggcaccgcgc

SEQ ID NO: 6672 - protein, 106 aa, Artificial sequence
  consensus sequence
  Variant (2)..(2): Xaa in position 2 is any amino acid
  Variant (4)..(4): Xaa in position 4 is any amino acid
  Variant (6)..(7): Xaa in position 6 to 7 is any amino acid
  Variant (9)..(10): Xaa in position 9 to 10 is any amino acid
  Variant (15)..(19): Xaa in position 15 to 19 is any amino acid
  Variant (21)..(26): Xaa in position 21 to 26 is any amino acid
  Variant (28)..(36): Xaa in position 28 to 36 is any amino acid
  Variant (37)..(37): Xaa in position 37 is any or no amino acid
  Variant (39)..(45): Xaa in position 39 to 45 is any amino acid
  Variant (47)..(48): Xaa in position 47 to 48 is any amino acid
  Variant (50)..(51): Xaa in position 50 to 51 is any amino acid
  Variant (54)..(65): Xaa in position 54 to 65 is any amino acid
  Variant (67)..(68): Xaa in position 67 to 68 is any amino acid
  Variant (70)..(88): Xaa in position 70 to 88 is any amino acid
  Variant (89)..(95): Xaa in position 89 to 95 is any or no amino acid
  Variant (97)..(102): Xaa in position 97 to 102 is any amino acid
  Variant (105)..(105): Xaa in position 105 is any amino acid
PXDXNXXGXXFGGWXXXXXDXXXXXXAXXXXXXXXXXTXXXXXXXFXXPXXVGXXXXXXXXXXXXGXXSXXXXXXXXXXXXXXXXXXXXXXXXXXTXXXXXXVAXD

SEQ ID NO: 6673 - protein, 33 aa, Artificial sequence
  protein pattern
  Variant (2)..(4): Xaa in position 2 to 4 is any amino acid
  Variant (5)..(6): Xaa in position 5 to 6 is any or no amino acid
  Variant (8)..(9): Xaa in position 8 to 9 is any or no amino acid
  Variant (11)..(11): Xaa in position 11 is any amino acid
  Variant (12)..(12): Xaa in position 12 is Ile, Leu, Met or Val
  Variant (13)..(13): Xaa in position 13 is any amino acid
  Variant (16)..(16): Xaa in position 16 is any amino acid
  Variant (17)..(17): Xaa in position 17 is Ile, Leu or Val
  Variant (18)..(18): Xaa in position 18 is Leu, Met or Val
  Variant (19)..(20): Xaa in position 19 to 20 is any amino acid
  Variant (21)..(21): Xaa in position 21 is Ile, Leu, Met or Val
  Variant (23)..(24): Xaa in position 23 to 24 is any amino acid
  Variant (25)..(25): Xaa in position 25 is Ala, Cys, Gly or Ser
  Variant (26)..(28): Xaa in position 26 to 28 is any amino acid
  Variant (30)..(32): Xaa in position 30 to 32 is any amino acid
  Variant (33)..(33): Xaa in position 33 is Ala, Cys, Gly or Ser
PXXXXXNXXGXXXGGXXXXXXDXXXXXXAXXXX

SEQ ID NO: 6674 - DNA, 438 bp, Azotobacter vinelandii
  CDS (1)..(438): transl_table=11
atgactgagctgcgcatcggtcccgatcgggaagtcaccctgcatttcgccatcaagctcgactcgggcgatgtggtcgacagtaccttcgacaggcgtccggccaccttccgggttggcgatggcaatctgttgcccgggttcgagctgtctctctatggcctcaaggccggcgacaagcgtgccctgccgattgcgccggagcagggcttcggccggcccaatccgcagaacgtacaggtcatgccgcgcggccaattcgaaggcatggagctctccgaaggcctgatggtgatcttcaacgatgccgccagcggcgagatgccgggtgtcgtcaagtccttcgacgatcagcaggtcaccgtcgatttcaatcacccgctggccggccgcgacttgaccttcgaagtggaaatcctcgaggtcagggccgtctga

SEQ ID NO: 6675 - protein, 145 aa, Azotobacter vinelandii
MTELRIGPDREVTLHFAIKLDSGDVVDSTFDRRPATFRVGDGNLLPGFELSLYGLKAGDKRALPIAPEQGFGRPNPQNVQVMPRGQFEGMELSEGLMVIFNDAASGEMPGVVKSFDDQQVTVDFNHPLAGRDLTFEVEILEVRAV

SEQ ID NO: 6676 - DNA, 450 bp, Klebsiella pneumoniae subsp. pneumoniae MGH 78578
  CDS (1)..(450): transl_table=11
atgtctaaatccgtacagagcaacagcgcggtactggtgcacttcactctgaaactggacgacggctccactgccgagtccacccgcagcaacggcaaaccggcgctgtttcgcctcggcgacacctctttgtctgaagggctggagcaacagcttctcggtttgaaagagggggagaaaaaggccttttcgctggagcctgacgccgcctttggcgtacccagcccggacctgattcagtatttctctcgccgcgagtttatcgacgctggcgagccggagatcggcgcgattatgctctttaccgcaatggatggcagcgaaatgcctggcgtgatccgcgaagtgaacggcgattccatcaccgttgacttcaaccatccgctggccgggcgcactgttcattttgatattgaagtgctggagatcgatccggcgctggaggagtaa

SEQ ID NO: 6677 - protein, 149 aa, Klebsiella pneumoniae subsp. pneumoniae MGH 78578
MSKSVQSNSAVLVHFTLKLDDGSTAESTRSNGKPALFRLGDTSLSEGLEQQLLGLKEGEKKAFSLEPDAAFGVPSPDLIQYFSRREFIDAGEPEIGAIMLFTAMDGSEMPGVIREVNGDSITVDFNHPLAGRTVHFDIEVLEIDPALEE

SEQ ID NO: 6678 - DNA, 435 bp, Vibrio cholerae O1 biovar eltor str. N16961
  CDS (1)..(435): transl_table=11
gtgaaccctattgcctctaactctgcagttaccctgcattttacgatcaagcttaaggacggctctgttgccgacagtacccataatcaaggaaaaccggccaagctagtgatgggcgatggtagcctgagccccaatttcgagcagtgtttactcggaatgttgccgggcgagaaaaaatcggtcgctttagcggcgcaagatgcgtttggcgcgcccaatccagatcatgtccattacatggatcgcagtaagtttcttggtggtgatctgcagttagaggtcggaaccattatggctttcagtggccctgacggaatggaaattcccggaatcatcacggagatcgccggtgactcagtgactgtcgatttcaatcacccattggcagggcaagacatcacctttgatgttgagatcttgtctgttgagtga

SEQ ID NO: 6679 - protein, 144 aa, Vibrio cholerae O1 biovar eltor str. N16961
MNPIASNSAVTLHFTIKLKDGSVADSTHNQGKPAKLVMGDGSLSPNFEQCLLGMLPGEKKSVALAAQDAFGAPNPDHVHYMDRSKFLGGDLQLEVGTIMAFSGPDGMEIPGIITEIAGDSVTVDFNHPLAGQDITFDVEILSVE

SEQ ID NO: 6680 - DNA, 600 bp, Pasteurella multocida subsp. multocida str. Pm70
  CDS (1)..(600): transl_table=11
atgaaaattgcaaaaaatgttgtagtgagcattgcttatcaagtgcgcacagaagacggtgtattagttgatgaggcgccagtaaaccaacctttagaatatttacaaggtcataataatttagtgattggtttagaaaatgcactcgaaggtaaagcagtcggtgataaatttgaagttcgcgttaaaccagaagaagcatacggtgaatataacgaaaacatggtacaacgtgtaccaaaagacgttttccaaggcgtagatgagcttgttgtgggcatgcgttttattgcggacacagacattggtccattaccagtggtgattaccgaagtggcagaaaacgatgttgttgtggacggtaaccatatgttagcaggtcaagagttactatttagtgttgaagtcgtggcgacacgtgaagcaacattagaagaaatcgcccatggtcatatccatcaagaaggtggatgttgtggtggtcatcatcacgacagtgatgaagaaggacatggctgtggctgtggaagtcatcaccatcatgaacatgagcatcatgcacatgatggctgttgtggcaacggtggctgtaagcactaa

SEQ ID NO: 6681 - protein, 199 aa, Pasteurella multocida subsp. multocida str. Pm70
MKIAKNVVVSIAYQVRTEDGVLVDEAPVNQPLEYLQGHNNLVIGLENALEGKAVGDKFEVRVKPEEAYGEYNENMVQRVPKDVFQGVDELVVGMRFIADTDIGPLPVVITEVAENDVVVDGNHMLAGQELLFSVEVVATREATLEEIAHGHIHQEGGCCGGHHHDSDEEGHGCGCGSHHHHEHEHHAHDGCCGNGGCKH

SEQ ID NO: 6682 - DNA, 450 bp, Salmonella typhimurium LT2
  CDS (1)..(450): transl_table=11
atgtctaaatccgtacagagcaacagcgcgatcctcgttcacttcaccctgaaactggatgatggctcaacggcggaatctacccgcaataacggcaagccagccctgttccgtcttggcgatacctcgctttccgaaggtctggagcagcagcttctggggttgaaagaaggggaaaagaaagcgttttcgctggagcctgacgccgcgtttggcgtccccagtccggacttgatccagtatttctcgcgccgtgagtttatggcggcgggcgaaccggaagtcggggcgattatgctttttaccgcaatggatggcagcgaaatgcctggcgtgattcgcgaaatcaacggcgactcgattaccgttgattttaaccatccgctggccgggcataccgttcactttgatattgaagtgctggaaatcgatccggcgctggaggcataa

SEQ ID NO: 6683 - protein, 149 aa, Salmonella typhimurium LT2
MSKSVQSNSAILVHFTLKLDDGSTAESTRNNGKPALFRLGDTSLSEGLEQQLLGLKEGEKKAFSLEPDAAFGVPSPDLIQYFSRREFMAAGEPEVGAIMLFTAMDGSEMPGVIREINGDSITVDFNHPLAGHTVHFDIEVLEIDPALEA

SEQ ID NO: 6684 - DNA, 591 bp, Salmonella typhimurium LT2
  CDS (1)..(591): transl_table=11
atgaaagtagcaaaagacctggtggtcagcctggcctatcaggtacgtacagaagacggtgtgttggttgatgagtctccggtgagtgcgccgctggattacctgcacggtcacggctccctgatctctggtctggaaaccgcgctggaaggccatgaagttggcgacaaatttgatgtcgctgttggcgcgaacgacgcttacggccagtatgacgaaaatctggtgcagcgtgtgcctaaagacgtctttatgggcgttgatgaactgcaggtagggatgcgtttcctggcggaaaccgaccagggcccggtaccggtagagattaccgaagtggaagacgatcacgttgtggttgatggtaaccacatgctggcgggccagaatctgaaatttaacgtagaagttgttgcgattcgtgaagcgactgaagaagaactggctcacggtcatgttcatggcgcgcacgatcaccaccacgatcacggtgaagacggctgctgtggcggtcatggtcatgaccatggtcacgagcacggcggcgaaggctgctgcggcggtggtggtaaaggcggctgcggctgccattaa

SEQ ID NO: 6685 - protein, 196 aa, Salmonella typhimurium LT2
MKVAKDLVVSLAYQVRTEDGVLVDESPVSAPLDYLHGHGSLISGLETALEGHEVGDKFDVAVGANDAYGQYDENLVQRVPKDVFMGVDELQVGMRFLAETDQGPVPVEITEVEDDHVVVDGNHMLAGQNLKFNVEVVAIREATEEELAHGHVHGAHDHHHDHGEDGCCGGHGHDHGHEHGGEGCCGGGGKGGCGCH

SEQ ID NO: 6686 - DNA, 474 bp, Xanthomonas campestris pv. campestris str. ATCC 33913
  CDS (1)..(474): transl_table=11
atggaaatcacccagggtcgcgttgcgaccattcactacaccctctccgacgacagcggccaggtgctcgatcgctccacgcccgacaccccgctgagctatctgcacggcgccggcaacatcgtgccgggcctggaacaggcactggacggcaagcgcaccggcgacacactcaccgccgatgtcgcgccggaacagggctacggcccgcgccatgcgcaattgatccagcacgtgccgcgcgaagctttccccagcgacgtggacgtggttccgggcgcgcagttcgaagcgcgcacccagcaggggccggtgatggtcactgtcaccgaggtcggccccgagcaggtcaccgtggacggcaatcacccgctggccgggcaaaccctgcatttcgccgtcgaagtgaccgcggtgcgcgaggccaccaccgaagaactcgaccagggccacgtcaccgacatcgccgcctga

SEQ ID NO: 6687 - protein, 157 aa, Xanthomonas campestris pv. campestris str. ATCC 33913
MEITQGRVATIHYTLSDDSGQVLDRSTPDTPLSYLHGAGNIVPGLEQALDGKRTGDTLTADVAPEQGYGPRHAQLIQHVPREAFPSDVDVVPGAQFEARTQQGPVMVTVTEVGPEQVTVDGNHPLAGQTLHFAVEVTAVREATTEELDQGHVTDIAA

SEQ ID NO: 6688 - DNA, 438 bp, Pseudomonas putida KT2440
  CDS (1)..(438): transl_table=11
atgactgacacccgtatcggccagaacaccgaagtcaccctgcacttcgcgctgcacctggaaaacggcgacaccgtcgacagcacgttcgataaggccccggctactttcaaagtgggtgatggcaacctgctgccgggctttgaaaacgccctgttcggcttcaaggccggtgacaagcgcaccgtggcagtggccccggagaacgcgttcggccagcctaacccgcagaacgtgcaggtcatgccgaggtccaacttcgaaggcatggagttgtccgaagggctgctgatcatcttcaacgacgccgccaacaccgagctgccgggtgtggtcaaagcgttcgatgacgaccaggtcaccatcgacttcaatcacccactggctggcaagaccctgaccttcgaggtggagatcctcgaggtgaaggccctgtaa

SEQ ID NO: 6689 - protein, 145 aa, Pseudomonas putida KT2440
MTDTRIGQNTEVTLHFALHLENGDTVDSTFDKAPATFKVGDGNLLPGFENALFGFKAGDKRTVAVAPENAFGQPNPQNVQVMPRSNFEGMELSEGLLIIFNDAANTELPGVVKAFDDDQVTIDFNHPLAGKTLTFEVEILEVKAL

SEQ ID NO: 6690 - DNA, 486 bp, Pseudomonas putida KT2440
  CDS (1)..(486): transl_table=11
atgctgatcgccgccaacaaggctgtctccatcgactataccctgaccaacgacgccggggagaccatcgacagctccgccggtggcgcgccgctggtttacctgcacggtgccggcaatatcatcccgggcctggaaaaagccctggaaggcaagcaggctggtgacgagctgaatgtttccattgaacctgaagaggcctacggcgagtacctggccgaactggtcagcaccctgaaccgtagcctgttcgaaggtgtcgacgagctggaagtgggcatgcagttccacgcttcggcgccggacggccagatgcagatcgtcaccatccgcgacatcgacggcgacgacgtcaccgttgatggcaaccacccactggccggtcagcgcctgaccttccaggtcaaggttgtgaacgtgcgtgacgccagcgacgaagaaatcgctcaccgtcacatccacggtgaaggtggccatcaccactga

SEQ ID NO: 6691 - protein, 161 aa, Pseudomonas putida KT2440
MLIAANKAVSIDYTLTNDAGETIDSSAGGAPLVYLHGAGNIIPGLEKALEGKQAGDELNVSIEPEEAYGEYLAELVSTLNRSLFEGVDELEVGMQFHASAPDGQMQIVTIRDIDGDDVTVDGNHPLAGQRLTFQVKVVNVRDASDEEIAHRHIHGEGGHHH

SEQ ID NO: 6692 - DNA, 477 bp, Pseudomonas syringae pv. tomato str. DC3000
  CDS (1)..(477): transl_table=11
atgactgaacagtcgtcgactcagggctcgtctgacgagctgcgtatcggtcagaacacgcaggtcaccttgcacttcgccctgcgcctggaaaacggtgacaccgtcgacagcacctttgaaaaggccccggccacgttcaaggtcggcgacggtaacctgttgcccggttttgaaatggcgattttcggcttcaaagccggcgatcgaaagaccgtagagattctgccggaaaacgcctttggtcagcccaacccacaaaacgtacagatcatgccacgctcgcagttcgtgggcatggaactgtccgaagggttgctggtgatcttcaatgacgcggccaacaccgagttgcccggcgtggtgaaagcattcgatgacgagcaggtcaccatcgacttcaatcacccgctggcaggcaagacactgagctttgaagtggagatcttcgaagtgaaggcaatcctggcttcctga

SEQ ID NO: 6693 - protein, 158 aa, Pseudomonas syringae pv. tomato str. DC3000
MTEQSSTQGSSDELRIGQNTQVTLHFALRLENGDTVDSTFEKAPATFKVGDGNLLPGFEMAIFGFKAGDRKTVEILPENAFGQPNPQNVQIMPRSQFVGMELSEGLLVIFNDAANTELPGVVKAFDDEQVTIDFNHPLAGKTLSFEVEIFEVKAILAS

SEQ ID NO: 6694 - DNA, 480 bp, Nitrosomonas europaea ATCC 19718
  CDS (1)..(480): transl_table=11
atgcgcatagtaaaaaatacggtagtgtcactccactacaaaatgatcgatcaggaaggcaatgtaatggaagaaaccgaagagcccgtcagctatctgcatggcggctatgacgggatatttccagcagtagaagaagctttgcatgaaaaagagactggagcagccttatccttgcaaatggaaccggaagatgcttttggtgagtacgatgaagagctcatgcgggtcgagccacgcaatgcattcccggaagaagtcgcagtcggaatgcaattcgaaggcggtgaggaggattccgatgatttctgcatctatacggtgagagagattacggatgatgtcgtagtggtagacggtaatcatccttacgccggtatgacgttccagttcgagtgcacggtgacggaagtacgtccggcaacggcggaagagctatctcacggccatgtgcacggaccgcacggccatgagcattga

SEQ ID NO: 6695 - protein, 159 aa, Nitrosomonas europaea ATCC 19718
MRIVKNTVVSLHYKMIDQEGNVMEETEEPVSYLHGGYDGIFPAVEEALHEKETGAALSLQMEPEDAFGEYDEELMRVEPRNAFPEEVAVGMQFEGGEEDSDDFCIYTVREITDDVVVVDGNHPYAGMTFQFECTVTEVRPATAEELSHGHVHGPHGHEH

SEQ ID NO: 6696 - DNA, 477 bp, Bordetella bronchiseptica RB50
  CDS (1)..(477): transl_table=11
ttgagcgccgcctctgagaatgtgaatgttttggtccgtccggactcctacctcaccctgcattaccgcatcgtgctggcctcggggcctgccgagggctcggtgttcacggataccttcgatggtcgcccggcgacgctgcagatgggcagcggccagtgggcccccggcctcgaagccgccttgctcgaccatgcggagggcgagcgcttcagcgtggcgctggcgccggctcaggcctatggcgagcgcaatccggacctgatccagaaagtgacgcgcgccatgctggccgagcatgcgggcgccgatgccgccttcgagcccggcgacctggtcgagttcgccgcgcccaatggcgggcgctactcgggcgtgctgaaggaaatcaacgccgattgggcgatgttcgacttcaaccatccgctggccggcaccgccttgcgcgtggatgtcgccatcctgggagtgctgtga

SEQ ID NO: 6697 - protein, 158 aa, Bordetella bronchiseptica RB50
MSAASENVNVLVRPDSYLTLHYRIVLASGPAEGSVFTDTFDGRPATLQMGSGQWAPGLEAALLDHAEGERFSVALAPAQAYGERNPDLIQKVTRAMLAEHAGADAAFEPGDLVEFAAPNGGRYSGVLKEINADWAMFDFNHPLAGTALRVDVAILGVL

SEQ ID NO: 6698 - DNA, 477 bp, Chromobacterium violaceum ATCC 12472
  CDS (1)..(477): transl_table=11
atgaaaatcaccgccaacaccgccgtcaccctgagaatgaaagtcaccgacagccagggtctggtttacgacgatggcaagaacccggtttcttacctgcacggcgattacgacaatctcttccccaagctggaagccgcgcttgaaggccaggaagcagggtttcaaaccacgctggaactggctagcgaagacgccttcggcgaacgcgacgaagccctggtcaccaccatgcccaaggccgaattcccgcccggcgtcaaagtaggcggccagatcccgcgccccggcccggatggccagcggcgctactacttcgtcaccaagatcaaaggcccgacggtattgctggacggcaaccacccgctttgtggcaagaccctgcgcttcgccatcaaggtgttggacgtgcgggaggccaccgccgaggaaatcgcccaccagcatgtgcatggcgagcacgggcatcagcactga

SEQ ID NO: 6699 - protein, 158 aa, Chromobacterium violaceum ATCC 12472
MKITANTAVTLRMKVTDSQGLVYDDGKNPVSYLHGDYDNLFPKLEAALEGQEAGFQTTLELASEDAFGERDEALVTTMPKAEFPPGVKVGGQIPRPGPDGQRRYYFVTKIKGPTVLLDGNHPLCGKTLRFAIKVLDVREATAEEIAHQHVHGEHGHQH

SEQ ID NO: 6700 - DNA, 471 bp, Photorhabdus luminescens subsp. laumondii TTO1
  CDS (1)..(471): transl_table=11
atgtcaaaccaggtgcaggcggatagtgcagttttactgcacttcattttaaaactgcaagatggctctattgccgactccacttacactcagggcaaacctgcattatttcgtttaggtgatggaaccctttcttcacctttggaacagcagctcactgggctaaaagacggagataaacatacctttactctggcgggtgagaatgtatttggtaaaccaaatcctgatctgatccaatattttactccgcgtgattttgccgcaacgggtattcctgaaattggcactataatgttatttacggcaatgaatggcagtgaaatgccgggcatagtcaaagcggtaacagaggaatctgtgactgttgatttcaatcacccgttagctgatcagaacgtcacgtttgaaattgaagtggtggaaattgatccacaattggaggaaaaccatgcagatattgctggctaa

SEQ ID NO: 6701 - protein, 156 aa, Photorhabdus luminescens subsp. laumondii TTO1
MSNQVQADSAVLLHFILKLQDGSIADSTYTQGKPALFRLGDGTLSSPLEQQLTGLKDGDKHTFTLAGENVFGKPNPDLIQYFTPRDFAATGIPEIGTIMLFTAMNGSEMPGIVKAVTEESVTVDFNHPLADQNVTFEIEVVEIDPQLEENHADIAG

SEQ ID NO: 6702 - DNA, 432 bp, Vibrio vulnificus YJ016
  CDS (1)..(432): transl_table=11
gtgagtacaatcaataataattccgcagtcacactgcattttacgataaaaatgaaagacggttctgtcgcagacagcacgcacaatatgggcaaacccgcgaagtttgttatgggcgatggcagtttaagtgagaattttgagcagtgtttgcttggtctcacggtaggggaaaacaaagcgattgagctaaaagcggcggacgcttttggcatgcctaacccagaccatattcaccatatggaccgcacaaaatttgttggcgaagcgcaagtggaagtcggcactatcatggcgttcagcgggccggatggcatggagatccctggcatcattactgaaattgccggtgattcagtgacggtggatttcaatcatccacttgcaggccaagatgtgacttttgaagttgaaattttgtcagtagaatag

SEQ ID NO: 6703 - protein, 143 aa, Vibrio vulnificus YJ016
MSTINNNSAVTLHFTIKMKDGSVADSTHNMGKPAKFVMGDGSLSENFEQCLLGLTVGENKAIELKAADAFGMPNPDHIHHMDRTKFVGEAQVEVGTIMAFSGPDGMEIPGIITEIAGDSVTVDFNHPLAGQDVTFEVEILSVE

SEQ ID NO: 6704 - DNA, 450 bp, Thermus thermophilus HB27
  CDS (1)..(450): transl_table=11
atgaaggttggacaggacaaggttgtgaccatccgctacaccctccaggtggagggtgaggttctggaccagggggagctttcctacctccacggccaccgtaacctcatcccgggcctcgaggaggccctggagggccgggaggagggggaggctttccaggcccacgtccccgccgagaaggcctacggcccccacgaccccgagggggtccaggtggtgcccctctccgccttccccgaggacgccgaggtggttcccggggcccagttctacgcccaggacatggaggggaaccccatgcccctcaccgtggtggcggtggaaggggaggaggtgaccgtggacttcaaccaccccctggcgggcaaggacctggacttccaggtggaggtggtgaaggtccgcgaggccacccccgaggaactcctgcacggccacgcccactaa

SEQ ID NO: 6705 - protein, 149 aa, Thermus thermophilus HB27
MKVGQDKVVTIRYTLQVEGEVLDQGELSYLHGHRNLIPGLEEALEGREEGEAFQAHVPAEKAYGPHDPEGVQVVPLSAFPEDAEVVPGAQFYAQDMEGNPMPLTVVAVEGEEVTVDFNHPLAGKDLDFQVEVVKVREATPEELLHGHAH

SEQ ID NO: 6706 - DNA, 426 bp, Desulfovibrio vulgaris subsp. vulgaris str. Hildenborough
  CDS (1)..(426): transl_table=11
atggcaatacagaacggcgctacggttcgcgtgcactacaccgggacccttgatgacgggaccgagttcgattcgtcgcgcgaccgcgagccgctcgaattcactcttggcgaagggatgctcatccccggcttcgagaaggccgtgctcggcctcagcaagacaggcgatgccgtgaaggtcgtcatccccgccgaagacgcctacggcgagcgccttgaagaactggtcatctccgtgccgcgcgatcaggttccgccgcacatcgagcccgaagtgggcctgatgctccagctcatgaccgatggcggcgagatggaagtggctgtcaccgaagttaccgacgaagccgtgaccctcgacgccaaccaccccctcgcgggtgagacgctcaccttcgacatcgaactggtcgaagtgctgtag

SEQ ID NO: 6707 - protein, 141 aa, Desulfovibrio vulgaris subsp. vulgaris str. Hildenborough
MAIQNGATVRVHYTGTLDDGTEFDSSRDREPLEFTLGEGMLIPGFEKAVLGLSKTGDAVKVVIPAEDAYGERLEELVISVPRDQVPPHIEPEVGLMLQLMTDGGEMEVAVTEVTDEAVTLDANHPLAGETLTFDIELVEVL

SEQ ID NO: 6708 - DNA, 483 bp, Acinetobacter sp. ADP1
  CDS (1)..(483): transl_table=11
atgactgagattatccaacccaacgaagaaattcgtattcaggaaggtgcacatgtcgatttgcatttttcagtcgccattgaaaatggtgtcgaaattgacaacacccgtagccgtgaagcgccagtcagcctgaccattggcgatggcaatttacttcctggttttgaaaaagctctttttggcttacgtgcaggcgatcgtcgtactgtacatttaccaccagaagatgcctttggcccatggaatccagaaaatatccaaaaatttgatacagtcaaatttgagcagcgcccaattgtgggacatatgattgaatttgaagataaagccaaagccaccttgtttggtgtagtgaaatcagtcaacgacgatattaccgagattgattttaaccatccattggcgggaaaaaacattgcgtttgaagttgaaatctttaaggtcacccctgctgggcagcaaggcgtgaaattaatgtaa

SEQ ID NO: 6709 - protein, 160 aa, Acinetobacter sp. ADP1
MTEIIQPNEEIRIQEGAHVDLHFSVAIENGVEIDNTRSREAPVSLTIGDGNLLPGFEKALFGLRAGDRRTVHLPPEDAFGPWNPENIQKFDTVKFEQRPIVGHMIEFEDKAKATLFGVVKSVNDDITEIDFNHPLAGKNIAFEVEIFKVTPAGQQGVKLM

SEQ ID NO: 6710 - DNA, 483 bp, Acinetobacter sp. ADP1
  CDS (1)..(483): transl_table=11
atgactgctattgcaaataaccacgtggtttcattccactacaaattgacaaatgctgaaggtgaaactcttgaccagtctcaaggcgaaccacttgcatatttgcacggtgcaggcaacattattcctggtttggaaaatgcattaacaggtaaagctgttggtgacaaatttactgtcaacgttcctgctgctgaaggttatggcgaatacaacccagacctagtacaggaagttccagcacaaatgtttcagggtgttgaaaacatccagcctggcatgcaattccaagctcaaactgatgacggcgttcagatcgttactgtgaaagctgtagaaggtgacaacatcgttgttgacgctaacttcccacttgctggccaagatttaacgtttgaagttgaaatcgttgaaatccgtgatgcatctcaagaagagctagatcacggtcatgtacacggtgtaggtggtcatcaccactaa

SEQ ID NO: 6711 - protein, 160 aa, Acinetobacter sp. ADP1
MTAIANNHVVSFHYKLTNAEGETLDQSQGEPLAYLHGAGNIIPGLENALTGKAVGDKFTVNVPAAEGYGEYNPDLVQEVPAQMFQGVENIQPGMQFQAQTDDGVQIVTVKAVEGDNIVVDANFPLAGQDLTFEVEIVEIRDASQEELDHGHVHGVGGHHH

SEQ ID NO: 6712 - DNA, 474 bp, Erwinia carotovora subsp. atroseptica SCRI1043
  CDS (1)..(474): transl_table=11
atgtccgagactgtgcagcacaacagcgcgctgctggtgcattttattctgacgctggaggatggttctacggccgaatccacacgtgagcgcggcaagccagcgctgtttcgtcttggcgacggcagtctgtctgacgcgctggaacaaaatctgttggggttgatgcgtggcgataaacgcaagtttacgctgtcgccggagtcggcctttgggccgaccaacccgaacctgatccagttcttcttgcgtcgtgattttgcccagactggcgtgccggatgttggcaccatcatgctgttcagcggcgttgccggaaatgatatgccgggaattatccgtgatgtgactgaagagtcagttacggtggatttcaatcatcctttatccggtcaggcgattaccttcgatctcgacgtgctggatatcgatcccgtacaacaggaggtgtcccatgcagatcctgctggctaa

SEQ ID NO: 6713 - protein, 157 aa, Erwinia carotovora subsp. atroseptica SCRI1043
MSETVQHNSALLVHFILTLEDGSTAESTRERGKPALFRLGDGSLSDALEQNLLGLMRGDKRKFTLSPESAFGPTNPNLIQFFLRRDFAQTGVPDVGTIMLFSGVAGNDMPGIIRDVTEESVTVDFNHPLSGQAITFDLDVLDIDPVQQEVSHADPAG

SEQ ID NO: 6714 - DNA, 459 bp, Yersinia pseudotuberculosis IP 32953
  CDS (1)..(459): transl_table=11
gtgcaaaataatggcgctgttttagtgcatttcactctgaagcttgaagatggttcaacggccgagtcaacacgcactcacggtaaaccggcgctctttcgtttaggtgataacagcctttctgatgcactggaacagcaattgttggggctgaccgtgggcgataagcacgcttttacgttacgccctgaagatgcttttggtgtagaaaatccagaccttattcagtatttcactccacgtgattttgctgagactggtgtgccagatgccggcaccatcatgttattcagctctcgcgatggcagcgaaatgccgggtgtcgtgcgggaagtcgcagaagagtctattactgttgattttaatcacccgttggctgggcactctgtcagttttgaacttgaaatactggagattgacccccaacaggaggttgtctatgcagatattgctggctaa

SEQ ID NO: 6715 - protein, 152 aa, Yersinia pseudotuberculosis IP 32953
MQNNGAVLVHFTLKLEDGSTAESTRTHGKPALFRLGDNSLSDALEQQLLGLTVGDKHAFTLRPEDAFGVENPDLIQYFTPRDFAETGVPDAGTIMLFSSRDGSEMPGVVREVAEESITVDFNHPLAGHSVSFELEILEIDPQQEVVYADIAG

SEQ ID NO: 6716 - DNA, 678 bp, Mannheimia succiniciproducens MBEL55E
  CDS (1)..(678): transl_table=11
atgaaagttgctaagaatattgttgtaggcattgcttaccaggttcgcacggaagacggcgtattagtagatgaagcgccaaccaaccaacctttagaatatttacaaggtcacaacaatttagttatcggcttagaaaacgcattggaaggcaaagcggtcggcgataaatttgaagtacgcgtaaaaccggaagaaggttacggcgaatacaatgaaaatatggtacaacgcgtcccgaaagacgtatttgtaggggttgacgaattagcggtaggcatgcgttttatcgccgatacggacatgggtccgttgcctgtggttatcaccgaagtcagtgaaaatgatgtggttgttgacggcaaccatatgttagccggtcaggaattattattcaccgtagaagttgtttccgcccgtgaagcgacaccggaagaaatcgctcacggtcatatccattctggcgatcatgatcacggtcatggcggctgcggttgcggcggtcacggtcatgagcacgatcacgaccatagtcacggtggttgcggctgcggcggtcacggtcatcatcatgatcacggccatgatcaccatcacggcgaaggctgttgcggcggacatggcaaaaaagaaggtcatggtcacggcaactgcggttgtggcggacacggtcactaa

SEQ ID NO: 6717 - protein, 225 aa, Mannheimia succiniciproducens MBEL55E
MKVAKNIVVGIAYQVRTEDGVLVDEAPTNQPLEYLQGHNNLVIGLENALEGKAVGDKFEVRVKPEEGYGEYNENMVQRVPKDVFVGVDELAVGMRFIADTDMGPLPVVITEVSENDVVVDGNHMLAGQELLFTVEVVSAREATPEEIAHGHIHSGDHDHGHGGCGCGGHGHEHDHDHSHGGCGCGGHGHHHDHGHDHHHGEGCCGGHGKKEGHGHGNCGCGGHGH

SEQ ID NO: 6718 - DNA, 429 bp, Azoarcus sp. EbN1
  CDS (1)..(429): transl_table=11
gtgacccagatcgtccaacccgacagcctggtgacgctgcactaccgcatcgccatggaaaacggccagccgctgatcagcaccttcgaaagcacgcccgcgacgctgcagctgggcgctggagagctgcttcccagcctcgaacgcctgctcgccggcctcgagatcggcaagcaccacttgttcacgctcgcgcccgaagaggcgttcggcccccacaatcccgagctcgtcgagcgcgtgaaacgggagcacatgcccgaagaggagatcgaaccgatgacgatcatggaattcggcgcgcccaacggttcccgctattcggggctggtgcgggaaatcaacgaaacgttcgcggtcgtcgatttcaaccacccgctcgccggcaagacgatccgcttcgaagtggaagtgatcggcgttctttga

SEQ ID NO: 6719 - protein, 142 aa, Azoarcus sp. EbN1
MTQIVQPDSLVTLHYRIAMENGQPLISTFESTPATLQLGAGELLPSLERLLAGLEIGKHHLFTLAPEEAFGPHNPELVERVKREHMPEEEIEPMTIMEFGAPNGSRYSGLVREINETFAVVDFNHPLAGKTIRFEVEVIGVL

SEQ ID NO: 6720 - DNA, 480 bp, Thermococcus kodakarensis KOD1
  CDS (1)..(480): transl_table=11
atgaaagttgaagctggtgattatgttctcttccactacgttggaaggttcgaggatggagaagtttttgacacaagctacgaggagatagccagagagaatggcattctcgtcgaggagagggagtacggcccaatgtgggtcaggataggcgtcggtgagatcatccctggcctcgatgaagccataattggcatggaagctggagagaagaagaccgtgaccgttccccccgaaaaggcttacggaatgccgaacccagagctcgtaatctccgttccaagggaagaattcacaaaggccggccttgaaccccaggaaggtctctacgtcatgaccgattctggcatagccaagatagtctccgttggagagagcgaggtatcccttgacttcaaccaccctctagcaggtaagaccctagtctttgaggtagaagtcatagaagtaaaaaaggccgaagaggactcagaagcttag

SEQ ID NO: 6721 - protein, 159 aa, Thermococcus kodakarensis KOD1
MKVEAGDYVLFHYVGRFEDGEVFDTSYEEIARENGILVEEREYGPMWVRIGVGEIIPGLDEAIIGMEAGEKKTVTVPPEKAYGMPNPELVISVPREEFTKAGLEPQEGLYVMTDSGIAKIVSVGESEVSLDFNHPLAGKTLVFEVEVIEVKKAEEDSEA

SEQ ID NO: 6722 - DNA, 483 bp, Neisseria gonorrhoeae FA 1090
  CDS (1)..(483): transl_table=11
atggctattgcaaaaaattccgtggtttcgctgcattatgagatgtatgatgccaacaatcagcttttggataaaaccgaagaaccgattgcgtatctgcacggcggttacgacggcattttccctttggtggaagaggcgttgcacggtaaggatgccggcgatacggtcgatgtggcgctttcgtccgacgatgcgttcggcgagcaggattcggagttggtccgtattgaagatgcgggcgcgttccctgttgaagtcgaagtcggcatgatgtttgaagccgacgatcctgaaaccggcgatgttgtcgtctatcgtgtaaccgatgttgccgacggcaaggcggtggtggacggcaaccatcctttggcaggcatgaaaatccgctttaaagctacggttgaaagcgtgcgcgatgcatccgatgaggaaatcgcacacggtcatgtccacggttcgcacggtcattaccaccactga

SEQ ID NO: 6723 - protein, 160 aa, Neisseria gonorrhoeae FA 1090
MAIAKNSVVSLHYEMYDANNQLLDKTEEPIAYLHGGYDGIFPLVEEALHGKDAGDTVDVALSSDDAFGEQDSELVRIEDAGAFPVEVEVGMMFEADDPETGDVVVYRVTDVADGKAVVDGNHPLAGMKIRFKATVESVRDASDEEIAHGHVHGSHGHYHH

SEQ ID NO: 6724 - DNA, 477 bp, Pseudomonas syringae pv. syringae B728a
  CDS (1)..(477): transl_table=11
atgactgagcaatcttcgactcaaggctcgtctgacgagctgcgcatcggtcagaacacgcaggtcactctgcacttcgccctgcgtctggaaaacggcgataccgtcgacagcaccttcgaaaaggccccggccacgttcaaggtcggtgacggcaacctgctgcccggcttcgaaatggcgattttcggtttcaaggcgggcgataaaaagaccgtcgagattctgccggagaacgcctttggtcagcccaacccacaaaacgtgcagatcatgccacgctcgcagttcgtgggcatggaactgtccgaagggttgctggtgatcttcaacgacgccgccaataccgagttgcccggcgtggtgaaagcgttcgatgacgagcaggtcaccatcgacttcaatcacccgctggcaggcaagactctgagctttgaagtggaaatcttcgaagtgaaggcgattctggcttcctga

SEQ ID NO: 6725 - protein, 158 aa, Pseudomonas syringae pv. syringae B728a
MTEQSSTQGSSDELRIGQNTQVTLHFALRLENGDTVDSTFEKAPATFKVGDGNLLPGFEMAIFGFKAGDKKTVEILPENAFGQPNPQNVQIMPRSQFVGMELSEGLLVIFNDAANTELPGVVKAFDDEQVTIDFNHPLAGKTLSFEVEIFEVKAILAS

SEQ ID NO: 6726 - DNA, 453 bp, Pseudomonas fluorescens Pf-5
  CDS (1)..(453): transl_table=11
atgactgaacaggtattgactgaacaacgcatcggtcagaacacggaagtcactttgcatttcgcattgcgcctggagaacggcgacaccgtagacagcacgttcgacaaggccccggcgaccttcaaggtcggcgatggcaacctgctgccagggttcgaggcggcgctgttcggcttcaaggccggcgacaagcgcaacctgaccatcgaaccggaaaacgccttcggccagcccaacccgcagaacgtgcaggtcatcccgcgttcgcagttccaggacatggagctttcggaaggcttgctggtgatcttcaatgatgcggcgaacaccgagttgccaggtgtggtcaaaactttcgatgacgcgcaggtgaccatcgatttcaaccacccgctggccggcaagaccttgaccttcgacgttgaaatcatcgacgtcaaagcgctttaa

SEQ ID NO: 6727 - protein, 150 aa, Pseudomonas fluorescens Pf-5
MTEQVLTEQRIGQNTEVTLHFALRLENGDTVDSTFDKAPATFKVGDGNLLPGFEAALFGFKAGDKRNLTIEPENAFGQPNPQNVQVIPRSQFQDMELSEGLLVIFNDAANTELPGVVKTFDDAQVTIDFNHPLAGKTLTFDVEIIDVKAL

SEQ ID NO: 6728 - DNA, 486 bp, Psychrobacter arcticus 273-4
  CDS (1)..(486): transl_table=11
atgactactatcgcaaaagacactgccgtcaagtttaactacactttaaaagacgacgaaggcaatatccttgaccagtctccagaaggtcaaccacttgcttatttgcatggtcacagcaatatcatcccaggtctagagcaacaactagaaggcaaatctgctggcgaaagagtcaatgctgttgttgagcctgctgatggttacggcgagtatcaagaacaagcggtacaacatgtaccacgtgacaacttccaaggcgttgaagatatccagcctggtatgcagtttcagtcagaagctggtggtcaagtcatgctagtgactgtcaccgctgtcagtgacaaagaagtgactgttgatgcaaaccatccactagctggcaagcgtttgacttttgatgttgaaatccaagaagtgcgtgctgctactgaagatgaactaaaccacggtcatgtacatggcgcaggtggcgttgagcactaa

SEQ ID NO: 6729 - protein, 161 aa, Psychrobacter arcticus 273-4
MTTIAKDTAVKFNYTLKDDEGNILDQSPEGQPLAYLHGHSNIIPGLEQQLEGKSAGERVNAVVEPADGYGEYQEQAVQHVPRDNFQGVEDIQPGMQFQSEAGGQVMLVTVTAVSDKEVTVDANHPLAGKRLTFDVEIQEVRAATEDELNHGHVHGAGGVEH

SEQ ID NO: 6730 - DNA, 498 bp, Psychrobacter arcticus 273-4
  CDS (1)..(498): transl_table=11
atgaccgactcgcaatttatcacgcccaatgaagatgtacgtatcacttttggcagccttgtgaagctgcatttcgaagtaacgctcgagaacggtacactgattgattctactttcagccgtgatacgcctgtgactttaaccatcggtgatgagagcttgttacccggttttgagcaagtgctgatgaatctacgtgcaggcgatacgcgcgcagcccaccttgagccagagcaagcgtttggtgagtggaatcctgacaatatccaacgctttagccctactcagtttgcccttatcgctgacaatcccgagattggcatgctggtagaatttgaagataaaggcaaaaataccctacccggtacgattagtgccatcactaacgacgaagttgaagtggactttaaccatccgcttgcgggacaatccgtgctgtttaaaatcaaaatttttcaagtaacgccgccgggtgtcacaggtatcaagctcatttaa

SEQ ID NO: 6731 - protein, 165 aa, Psychrobacter arcticus 273-4
MTDSQFITPNEDVRITFGSLVKLHFEVTLENGTLIDSTFSRDTPVTLTIGDESLLPGFEQVLMNLRAGDTRAAHLEPEQAFGEWNPDNIQRFSPTQFALIADNPEIGMLVEFEDKGKNTLPGTISAITNDEVEVDFNHPLAGQSVLFKIKIFQVTPPGVTGIKLI

SEQ ID NO: 6732 - DNA, 492 bp, Colwellia psychrerythraea 34H
  CDS (1)..(492): transl_table=11
atgaaaatagctaaaaataatgtcgttgttatgcactatgcagtatctgacagtgaaggcactttaattgatagctcttacgaagataaaccaatggctattatccaaggtagtggatatttaatccctggcttagatgatgcccttgtcgatcatcaagctggtgataaatttgaagttgctgttgcttgtgatcaagcttacggcgaacgtcatgatgattatgtacaaacggtaccaagggaagtacttgctggtgttgaagatcttgctcttggtacccagctacgtgcaacaactgatgatggtgagcaaacggttattgttattgacgtgcaagatgatgttattactgttgacggtaatcatcctctttcaggcttagacttaagctttgacgttgaagttatcgaagtacgtgaagccactgctgaagaacttgaacatggccatgttcatagtgaaggtggttgtgggcacgaccacgaataa

SEQ ID NO: 6733 - protein, 163 aa, Colwellia psychrerythraea 34H
MKIAKNNVVVMHYAVSDSEGTLIDSSYEDKPMAIIQGSGYLIPGLDDALVDHQAGDKFEVAVACDQAYGERHDDYVQTVPREVLAGVEDLALGTQLRATTDDGEQTVIVIDVQDDVITVDGNHPLSGLDLSFDVEVIEVREATAEELEHGHVHSEGGCGHDHE

SEQ ID NO: 6734 - DNA, 477 bp, Pseudomonas syringae pv. phaseolicola 1448A
  CDS (1)..(477): transl_table=11
atgactgagcagtcttcgactcaaggctcgtctggtgagctgcgcatcggtcagaatacgcaggtcaccttgcacttcgccctgcgtctggaaaacggcgataccgtcgacagcaccttcgaaaaggctccggccacgttcaaggttggtgacggcaacctgttgcccggtttcgaaatggcgattttcggcttcaaggcgggcgatcgtaagaccgtggaaattccgccggaaaacgcctttggtcagcccaacccacaaaacgtgcagatcatgccacgctcgcagtttgtgggaatggaactgtccgaagggttgctggtgatcttcaacgacgccgccaataccgaattgcccggcgtggtgaaggctttcgatgatgatcaggtcaccatcgacttcaatcacccgctggcaggcaagacactgagctttgaagtggaaatcttcgaagtgaaggtgattctggcttcctga

SEQ ID NO: 6735 - protein, 158 aa, Pseudomonas syringae pv. phaseolicola 1448A
MTEQSSTQGSSGELRIGQNTQVTLHFALRLENGDTVDSTFEKAPATFKVGDGNLLPGFEMAIFGFKAGDRKTVEIPPENAFGQPNPQNVQIMPRSQFVGMELSEGLLVIFNDAANTELPGVVKAFDDDQVTIDFNHPLAGKTLSFEVEIFEVKVILAS

SEQ ID NO: 6736 - DNA, 432 bp, Dechloromonas aromatica RCB
  CDS (1)..(432): transl_table=11
atgagcaccaccgtccgttccgacagcttcctgaccctgcactatcggatcaccacactcgacggcgaggaattcctctccacctttgacatgagtcccgccaccctgcagatgggcggtggccagttggccgagaaccttgaatcggtgctgattggcctgccggcgcacgaacgttttgtcttcgagctcgaaccggcgcaggcctttggccagcacaacgaccgcctggtcgaacgcatcgcccgtagcggattgccggccgagatggaactcaaggaaaattccgtcgtcgaattcaccgctcccaacggtggcactttcgccggtttcctgcgcgagctggatgccacgcacgccttgttcgacttcaaccacccgatggccggaaaaacgatccgcttcgaggtggaaatcatcggaatcatgtaa

SEQ ID NO: 6737 - protein, 143 aa, Dechloromonas aromatica RCB
MSTTVRSDSFLTLHYRITTLDGEEFLSTFDMSPATLQMGGGQLAENLESVLIGLPAHERFVFELEPAQAFGQHNDRLVERIARSGLPAEMELKENSVVEFTAPNGGTFAGFLRELDATHALFDFNHPMAGKTIRFEVEIIGIM

SEQ ID NO: 6738 - DNA, 489 bp, Ralstonia eutropha JMP134
  CDS (1)..(489): transl_table=11
atgaatttgcaaacatttgcgtcggaagccgacggcggcgcggctgaccgcaagacggtccaggccgactccttcctgaccctccactacagtatctctctcgaaaacggcaccgaagtcgtgagcacgttcgaggagaatcccgccacgatgctgcttggccaggggcagctcgccccgacgctggagcaggcgctgctcggcatgcccgagggcgagcgcatgacctaccgcctggcgcccgaacaggccttcggcccgcgcaacccggaattgctgcagtgggtatcgctcgccacgctgcgcgagaacagctcgttcgaggaagactacagccccggcgatctggtcgagttcaacgcacccggcggtggcaaatatgcgggcgtcctcaaggagatcggcgacactgcggcgctgttcgatttcaaccatccgctggccgggcagacgatcctgttcgacgtgcagctgatcgggatcctctga

SEQ ID NO: 6739 - protein, 162 aa, Ralstonia eutropha JMP134
MNLQTFASEADGGAADRKTVQADSFLTLHYSISLENGTEVVSTFEENPATMLLGQGQLAPTLEQALLGMPEGERMTYRLAPEQAFGPRNPELLQWVSLATLRENSSFEEDYSPGDLVEFNAPGGGKYAGVLKEIGDTAALFDFNHPLAGQTILFDVQLIGIL

SEQ ID NO: 6740 - DNA, 483 bp, Thiobacillus denitrificans ATCC 25259
  CDS (1)..(483): transl_table=11
gtgaacatcggcaaagacaccgtggtgacgatcacctacgtcgtgaaggatctggacggcaagctgctcgaggaaagcgacgagccggtcagctatctgcacggcggctacgacaacatctttccgctcgtcgagcaggcgctcgagggcaaggcggtgggcgatgcggtcgatctcaagttgcagccggccgatgccttcggtgagttcgaggaggacctggtccgcctcgagccgcgcgaggcgtttccacccgagatcgagatcggcatgcagttcgtcggctcgccggtcgacgggggcggcgagatgctttacaccgtgaccgacatcgccgaagaaaaagtcgtcgtcgacggcaaccatccctacgcggggcaggccgtgcatttccactgcgaggtcagcgaggtgcgggccgcgacgtccgacgaagtcgagcacggtcacgcccacggcgcgcacggccaccatcaccactga

SEQ ID NO: 6741 - protein, 160 aa, Thiobacillus denitrificans ATCC 25259
MNIGKDTVVTITYVVKDLDGKLLEESDEPVSYLHGGYDNIFPLVEQALEGKAVGDAVDLKLQPADAFGEFEEDLVRLEPREAFPPEIEIGMQFVGSPVDGGGEMLYTVTDIAEEKVVVDGNHPYAGQAVHFHCEVSEVRAATSDEVEHGHAHGAHGHHHH

SEQ ID NO: 6742 - DNA, 456 bp, Burkholderia thailandensis E264
  CDS (1)..(456): transl_table=11
atgagcctcatcgaccttgcagaagtgaagcccggttcgcacgtcacgcttcattaccggctcgcccttgccgacggcgccgacatcgtcaacacgttctccgagaagcccgccacgctcctcctcggcgcggggcagcttgcgccgtcgctggaggagattctgatcggcctcaaggcgggcgaccattcgactttccggctagcgcccgagcaagcgttcgggccgcgcaatccggacatgatccagcgcgtgtcgctcgcgacgctgcgggagaacggcatggtcggcgacgatttcgcgccgggcgatctgatcgaattcaacgcgccggacggcggccgctacgcgggcgtgctcaaggagatcggcgagacctccgcgcttttcgatttcaaccatccgctcgcgggccaggcgctcacgttcgaagtgaaaatcatcgggattctgtaa

SEQ ID NO: 6743 - protein, 151 aa, Burkholderia thailandensis E264
MSLIDLAEVKPGSHVTLHYRLALADGADIVNTFSEKPATLLLGAGQLAPSLEEILIGLKAGDHSTFRLAPEQAFGPRNPDMIQRVSLATLRENGMVGDDFAPGDLIEFNAPDGGRYAGVLKEIGETSALFDFNHPLAGQALTFEVKIIGIL

SEQ ID NO: 6744 - DNA, 456 bp, Saccharophagus degradans 2-40
  CDS (1)..(456): transl_table=11
gtgacaaacgatgtattagcagttggcgccggtatggaagtgactttgcacttcgcgttgaccctagaagatggtgccgtagtagacagtaatttcgaatctaagcccgccacctttgtagttggcgatggcaagctgctcccaggttttgagcaagctattttcgggttaatcgccggcgataaaaaagccatgcacattccgcccgaacagggtttcggtcagcccaacccaaataatattcaagaagtaaagcgtaaagtgtttgccgccgatatggagctagcgcaaggcttggtggtgtcgtttgcagatgctaacggtggtgaaatgcccggagtgattgctgaaattggcgaagaaattgttaaagttgattttaaccacccattagcagggcgagaaattacctttgaagttgagatagtctccgtaaagccggcgacgactcactaa

SEQ ID NO: 6745 - protein, 151 aa, Saccharophagus degradans 2-40
MTNDVLAVGAGMEVTLHFALTLEDGAVVDSNFESKPATFVVGDGKLLPGFEQAIFGLIAGDKKAMHIPPEQGFGQPNPNNIQEVKRKVFAADMELAQGLVVSFADANGGEMPGVIAEIGEEIVKVDFNHPLAGREITFEVEIVSVKPATTH

SEQ ID NO: 6746 - DNA, 480 bp, Methylobacillus flagellatus KT
  CDS (1)..(480): transl_table=11
atgcagatcgccatgaacactgttgtcaccatcacctatgaattacgcgatagcgatggaaatattctggaggccagcaaggatcccgtcagctacctgcacggcggatatgacaatattttcccgcgagtagaagaggaattacatggcaagtctgtgggcgactctatcgaactgacgctggaaccagctgatgccttcggcgaatatgatgaggaactcgtgcagatagaacctgtttccgccttcccgacggaagagttgaaggtcgggatgcaatttgagggcgaagacgaaactggcgacatcgtactgtataccgttaccaatattgaagatggcaaggtcattgtcgacggtaatcacccctgggccggagagcgcgtattgttcaaggcatctgtgaccgccgtgcgtccagcaggccaggaagaaatcgatcacgggcatgtacatggtgcaggtggtcaccatcattag

SEQ ID NO: 6747 - protein, 159 aa, Methylobacillus flagellatus KT
MQIAMNTVVTITYELRDSDGNILEASKDPVSYLHGGYDNIFPRVEEELHGKSVGDSIELTLEPADAFGEYDEELVQIEPVSAFPTEELKVGMQFEGEDETGDIVLYTVTNIEDGKVIVDGNHPWAGERVLFKASVTAVRPAGQEEIDHGHVHGAGGHHH

SEQ ID NO: 6748 - DNA, 429 bp, Silicibacter sp. TM1040
  CDS (1)..(429): transl_table=11
atgaccgcggtaaaaaatggcgacacggttcgcattcactacactggcaagctgacggacggcactgtttttgacagctccgagggtcgcgatccgctcgaattcaccgttggcgctggccatgtgatcaagggcatggatcaaggcatgctcgacatggccgagggcgacaagaaaactttggaaattgcctgcgaagacgcctacggaccgatcaatccctccgctcgtcaggcggtcccgcgtgaaggcatcccagatgatatcccgctggaaatcggcaccatgctgcaaatgcagacccccgaaggccaagtgcttccggtgacagttgtcgatgtggacgaggcaagcgtgacactggatgcaaaccaccgtctggccggtcaggatctgatctttgacgtggaactcgttgcaattgcgtaa

SEQ ID NO: 6749 - protein, 142 aa, Silicibacter sp. TM1040
MTAVKNGDTVRIHYTGKLTDGTVFDSSEGRDPLEFTVGAGHVIKGMDQGMLDMAEGDKKTLEIACEDAYGPINPSARQAVPREGIPDDIPLEIGTMLQMQTPEGQVLPVTVVDVDEASVTLDANHRLAGQDLIFDVELVAIA

SEQ ID NO: 6750 - DNA, 483 bp, Myxococcus xanthus DK 1622
  CDS (1)..(483): transl_table=11
atgaaaattaccaaggacagcgtcgtctccatcgatttccgcctccacctcggcgacggcaaggccgtggacgagagcgagccgggggagccgctcgtctatctgcaggggcacgaggaaatcgtcccgggcctggaaaaggcgcttgagggcaagtcgcgtggtgacaccctccaggtgacggtgggtcccgacgagggctacggcgactatgacccggaaggcatcgaggaagtcccgaagacggagttcccggagggcctggagctggtggcgggcggcgtgctcagcgccaccgacccggacggggacgaggtggacttcttcatcaaggaagtgaaggccgactccgtgctggtggacttcaaccacccgctggccggcaagacgctgcacttcgaggtcaccgtgcgggacgtccgcgccgcgacggccgaggagctggagcacggccacgcccacgggccccacgactctcactga

SEQ ID NO: 6751 - protein, 160 aa, Myxococcus xanthus DK 1622
MKITKDSVVSIDFRLHLGDGKAVDESEPGEPLVYLQGHEEIVPGLEKALEGKSRGDTLQVTVGPDEGYGDYDPEGIEEVPKTEFPEGLELVAGGVLSATDPDGDEVDFFIKEVKADSVLVDFNHPLAGKTLHFEVTVRDVRAATAEELEHGHAHGPHDSH

SEQ ID NO: 6752 - DNA, 459 bp, Mesorhizobium sp. BNC1
  CDS (1)..(459): transl_table=11
atgagacaagccagagcgggcgatgtcgtacgcgtccattaccggggacgcctcaccgacggcaccgagttcgattcctccgacggtcgcgagcccctggaattccaggtcggcggcggtcaggtcattgccggtttcgaaaagcaggtggaaggcatggaggtcggcgaaacatcgaccgtgaccattcccgccaatcaggcctatggcgagcgcgacgaacggcaagtgcaatccgtgccgcgcaacacgatgcctgacaatctggacctgcaggtcggcacgcggctgaccgccaccacgcgggacggcaagcagataccgcttaccgtaaccgacgtgaatgacgagcaggtgatcgtcgatgccaatcatccgctggcgggacaagatctcgtcttcgatatcgaactggtcgagatcgtcggttccgagcccggcctgaaattcgggcaatag

SEQ ID NO: 6753 - protein, 152 aa, Mesorhizobium sp. BNC1
MRQARAGDVVRVHYRGRLTDGTEFDSSDGREPLEFQVGGGQVIAGFEKQVEGMEVGETSTVTIPANQAYGERDERQVQSVPRNTMPDNLDLQVGTRLTATTRDGKQIPLTVTDVNDEQVIVDANHPLAGQDLVFDIELVEIVGSEPGLKFGQ

SEQ ID NO: 6754 - DNA, 510 bp, Cytophaga hutchinsonii ATCC 33406
  CDS (1)..(510): transl_table=11
atgttaacaatctctgaaaacaaagtcgttcgtcttacatacgaattaagcgaagacagcaaaaaagacgaagtaattgaaaaagttgatgcagaccagcctgctactttcttatttggcgtaggtggcttattgcctgaatttgaagaaaatttatttggtttaaaacaaggtgattctttcaaattctccattgcatctgagaacgcatacggcccgttagatccgaatgcattggtagacattccaaaagaagcgtttacaatcgatggtaaactacaggaagatatgttgcaagttggcagcattttaccaatgagagacaatgaagataatttcttacaaggaagaattgttgaattgaaagatgatgccgtaatcatggatttcaatcatccgcttgcaggaaaagacctttatttcaaaggaacaattatcgatgttcgtgaagcaactgctgaagaaatcagccacggtcacgttcacggcgaaggtggtcaccatcattaa

SEQ ID NO: 6755 - protein, 169 aa, Cytophaga hutchinsonii ATCC 33406
MLTISENKVVRLTYELSEDSKKDEVIEKVDADQPATFLFGVGGLLPEFEENLFGLKQGDSFKFSIASENAYGPLDPNALVDIPKEAFTIDGKLQEDMLQVGSILPMRDNEDNFLQGRIVELKDDAVIMDFNHPLAGKDLYFKGTIIDVREATAEEISHGHVHGEGGHHH

SEQ ID NO: 6756 - DNA, 582 bp, Haemophilus somnus 129PT
  CDS (1)..(582): transl_table=11
atgaaagtagaaaaaaatgttgtggtaagtatcgcttaccaagtacgcactgaagacggcgtattggttgatgaagcaccggcaaatcaacctttagaatatttacatggacatcagaacctcgtgatcgggctggagaatgcactggaaggtaaatctgtcggtgataaattcgaagtgcgtgtaaaaccggaagaagggtacggagaatataatgaaaacatggtgcaacgtgtacccaaagatatttttgtgggcgttgatgagttggtagtcggtatgcgttttatcgcagatacggatcttgggccattacctgttgttatcactgaagtaaatgaaaatgaggtggtagttgatggtaaccatatgcttgccggtcaagaattgcatttttccgtagaggtcattgcaacgcgtgaagcaacactggaagaaatggcacatggtcatattcatacagagggcggttgttgtgcacatgataatgatgaagagggtcatcattgcggatgtggcggacatcatcatgaacaccatgaacatcacggttgttgtggaaatcatggttgcaaatcgtaa

SEQ ID NO: 6757 - protein, 193 aa, Haemophilus somnus 129PT
MKVEKNVVVSIAYQVRTEDGVLVDEAPANQPLEYLHGHQNLVIGLENALEGKSVGDKFEVRVKPEEGYGEYNENMVQRVPKDIFVGVDELVVGMRFIADTDLGPLPVVITEVNENEVVVDGNHMLAGQELHFSVEVIATREATLEEMAHGHIHTEGGCCAHDNDEEGHHCGCGGHHHEHHEHHGCCGNHGCKS

SEQ ID NO: 6758 - DNA, 423 bp, Shewanella sp. MR-4
  CDS (1)..(423): transl_table=11
gtgactgtgacacgttcgttattgtgccatatgaatattgtgcttgaagatggttcgaccgccgatagcactaaagcctcgggtaagccagcacgccttaatatcggcgatggtactttaagccctgcatttgaagcgcaacttgtttccttgaatctaggcgataagcacagctttacgcttgaagcggtcgatgcctttggtgagtcaaatcccgatgcgattcattatatggatagaacccgcttcccagccgatatggagcttgaagttggtgttatcgtcagtttcgcaggccctggcggcagtgagatccccggaatcgtgcgtgaggttgctggcgattcgattacggtcgatctcaatcaccctctagcgggacgcaaagtgacatttgaactcgacgtggtgaaggtactgtaa

SEQ ID NO: 6759 - protein, 140 aa, Shewanella sp. MR-4
MTVTRSLLCHMNIVLEDGSTADSTKASGKPARLNIGDGTLSPAFEAQLVSLNLGDKHSFTLEAVDAFGESNPDAIHYMDRTRFPADMELEVGVIVSFAGPGGSEIPGIVREVAGDSITVDLNHPLAGRKVTFELDVVKVL

SEQ ID NO: 6760 - DNA, 471 bp, Alkalilimnicola ehrlichei MLHE-1
  CDS (1)..(471): transl_table=11
atgcaggttgccaaagaccgggtcgtgtccatcgactacacccttaaagacaccgaaggcacgttgctggactcctccgaggggcgcgggccgctggcttaccttcacggcgcgggcaatatcatcccgggcctggaacaggcgctcgaggggcagaacagcggtgattcggtggaagtgaccatcgagccgggcgatgcctacggcgagcgcgacgacaacctgatccaggatgtccccaagcagatgtttgactcggtggagaaggtcgagcccggcatgcagttccaggcccagacccccaacggcacgcaggtaatcaccgtgcgcgaagtaggcgacgagacggtcaaggtggatgccaaccatccgctggccggcgtcaccctcaacttcgacgtcaaggtgatcgacgtccgtgacgcctccagtgaggaggtcgagaacggccagcccgaccagcagcagtaa

SEQ ID NO: 6761 - protein, 156 aa, Alkalilimnicola ehrlichei MLHE-1
MQVAKDRVVSIDYTLKDTEGTLLDSSEGRGPLAYLHGAGNIIPGLEQALEGQNSGDSVEVTIEPGDAYGERDDNLIQDVPKQMFDSVEKVEPGMQFQAQTPNGTQVITVREVGDETVKVDANHPLAGVTLNFDVKVIDVRDASSEEVENGQPDQQQ

SEQ ID NO: 6762 - DNA, 438 bp, Hyphomonas neptunium ATCC 15444
  CDS (1)..(438): transl_table=11
atgacccaggtcaaacaaggcgacaccgtacacatccactataccggcaccctgaaagacggcacgacattcgacagctcgcagggccgcgacccgctggcgtttgaagtcggcaccggccagatcattcccggcctggacgccgccattcccggcatggccgtcggcgacaagaaaaccgtcaccgtcccctgcgaagaagcttacggcccgatgaaccccgacatgcgccaggatgttccacgcgccgatattcccgctgaagttcctgtcgaggtcggcacccgccttcagatgcagacgcagtccggccagcccgtcccggtcgtcgtcgtcgcctccgacgacaagaccgtcaccctggacgccaatcacccgctcgccggtcaggacctgacgttcgacattgaactggtggcgatcaaagaagcggcgtaa

SEQ ID NO: 6763 - protein, 145 aa, Hyphomonas neptunium ATCC 15444
MTQVKQGDTVHIHYTGTLKDGTTFDSSQGRDPLAFEVGTGQIIPGLDAAIPGMAVGDKKTVTVPCEEAYGPMNPDMRQDVPRADIPAEVPVEVGTRLQMQTQSGQPVPVVVVASDDKTVTLDANHPLAGQDLTFDIELVAIKEAA

SEQ ID NO: 6764 - DNA, 441 bp, Pseudomonas aeruginosa UCBPP-PA14
  CDS (1)..(441): transl_table=11
atggctgagtcgacccgcattggccaggagagccgcgtcaccctgcatttcgccctcaagctggaggacggcaacgtcgtcgacagcaccttcgacaagcagccggcctcgttcaaggtcggcgacggcaacctgctgccgggcttcgaacaggcgctgttcggcttgaaggctggcgacaagcgcaccctgagcattcttcccgaacagggcttcggccagccgaatccgcagaacgtgcagatcatgccgcgcgaccagttccaggacatggagctggccgagggcctgctggtgatcttcaacgacgcggccaagaccgaactgccgggcgtggtcaaggcgttcgatgagcagcaggtgaccgtcgacttcaatcatccgctggccggcaagaccctggccttcgaagtcgagatcatcgacgtccagccggcctga

SEQ ID NO: 6765 - protein, 146 aa, Pseudomonas aeruginosa UCBPP-PA14
MAESTRIGQESRVTLHFALKLEDGNVVDSTFDKQPASFKVGDGNLLPGFEQALFGLKAGDKRTLSILPEQGFGQPNPQNVQIMPRDQFQDMELAEGLLVIFNDAAKTELPGVVKAFDEQQVTVDFNHPLAGKTLAFEVEIIDVQPA

SEQ ID NO: 6766 - DNA, 474 bp, Acidovorax sp. JS42
  CDS (1)..(474): transl_table=11
atgaacatcacccaagacaccgccgtcacgctcagctaccgcgtcaccgatcccgccacgggcaagccgctcgatgccggcaatgtggcctacctgcacggcggctatgagaacatcttccccaaggtcgaggccgcgctggaaggccaggccccgggccatgccgtcacgctggacctggcggtggaggacgcattcggcgcgcgcgacgagagcctggtgcgcaccatccccaagagcgagttcccccccggcgtgaaggtgggcggccagttgcaggggcccggcgccgacggccagccgcagatgttccacgtggtcaagatcaagggccccgtggtgcacctggacggcaaccacccgctggccggcaaggcgctgcgttttgcctgcaaggtgaccgaggtgcgcgccgccacggccgaggagatcgcccaccgccatgtgcatggcgggcacgggcaccaccattga

SEQ ID NO: 6767 - protein, 157 aa, Acidovorax sp. JS42
MNITQDTAVTLSYRVTDPATGKPLDAGNVAYLHGGYENIFPKVEAALEGQAPGHAVTLDLAVEDAFGARDESLVRTIPKSEFPPGVKVGGQLQGPGADGQPQMFHVVKIKGPVVHLDGNHPLAGKALRFACKVTEVRAATAEEIAHRHVHGGHGHHH

SEQ ID NO: 6768 - DNA, 483 bp, Magnetospirillum magnetotacticum MS-1
  CDS (1)..(483): transl_table=11
atgcgcatcgccaaggacaccgtcgtcacgctcagctaccgtgtcaccgacaccgacggcaacatcgtcgatgagggcgccgagcccatcatctacctgcatggcggttatgacggcctgttcccccggctggaagcggccctggagggcaaggaagctggccacgaactgaacatcaagctgcagcccgaggacgcctttggtgaatacgacgcggaactggtcagcgtcgaggacgccgccatgttccccgccaatgtgcaggtcggcatgcagttcgagcgtgtcatggacggcaatcaggacgaggccatgctgttctcggtcactgacgtggccgacggcaaggtggtggtcgacggcaaccatcccctggcgggaatggcgctgatcttcgactgtacggtcgccgatatccgcgccgcctcggccgaggaggtcgagcacggccacccgcacttccctggccaccaccatcactag

SEQ ID NO: 6769 - protein, 160 aa, Magnetospirillum magnetotacticum MS-1
MRIAKDTVVTLSYRVTDTDGNIVDEGAEPIIYLHGGYDGLFPRLEAALEGKEAGHELNIKLQPEDAFGEYDAELVSVEDAAMFPANVQVGMQFERVMDGNQDEAMLFSVTDVADGKVVVDGNHPLAGMALIFDCTVADIRAASAEEVEHGHPHFPGHHHH

SEQ ID NO: 6770 - DNA, 441 bp, Pseudoalteromonas tunicata D2
  CDS (1)..(441): transl_table=11
atgactgatgtagtaattggtgcgcaatctgaagttgtatttcacttttcaattaagttatctgacggctctgctgctgattcaagcaaagtgcataataaaccagcgaaattagtaatgggagacgggagtcttacggctaattttgaaaagtgtttgttaggtttaaaagcgggtgaaaataaatcttttgaacttgcacctgaagatgcttttggtcagccgaaccctgataacatctatcatcttgaccgcagtaagtttggcgtggatgcacccgctcaggtaggtgcaatcattgcttttacgcagcaagatggtactgagcttcctggacttattcgtgaggttgctggtgattctgtaacggttgattttaatcatcctttagctggtcagcatttaacgtttgatgttgaaattatttcggtggccaattaa

SEQ ID NO: 6771 - protein, 146 aa, Pseudoalteromonas tunicata D2
MTDVVIGAQSEVVFHFSIKLSDGSAADSSKVHNKPAKLVMGDGSLTANFEKCLLGLKAGENKSFELAPEDAFGQPNPDNIYHLDRSKFGVDAPAQVGAIIAFTQQDGTELPGLIREVAGDSVTVDFNHPLAGQHLTFDVEIISVAN

SEQ ID NO: 6772 - DNA, 435 bp, Photobacterium sp. SKA34
  CDS (1)..(435): transl_table=11
atgtcggtgattaaagataacagtgaagtgctgatgcatttttccattaaacttgatgatggatcggttgcagaatctacttatgccgcaggtaagcctgcaatgtttcgcatgggagatggcagtttaactgacaattttgaaaagtgtttattagggttgacgataggtgaaaaaggtacatttgaattatcaccagaagatgcgtttggtttacctaaccccgataatatccatcatcttgatttagctaaatttggtgctgatgctcccgccgaagtgggcaatattatcgcttttgctggtcccgatgggcatgatattcccggattaattacagccgttgtgggtgattctgttactgttgatttcaatcatccacttgcagggcaagctgtcacctttgaggtggaggttgtctccattgaaagttaa

SEQ ID NO: 6773 - protein, 144 aa, Photobacterium sp. SKA34
MSVIKDNSEVLMHFSIKLDDGSVAESTYAAGKPAMFRMGDGSLTDNFEKCLLGLTIGEKGTFELSPEDAFGLPNPDNIHHLDLAKFGADAPAEVGNIIAFAGPDGHDIPGLITAVVGDSVTVDFNHPLAGQAVTFEVEVVSIES

SEQ ID NO: 6774 - DNA, 435 bp, Oceanospirillum sp. MED92
  CDS (1)..(435): transl_table=11
atgagtaagttgataggccctggtaaatcggtaacacttcatttcgcgatcaagctggaagatggtcagattatcgattcaaacttttccgcagagcctgcaacttttacagtaggtgacggtaatcttttggaagggtttgagcaggcgctgtttggcttggaagagggcgcaaagcagacccttaaaattctacctgaaaatggcttcggtatgccgaatcctagtaatattcagaacctaccacgctcacaatttgatggtatggagttagagcaaggtttagttatctcattctcagatcctggtaatggtgagttgcccggggtaatcgcagaatttgatgataagatggttagcgttgattttaatcatccgttagcagggaaaaagctggattttgaggtggagatcctcaaagtggtagacgcttaa

SEQ ID NO: 6775 - protein, 144 aa, Oceanospirillum sp. MED92
MSKLIGPGKSVTLHFAIKLEDGQIIDSNFSAEPATFTVGDGNLLEGFEQALFGLEEGAKQTLKILPENGFGMPNPSNIQNLPRSQFDGMELEQGLVISFSDPGNGELPGVIAEFDDKMVSVDFNHPLAGKKLDFEVEILKVVDA

SEQ ID NO: 6776 - DNA, 468 bp, delta proteobacterium MLMS-1
  CDS (1)..(468): transl_table=11
atgacgcagaaaaggaaagcacaggaaaacgatcgggtaattgtccactacgagggccgcctggaagatggcgaggtctttgaatcctccgccgattcagccccaatggatttcaagatcggtgaacaacaggtattgccctccctggagcgggcgatcatcggcatggaggagggccagagacgcaccgtcagcatcctccccgaggatggctacggcccccattacgaggaactggtcgtcaccgtcccccgcgagaatctcagccccggcgaactcaagcccggcacggtggtggcgatgaacctggaacgcgagggccaaacccaccgcctgccggccatggtggtggaagccgacgagcagcaggtcaaggtggacttcaaccaccccctggccggccaggagcttttttacaccatcaccctgcagtccctggagccggcggcggccgccagtgacggctga

SEQ ID NO: 6777 - protein, 155 aa, delta proteobacterium MLMS-1
MTQKRKAQENDRVIVHYEGRLEDGEVFESSADSAPMDFKIGEQQVLPSLERAIIGMEEGQRRTVSILPEDGYGPHYEELVVTVPRENLSPGELKPGTVVAMNLEREGQTHRLPAMVVEADEQQVKVDFNHPLAGQELFYTITLQSLEPAAAASDG

SEQ ID NO: 6778 - DNA, 435 bp, Oceanobacter sp. RED65
  CDS (1)..(435): transl_table=11
atgcaaattacagaaggtaagcaggttacgcttcacttttccttaaaacttgaagatgaccaagttgttgactctacctttgataaagacccagcgaccttggtcgtgggcgatggaaatctacctgagagctttgaagccttgttgatcggcttaagcgccggtgataaagaattgtttactgtgccgccagagaaagcgtttgctcagccaaaccctaacaatgtacagcacatgaaacgcagtgatttccctgcagacatgaaattggagccaggcatgatgatctcatttgctgacgccaaccaagcagaattaccaggaatgattaaagaagtgcacgataatcttgtcatcgttgacttcaaccatcctttggctggtcgtacattgaaatttgaagtagaaatcatcgacgtaaaagacgccgattag

SEQ ID NO: 6779 - protein, 144 aa, Oceanobacter sp. RED65
MQITEGKQVTLHFSLKLEDDQVVDSTFDKDPATLVVGDGNLPESFEALLIGLSAGDKELFTVPPEKAFAQPNPNNVQHMKRSDFPADMKLEPGMMISFADANQAELPGMIKEVHDNLVIVDFNHPLAGRTLKFEVEIIDVKDAD

SEQ ID NO: 6780 - DNA, 441 bp, Alteromonadales bacterium TW-7
  CDS (1)..(441): transl_table=11
atgagccaagctgtaattggtgaaaactcgcaagttatttttcatttttctataaaacttgaagatggctctgccgctgattcaactaaagtgcacaacaaacctgctaagttaacaatgggcgatggcagcctaacggcaaattttgagaagtgcctattaggtctaagcgcaggtgaaagtaaaacctttgaattagaaccggaagatgcatttggtcagccaaatccagataacatttattatgttgatcgtagtaaatttggcgcagaaacacctgcgaaagtaggtgctattattgcgtttactcaacctgatggtacagagcttccgggcttagtgcgtgaagtgcagggtgagtcggttactattgattttaaccatccgttatctggccagcgtttaacatttgaagttgatattattgaggtagaaggctaa

SEQ ID NO: 6781 - protein, 146 aa, Alteromonadales bacterium TW-7
MSQAVIGENSQVIFHFSIKLEDGSAADSTKVHNKPAKLTMGDGSLTANFEKCLLGLSAGESKTFELEPEDAFGQPNPDNIYYVDRSKFGAETPAKVGAIIAFTQPDGTELPGLVREVQGESVTIDFNHPLSGQRLTFEVDIIEVEG

SEQ ID NO: 6782 - DNA, 447 bp, marine gamma proteobacterium HTCC2143
  CDS (1)..(447): transl_table=11
atgaataatttagccattgcaggtgacactaaggttaccttgcatttttcattaaagtttgaagacgggtcggttgtcgattccacctttgataaagagcccgcaaccttcactataggtgatggcagtcttctcgatggatttgaacgtaagcttttcgggttaaaggccggggaaaaagacagttttattgtttcgccagaagatggctttgggcaatcaaaccctaataatgtacagcggttttctcgcggagatttttctgccgacctcgaattggcagaaggtctggttatttcctttgccgacgccagtcagtcggagctacctggcgtggtccagtcagtggacggtgacagggtgatggttgacttcaaccaccccttggcggggcgcaatatcctgtttgatgttgaaattatcaacgttggtggcctcgacagctaa

SEQ ID NO: 6783 - protein, 148 aa, marine gamma proteobacterium HTCC2143
MNNLAIAGDTKVTLHFSLKFEDGSVVDSTFDKEPATFTIGDGSLLDGFERKLFGLKAGEKDSFIVSPEDGFGQSNPNNVQRFSRGDFSADLELAEGLVISFADASQSELPGVVQSVDGDRVMVDFNHPLAGRNILFDVEIINVGGLDS

SEQ ID NO: 6784 - DNA, 450 bp, marine gamma proteobacterium HTCC2080
  CDS (1)..(450): transl_table=11
atggatgatttgatgataagcgagggaacgcgcgtcacactaaattttgcgttggtactcgacgatggttccgagatagattcaaacttcgaaaaagaacccgcgtctttttccgtaggtgatggctccctgctgccgggttttgagcgcgcactttttggcctcaaatcaggcgatgaagcgacactggaaatcttgccagaggagggctttggtcagcccaacgacaacaacctgcaaacaattaaacgtgaccaatttgatgccggatccgaacttgaagagggaatggttttttcctttgccgatgctgctgggggtgagctgcccggggtcgtaaagacttttgatgccgatgaggtgacggttgatttcaatcatccgctggcagggcgtactttatccttccgagttgccatccataatgtcgaggttgcggagctacattga

SEQ ID NO: 6785 - protein, 149 aa, marine gamma proteobacterium HTCC2080
MDDLMISEGTRVTLNFALVLDDGSEIDSNFEKEPASFSVGDGSLLPGFERALFGLKSGDEATLEILPEEGFGQPNDNNLQTIKRDQFDAGSELEEGMVFSFADAAGGELPGVVKTFDADEVTVDFNHPLAGRTLSFRVAIHNVEVAELH

SEQ ID NO: 6786 - DNA, 429 bp, Candidatus Desulfococcus oleovorans Hxd3
  CDS (1)..(429): transl_table=11
atgacacaggcccagaacggcaacaccgtaaaagtgcactataccgggaaactggaaaacggcgagatttttgattcgtcagaaggccgggacccgctggagtttaccatcgggcagggacagatgattcccgggttcgaggcggcggtgatcggcatgaaagccggtgaaaccaagaccgccgagaaagtcccggccgaccaggcctatgcctaccacgaggagctggtcatggaggtgggccgggaccagattccggaaaacctcagcaccgaagtcggccagcgcctgcaggcccagcagccggacggacaggtccttgtggtggagattgtcgcggccacggatgacacggttacactggacgccaaccatcccctggccggcaaagacctgtactttgacctggaggtggtggaagtcagctag

SEQ ID NO: 6787 - protein, 142 aa, Candidatus Desulfococcus oleovorans Hxd3
MTQAQNGNTVKVHYTGKLENGEIFDSSEGRDPLEFTIGQGQMIPGFEAAVIGMKAGETKTAEKVPADQAYAYHEELVMEVGRDQIPENLSTEVGQRLQAQQPDGQVLVVEIVAATDDTVTLDANHPLAGKDLYFDLEVVEVS

SEQ ID NO: 6788 - DNA, 486 bp, Pseudomonas putida GB-1
  CDS (1)..(486): transl_table=11
atgctgatcgccgccaacaaggctgtctccatcgactataccctgaccaacgacgccggggagaccatcgacagctccgccggtggcgcgccgctggtctacctgcacggtgccggcaacatcatcccaggcctggaaaaagccctggaaggtaaacaggctggtgacgagctgaacgttaccatcgagccggaagacgcctacggcgaatacctggccgagctggtcagcaccctgaaccgcagcctgttcgaaggcgtcgacgagctggaagtgggcatgcagttccacgcttcggcaccggacggccagatgcagatcgtcaccatccgcgacctcgacggcgacgacgtcaccgttgacggcaaccacccactggccggccagcgcctgaccttcaaggtcaaggttgtcgacgtgcgtgacgccagcgaagaagaaatcgctcaccgccacatccacggtgaaggtggccatcaccactga

SEQ ID NO: 6789 - protein, 161 aa, Pseudomonas putida GB-1
MLIAANKAVSIDYTLTNDAGETIDSSAGGAPLVYLHGAGNIIPGLEKALEGKQAGDELNVTIEPEDAYGEYLAELVSTLNRSLFEGVDELEVGMQFHASAPDGQMQIVTIRDLDGDDVTVDGNHPLAGQRLTFKVKVVDVRDASEEEIAHRHIHGEGGHHH

SEQ ID NO: 6790 - DNA, 438 bp, Pseudomonas putida GB-1
  CDS (1)..(438): transl_table=11
atgactgacacccgtatcggccagaacaccgaagtcaccttgcacttcgcgctgcacctggaaaacggcgacaccgtcgacagcacgttcgacaaagccccggccaccttcaaggttggcgatggcaacctgctgccgggctttgaaagcgccctgttcggtttcaaggccggtgacaagcgcactgtggtagtggccccggagaacgctttcggccagcctaacccgcagaacgtgcaggttatgccgcgctccaacttcgaaggcatggagctgtccgaaggcctgctgatcatcttcaacgacgccgccaacaccgagctgccaggtgtggtcaaagcgttcgatgacgaccaggtgaccatcgacttcaatcacccattggctggcaagaccctgaccttcgaggtggagatcctcgaggtgaaggccctgtaa

SEQ ID NO: 6791 - protein, 145 aa, Pseudomonas putida GB-1
MTDTRIGQNTEVTLHFALHLENGDTVDSTFDKAPATFKVGDGNLLPGFESALFGFKAGDKRTVVVAPENAFGQPNPQNVQVMPRSNFEGMELSEGLLIIFNDAANTELPGVVKAFDDDQVTIDFNHPLAGKTLTFEVEILEVKAL

SEQ ID NO: 6792 - DNA, 453 bp, Marinobacter sp. ELB17
  CDS (1)..(453): transl_table=11
atgaaagagctccctgtagataaaggcactcgggttaccctgcattttgccctgaaattcgacagcggcgaagtggttgataccaccttcgacaaaaacccggccaccctggacattggcgatgaaagtctgccagagaattttgaagcctatctgatgggcatgaaagccggtgacaaagccagctatcaggtgccaccggaaaaagcctttggccagcgcaaccccaacaacttacaggtgatgaagcgccatgtgttcggtgccgacatggtgctggagccaggtgtggtggtctcctttgccgacgcgcgtcagcaagagctgccgggtaccatcagctgggtagagggcgacgaagtagaagtggacttcaaccacccgctgtctgggcgtacactaaccttcgacgtagaaattatagacgtagagccggtaggccctgcgcactga

SEQ ID NO: 6793 - protein, 150 aa, Marinobacter sp. ELB17
MKELPVDKGTRVTLHFALKFDSGEVVDTTFDKNPATLDIGDESLPENFEAYLMGMKAGDKASYQVPPEKAFGQRNPNNLQVMKRHVFGADMVLEPGVVVSFADARQQELPGTISWVEGDEVEVDFNHPLSGRTLTFDVEIIDVEPVGPAH

SEQ ID NO: 6794 - DNA, 447 bp, Moritella sp. PE36
  CDS (1)..(447): transl_table=11
atgacagttaacgtagcaacaattggcgatgatagccaagtactcatgcatttcactattactttagcagacggttctgttgcagatagcaccgaactacaaggtaaaccagctaagttagtgattggtgatggcagcttaacccctaattttgagcgttgcttactcggtttaactgttggcgataagaacaagtttgaactgcaaccagaagatgcgttcggacaacctaatccagataatatttactacttagaccgtgctaagtttacggaagtgaaagcggaagttggcttaattgttggttttactcagccagatggcgctgagttaccaggtatgatccgtgacgtgattggtgactcggtcactgtcgactttaatcatccgttagctggacaagtcgtgacgtttgaagttgaaattttagaaattaatgcagaataa

SEQ ID NO: 6795 - protein, 148 aa, Moritella sp. PE36
MTVNVATIGDDSQVLMHFTITLADGSVADSTELQGKPAKLVIGDGSLTPNFERCLLGLTVGDKNKFELQPEDAFGQPNPDNIYYLDRAKFTEVKAEVGLIVGFTQPDGAELPGMIRDVIGDSVTVDFNHPLAGQVVTFEVEILEINAE

SEQ ID NO: 6796 - DNA, 513 bp, Ostreococcus tauri
  CDS (1)..(513)
atggcgcgcgcgcgaacgacggttaccgcggcgcgcgcgggcgaacgcgtgacgttgcactactcgatgacgctgggcgacggcacggtcgtggacgacacccggggcgaggcgcggggcggacgaccggtgatcgtcaccgtgggtgacggggcgctgtttccaaagatttcaaaagaaatcgagtcgatggcgatcggggacgcgcgcacggttcgtctcgccgcggaggaggcgttcggggcgagagatccgggtaaggtccaacggtttccgctgtcgccggaggaggcgaaggcgttgggcgagcgcgcgcgaccgggtcagctcgtggagctcccggacggcggacgcgcgctcgtgctcgagctcgacgacgccggcgtcgcgctcgatttgaaccacccgctcgcggggcaagatttgacgtttgagatcgaactcctcgacatctccgagggggcgacgatttttggcgttcccatggtgaacttcaccccagggtcgacgtag

SEQ ID NO: 6797 - protein, 170 aa, Ostreococcus tauri
MARARTTVTAARAGERVTLHYSMTLGDGTVVDDTRGEARGGRPVIVTVGDGALFPKISKEIESMAIGDARTVRLAAEEAFGARDPGKVQRFPLSPEEAKALGERARPGQLVELPDGGRALVLELDDAGVALDLNHPLAGQDLTFEIELLDISEGATIFGVPMVNFTPGST

SEQ ID NO: 6798 - DNA, 465 bp, Methanococcus thermolithotrophicus
  CDS (1)..(465): transl_table=11
gtgatttttttggtagataaaggagttaaaataaaagtagactacataggtaaacttgaaagtggagatgtctttgacacttccatagaagaggtagcaaaagaagctggaatatacgcgcctgatagagaatatgaacctctagagttcgttgtaggagaaggtcagttgattcaaggttttgaagaagctgttttagacatggaagtcggggacgaaaaaaccgtaaaaatccctgcagagaaagcatacggtaacagaaatgaaatgttaatacagaaaataccaagagatgcttttaaagaagctgattttgaacctgaagaaggaatggtaatccttgcagaaggaattcctgctacaataaccgaagttacagataatgaggtaactttagactttaaccatgaacttgcaggaaaagatttagtatttacaattaaaattattgaagttgtcgaataa

SEQ ID NO: 6799 - protein, 154 aa, Methanococcus thermolithotrophicus
MIFLVDKGVKIKVDYIGKLESGDVFDTSIEEVAKEAGIYAPDREYEPLEFVVGEGQLIQGFEEAVLDMEVGDEKTVKIPAEKAYGNRNEMLIQKIPRDAFKEADFEPEEGMVILAEGIPATITEVTDNEVTLDFNHELAGKDLVFTIKIIEVVE

SEQ ID NO: 6800 - DNA, 450 bp, Escherichia coli O157
  CDS (1)..(450): transl_table=11
atgtctgaatctgtacagagcaatagcgccgtcctggtgcacttcacgctaaaactcgacgatggcaccaccgccgagtctacccgcaacaacggtaaaccggcgctgttccgcctgggcgatgcttctctttccgaagggctggagcaacacctgctggggctgaaagtgggcgataaaaccactttctcgctggagccagatgcggcgtttggcgtgccgtcaccggacctgattcagtacttctcccgccgtgagtttatggatgcaggcgagccagaaattggcgcaataatgctttttaccgcaatggatggcagtgagatgcctggcgtgatccgcgaaattaacggcgactccattaccgtcgatttcaaccatccgctggccgggcagaccgttcattttgatattgaagtgctggaaatcgatccggcactggaggcgtaa

SEQ ID NO: 6801 - protein, 149 aa, Escherichia coli O157
MSESVQSNSAVLVHFTLKLDDGTTAESTRNNGKPALFRLGDASLSEGLEQHLLGLKVGDKTTFSLEPDAAFGVPSPDLIQYFSRREFMDAGEPEIGAIMLFTAMDGSEMPGVIREINGDSITVDFNHPLAGQTVHFDIEVLEIDPALEA

SEQ ID NO: 6802 - DNA, 453 bp, Pseudomonas fluorescens
  CDS (1)..(453): transl_table=11
atgactgatcaggtattggctgagcaacgcatcggccagaacacggaagtcactttgcatttcgcactgcgcctggagaatggcgacacggtcgacagcacgttcgacaaggcccccgcgaccttcaaggtcggcgacggcaacctgctgccgggtttcgaagcggcactgttcggtttcaaggccggtgacaagcgcaccctgcaaatcctgccggaaaacgcctttggccagcccaacccgcaaaacgtgcagatcatcccccgttcgcagttccagaacatggacctgtcggaaggcttgctggtgatcttcaatgatgcggcgaacactgaattgcctggcgtggtgaaagcatttgatgacgcgcaagtgaccatcgacttcaatcacccgttggccggcaagacgttgacctttgacgtcgagattatcgacgtcaaagcgctgtaa

SEQ ID NO: 6803 - protein, 150 aa, Pseudomonas fluorescens
MTDQVLAEQRIGQNTEVTLHFALRLENGDTVDSTFDKAPATFKVGDGNLLPGFEAALFGFKAGDKRTLQILPENAFGQPNPQNVQIIPRSQFQNMDLSEGLLVIFNDAANTELPGVVKAFDDAQVTIDFNHPLAGKTLTFDVEIIDVKAL

SEQ ID NO: 6804 - DNA, 591 bp, Escherichia coli O157
  CDS (1)..(591): transl_table=11
atgaaagtagcaaaagacctggtggtcagcctggcctatcaggtacgtacagaagacggtgtgttggttgatgagtctccggtgagtgcgccgctggactacctgcatggtcacggttccctgatctctggcctggaaacggcgctggaaggtcatgaagttggcgacaaatttgatgtcgctgttggcgcgaacgacgcttacggtcagtacgacgaaaacctggtgcaacgtgttcctaaagacgtatttatgggcgttgatgaactgcaggtaggtatgcgtttcctggctgaaaccgaccagggtccggtaccggttgaaatcactgcggttgaagacgatcacgtcgtggttgatggtaaccacatgctggccggtcagaacctgaaattcaacgttgaagttgtggcgattcgcgaagcgaccgaagaagaactggctcatggccacgttcacggcgcgcacgatcatcaccacgatcacgaccacgacggttgctgcggcggtcatggccacgatcacggtcatgaacacggtggcgaaggctgctgtggcggtaaaggcaacggcggttgcggttgccactaa

SEQ ID NO: 6805 - protein, 196 aa, Escherichia coli O157
MKVAKDLVVSLAYQVRTEDGVLVDESPVSAPLDYLHGHGSLISGLETALEGHEVGDKFDVAVGANDAYGQYDENLVQRVPKDVFMGVDELQVGMRFLAETDQGPVPVEITAVEDDHVVVDGNHMLAGQNLKFNVEVVAIREATEEELAHGHVHGAHDHHHDHDHDGCCGGHGHDHGHEHGGEGCCGGKGNGGCGCH

SEQ ID NO: 6806 - DNA, 20 bp, Artificial sequence
  primer
atgactgagctgcgcatcgg

SEQ ID NO: 6807 - DNA, 21 bp, Artificial sequence
  primer
tcagacggccctgacctcgag

SEQ ID NO: 6808 - protein, 150 aa, Artificial sequence
  consensus sequence
  Variant (2)..(10): Xaa in position 2 to 10 is any amino acid
  Variant (11)..(15): Xaa in position 11 to 15 is any or no amino acid
  Variant (17)..(23): Xaa in position 17 to 23 is any amino acid
  Variant (24)..(40): Xaa in position 24 to 40 is any or no amino acid
  Variant (42)..(46): Xaa in position 42 to 46 is any amino acid
  Variant (48)..(55): Xaa in position 48 to 55 is any amino acid
  Variant (56)..(56): Xaa in position 56 is any or no amino acid
  Variant (58)..(59): Xaa in position 58 to 59 is any amino acid
  Variant (61)..(61): Xaa in position 61 is any amino acid
  Variant (63)..(65): Xaa in position 63 to 65 is any amino acid
  Variant (66)..(66): Xaa in position 66 is any or no amino acid
  Variant (68)..(80): Xaa in position 68 to 80 is any amino acid
  Variant (82)..(93): Xaa in position 82 to 93 is any amino acid
  Variant (94)..(95): Xaa in position 94 to 95 is any or no amino acid
  Variant (97)..(128): Xaa in position 97 to 128 is any amino acid
  Variant (129)..(137): Xaa in position 129 to 137 is any or no amino acid
  Variant (139)..(139): Xaa in position 139 is any amino acid
  Variant (146)..(149): Xaa in position 146 to 149 is any amino acid
VXXXXXXXXXXXXXXGXXXXXXXXXXXXXXXXXXXXXXXXPXXXXXGXXXXXXXXXEXXLXGXXXXGXXXXXXXXXXXXXGXXXXXXXXXXXXXXFXXXXXXXXXXXXXXXXXXXXXXXXXXXXXXXXXXXXXXXXXDXNHPLAGXXXXF

SEQ ID NO: 6809 - protein, 20 aa, Artificial sequence
  protein pattern
  Variant (2)..(2): Xaa in position 2 is any amino acid
  Variant (7)..(7): Xaa in position 7 is Ala, Cys or Ser
  Variant (9)..(10): Xaa in position 9 to 10 is any amino acid
  Variant (11)..(11): Xaa in position 11 is Ile, Leu or Val
  Variant (12)..(16): Xaa in position 12 to 16 is any amino acid
  Variant (17)..(17): Xaa in position 17 is Ile, Leu or Val
  Variant (18)..(19): Xaa in position 18 to 19 is any amino acid
  Variant (20)..(20): Xaa in position 20 is Ile, Leu or Val
DXNHPLXGXXXXXXXXXXXX

SEQ ID NO: 6810 - DNA, 591 bp, Escherichia coli
  CDS (1)..(591): transl_table=11
atgaccgctttaaccccatttagtgccgcacctacagggcctcccagccccgcgccgcgcagcaaaccatgcccaagtacgctcattgctgcgtgggtgcgtaaaatgcgggtcagttggctggaaagcaaatgcgacacaccttttgccaataatttgtctttcatcagcagcggcagcagctcttccagctcattcaccctggcatcgaccgcgtgcagaaactcctgcttatgttcctcgtccattttcttccaggtattacgcagaaattgttccagtaactgttgctcaatttcaaacgtagacatctctttgtcggctttcagcttcaatcgctttgaaacatcgagcaaaatggcccgatacaatttaccgtgtccgcgcagtttgttggcgatactatcgccaccaaaatgctgtaattctccggcaatcagctgccagttgcggcgatgttgctcgggatgcccttccatcgatttaaacagttcgttgcgcatcagtacgctggagaggcgagttttgcctttttcattatgggtgagcaatcgggcgaaatttgccaactgttcctcactacaatgctaa

SEQ ID NO: 6811 - protein, 196 aa, Escherichia coli
MTALTPFSAAPTGPPSPAPRSKPCPSTLIAAWVRKMRVSWLESKCDTPFANNLSFISSGSSSSSSFTLASTACRNSCLCSSSIFFQVLRRNCSSNCCSISNVDISLSAFSFNRFETSSKMARYNLPCPRSLLAILSPPKCCNSPAISCQLRRCCSGCPSIDLNSSLRISTLERRVLPFSLWVSNRAKFANCSSLQC

SEQ ID NO: 6812 - DNA, 621 bp, Escherichia coli O157:H7 EDL933
  CDS (1)..(621): transl_table=11
ctgaccgctttaaccccatttagtgccgcgcctacagggcctcccagccccgcgccgcgcagcaaaccatgcccaagtacgctcattgctgcgtgggtgcgtaaaatgcgggtcagttggctggaaagcagatgcgacacgccttttgccaataatttgtctttcatcagcagcggcagcagctcttccagctcattcaccctggcatcgaccgcgtgcagaaactcctgcttatgttcctcgtccattttcttccaggtattacgcagaaattgttccagtaactgttgctcaatttcaaacgtagacatctctttgtcggctttcagcttcaatcgttttgaaacatcgagcaaaatggcccgatacaatttaccgtgtccgcgcagtttgttggcgatactatcgccaccaaaatgctgtaattctccagcaatcagctgccagttgcggcgatgttgctcgggatgtccttccatcgatttaaacagttcgttgcgcatcagtacgctggagaggcgagttttgcctttttcattatgggtgagcagccgggcgaaatttgctaactgttcctcactacaatgctggagaaaatccagatctgaatcattcaggtaa

SEQ ID NO: 6813 - protein, 206 aa, Escherichia coli O157:H7 EDL933
MTALTPFSAAPTGPPSPAPRSKPCPSTLIAAWVRKMRVSWLESRCDTPFANNLSFISSGSSSSSSFTLASTACRNSCLCSSSIFFQVLRRNCSSNCCSISNVDISLSAFSFNRFETSSKMARYNLPCPRSLLAILSPPKCCNSPAISCQLRRCCSGCPSIDLNSSLRISTLERRVLPFSLWVSSRAKFANCSSLQCWRKSRSESFR

SEQ ID NO: 6814 - DNA, 600 bp, Shigella flexneri 2a str. 2457T
  CDS (1)..(600): transl_table=11
gtgctgccgctgaccgctttaaccccatttaatgctgcgcccacagggcctcccagccccgcgccgcgcagcaaaccatgcccaagtacgctcattgctgcgtgggtgcgtaaaatgcgggtcagttggctggaaagcaaatgcgacacaccttttgccaataatttgtctttcatcagcagcggcagcagctcttccagctcattcaccctggcatcgaccgcgtgcagaaactcctgcttatgttcctcgtccattttcttccaggtattacgcagaaattgttccagtaactgttgctcaatttcaaacgtagacatctctttgtcggctttcagcttcaatcgctttgaaacatcgagcaaaatggcccgatacaatttaccgtgtccgcgcagtttgttggcgatactatcgccaccaaaatgctgtaattctccggcaatcagctgccagttgcggcgatgttgctcgggatgcccttccatcgatttaaacagttcgttgcgcatcagtatgctggagaggcgagttttgcctttttcattatgggtgagcaatcgggcgaaatttgccaactgttcctcactacaatgctga

SEQ ID NO: 6815 - protein, 199 aa, Shigella flexneri 2a str. 2457T
MLPLTALTPFNAAPTGPPSPAPRSKPCPSTLIAAWVRKMRVSWLESKCDTPFANNLSFISSGSSSSSSFTLASTACRNSCLCSSSIFFQVLRRNCSSNCCSISNVDISLSAFSFNRFETSSKMARYNLPCPRSLLAILSPPKCCNSPAISCQLRRCCSGCPSIDLNSSLRISMLERRVLPFSLWVSNRAKFANCSSLQC

SEQ ID NO: 6816 - DNA, 25 bp, Artificial sequence
  primer
atgaccgctttaaccccatttagtg

SEQ ID NO: 6817 - DNA, 26 bp, Artificial sequence
  primer
ttagcattgtagtgaggaacagttgg

SEQ ID NO: 6818 - DNA, 492 bp, Escherichia coli
  CDS (1)..(492): transl_table=11
atgcgccggatattatcagtcttactcgaaaatgaatcaggcgcgttatcccgcgtgattggccttttttcccagcgtggctacaacattgaaagcctgaccgttgcgccaaccgacgatccgacattatcgcgtatgaccatccagaccgtgggcgatgaaaaagtacttgagcagatcgaaaagcaattacacaaactggtcgatgtcttgcgcgtgagtgagttggggcagggcgcgcatgttgagcgggaaatcatgctggtgaaaattcaggccagcggttacgggcgtgacgaagtgaaacgtaatacggaaatattccgtgggcaaattatcgatgtcacaccctcgctttataccgttcaattagcaggcaccagcggtaagcttgatgcatttttagcatcgattcgcgatgtggcgaaaattgtggaggttgctcgctctggtgtggtcggactttcgcgcggcgataaaataatgcgttaa

SEQ ID NO: 6819 - protein, 163 aa, Escherichia coli
MRRILSVLLENESGALSRVIGLFSQRGYNIESLTVAPTDDPTLSRMTIQTVGDEKVLEQIEKQLHKLVDVLRVSELGQGAHVEREIMLVKIQASGYGRDEVKRNTEIFRGQIIDVTPSLYTVQLAGTSGKLDAFLASIRDVAKIVEVARSGVVGLSRGDKIMR

SEQ ID NO: 6820 - DNA, 543 bp, Bradyrhizobium sp. ORS278
  CDS (1)..(543): transl_table=11
atgaaccagccagcctccgcttacttcatcgaagagcgccacgatcccaacgagacccacacgctctcggtgctggtgcagaacgagcccggcgtgctcgcgcgcgtcatcgggctgttctcggggcgcggctacaacatcgagagcctcaccgtctccgagaccgagagccagaagcatctgtcgcgcatcaccatcgtgaccacgggcacgccgatggtgatccagcagatcaagcaccagctcgaccgcatggtgccggtctatcgcgtcgtcgacatgacgttgaccaagcgcgccatcgagcgtgagctcgcgatggtcaaggtgcgcggcaccggcgatccccgggtcgaggcgctgcggctggcggatgcgttccgcgcccgcgtcatcgacgccacgacggaaagctttgtgttcgagatcacaggcaacaccgacaagatcaatcagtttatcgatctgatgcgcccgctcggtctggtcgaagtcgccaggacgggcgtggcggcgatcgggcggggaccggaagggatgtga

SEQ ID NO: 6821 - protein, 180 aa, Bradyrhizobium sp. ORS278
MNQPASAYFIEERHDPNETHTLSVLVQNEPGVLARVIGLFSGRGYNIESLTVSETESQKHLSRITIVTTGTPMVIQQIKHQLDRMVPVYRVVDMTLTKRAIERELAMVKVRGTGDPRVEALRLADAFRARVIDATTESFVFEITGNTDKINQFIDLMRPLGLVEVARTGVAAIGRGPEGM

SEQ ID NO: 6822 - DNA, 1326 bp, Oryza sativa (japonica cultivar-group)
  CDS (1)..(1326)
atggctaccgccaccgccgcctcccgcctcgcggtggccggcgctgaacccgctcgcgcccggcgccaccgcccgacgacggtggcagtctgcgggggcgcgaggccgaggtcgcgccccgcggccgtcgttgccgccgccggcgccgccgctccctctccggccaccggcggcgtcgcgccggttccgccaagccccaggggctcgattataaagcgtcatacactatcagtttttgttggagatgaaagtgggatgattaatcgaattgctggagtttttgctagaagaggatacaacattgagtcattggcagttgggctgaacaaggacaaggcattatttacaatagtagtatctggaactgagaaaatactgaaacaggttgtagagcaactaaacaaacttgttaatgttatacaggttgacgatctgtcgaaggaaccacaagttgaaagagagctaatgcttataaaactaaatgttgagccagataagcgaccggaggtgatgggtttggttgacatcttcagagcaaaggtggttgacctttctgaccacacactaactattgaggtaactggagatcctggaaaaattgttgctgtacagaggaacctaagcaaatttggaatcaaagaaattgccagaactggcaagatagctttgcggcgtgagaaaatgggagaaagtgctcctttttggcggttctctgcagcttcctatcctgatcttgaagtggcaatgccatcaaaatctcatgtcaacactgcgatgaaaacagctaaccagaattctgaagaatcttcacaaggtgatgtctatccagtggagtcatatgaaaacttcacaacaaatcaaattcttgatgctcattggggtgtcatggctgacggtgatagtctggctgttggcccagctgaaaaagaaggcacttctcggatcactactgttgtccctggaactgatgagtctattgccaagctagtacaccaactgtataagctcattgatgtttatgaggtccaggatcttactcatttaccatttgctgctagagagttaatgatcataaagattgctgtaaacaccacagcccgcagggctatcctagatattgctgatattttccgggccaaaactgtggatgtatcagatcacaccgtaactcttcagcttactggagaccttgataaaatggtcgcattacaaaggatgctcgagccctatggcatttgtgaggttgcacgaactggcagggttgcgttgcgccgtgagtcaggagtcgattccaaatacctccgtgggttttcccttcctctgtag

SEQ ID NO: 6823 - protein, 441 aa, Oryza sativa (japonica cultivar-group)
MATATAASRLAVAGAEPARARRHRPTTVAVCGGARPRSRPAAVVAAAGAAAPSPATGGVAPVPPSPRGSIIKRHTLSVFVGDESGMINRIAGVFARRGYNIESLAVGLNKDKALFTIVVSGTEKILKQVVEQLNKLVNVIQVDDLSKEPQVERELMLIKLNVEPDKRPEVMGLVDIFRAKVVDLSDHTLTIEVTGDPGKIVAVQRNLSKFGIKEIARTGKIALRREKMGESAPFWRFSAASYPDLEVAMPSKSHVNTAMKTANQNSEESSQGDVYPVESYENFTTNQILDAHWGVMADGDSLAVGPAEKEGTSRITTVVPGTDESIAKLVHQLYKLIDVYEVQDLTHLPFAARELMIIKIAVNTTARRAILDIADIFRAKTVDVSDHTVTLQLTGDLDKMVALQRMLEPYGICEVARTGRVALRRESGVDSKYLRGFSLPL

SEQ ID NO: 6824 - DNA, 576 bp, Mesorhizobium loti MAFF303099
  CDS (1)..(576): transl_table=11
atgaacgcacagcaccttcaaccgaccggctccgcctacttcatcgccaaggaaacggagcggccggagatccacacgctttccgtgctggtcgacaacgagcccggcgtgctcgcccgggtcatcggcctgttctccggacgcggctacaacatcgagagcctgaccgtttccgagacggagcatgagaagcacctgtcgcgcatcaccatcgtgacgcgcggcacgccgcatgtgatggagcagatcaagaaccagctcgagcgcatcgtgccggtccatcgtgtggtcgatctgactgtccgctcgcacgagcttgggcaggagcggcccttggagcgggaactggcgctggtcaaggtggccggctccggcgaggctcgcgtcgaggcgctgcggctggccgacgcttttcgcgccagcgtcatcgacgccaacaccgagcatttcatcttcgagatcaccggcaagggctccaagctcgaccagttcatcgccatcatgaagccgctcggcctggtcgagatctgccgcaccggcgtggcggccatgaaccgcggcccgcagggcatgtag

SEQ ID NO: 6825 - protein, 191 aa, Mesorhizobium loti MAFF303099
MNAQHLQPTGSAYFIAKETERPEIHTLSVLVDNEPGVLARVIGLFSGRGYNIESLTVSETEHEKHLSRITIVTRGTPHVMEQIKNQLERIVPVHRVVDLTVRSHELGQERPLERELALVKVAGSGEARVEALRLADAFRASVIDANTEHFIFEITGKGSKLDQFIAIMKPLGLVEICRTGVAAMNRGPQGM

SEQ ID NO: 6826 - DNA, 522 bp, Bacillus halodurans C-125
  CDS (1)..(522): transl_table=11
atgaaacgaacgatcacagctcttgtgaacaacacatcaggggttttaaaccggatcacaggcttattcgcaagacgtcatttcaacattgagagtattacggtcggggtgacagaaaatccgacagtgtcacgaatgacgttcgtcgtcatcgttgataaccaaaaaaacattgagcaagtcatcaagcagcttcacaagcaagttgatgtcttgaaagtaaaagacattaccgatgaggcgattgtggcgagggagctagctttaatcaaggtcgttgcctcaccccaacagcggggagaaatcgcagcagtcgtcaatccgttccgcgcctccattatcgacattggtagggagagcatgaccgtccaaattacaggcgatcatcaaaaggtcgaaacatttattgacttacttagaccgtatggaattaaggaacttgctagaacagggataacggccttcaaacgagggtcgaaaaaatacgatgtggaaggtaaccacatcactctcattaattaa

SEQ ID NO: 6827 - protein, 173 aa, Bacillus halodurans C-125
MKRTITALVNNTSGVLNRITGLFARRHFNIESITVGVTENPTVSRMTFVVIVDNQKNIEQVIKQLHKQVDVLKVKDITDEAIVARELALIKVVASPQQRGEIAAVVNPFRASIIDIGRESMTVQITGDHQKVETFIDLLRPYGIKELARTGITAFKRGSKKYDVEGNHITLIN

SEQ ID NO: 6828 - DNA, 492 bp, Pasteurella multocida subsp. multocida str. Pm70
  CDS (1)..(492): transl_table=11
atgcgtagaattttatcagtattattagaaaatgaatcgggagcattatctcgtgtggtaggcttattttcacaacgtgcattcaatatagaaagcttaactgttgcccccactgatgatcctacattatctcgtatgacaatcgaagcttatggagatgagcaagtactcgaacaaatcgagaagcagctacataaattagttgatatttttaaagtgatcagtttaagcgactgtgaccatgttgagcgtgaagtcttactgattaaagtgagagcgcaaggcgcatcacgtgatgaactaaaacgtttaacagatatttaccgaggtcagattgtggatgtgacaacgaaatcctataccattcagttgacggggacgaaagataaactagatgcgtttatttcagcagtgaaagaggaaacgacgatcattgagattgtacgttctggtctaatcagtttatctcgtggagaaaaaaattgtttataa

SEQ ID NO: 6829 - protein, 163 aa, Pasteurella multocida subsp. multocida str. Pm70
MRRILSVLLENESGALSRVVGLFSQRAFNIESLTVAPTDDPTLSRMTIEAYGDEQVLEQIEKQLHKLVDIFKVISLSDCDHVEREVLLIKVRAQGASRDELKRLTDIYRGQIVDVTTKSYTIQLTGTKDKLDAFISAVKEETTIIEIVRSGLISLSRGEKNCL

SEQ ID NO: 6830 - DNA, 465 bp, Campylobacter jejuni subsp. jejuni NCTC 11168
  CDS (1)..(465): transl_table=11
atgagaagggttttatcggtaattgttttaaatgagcatggggttttatctcgtatagtaggacttttttcaggaagaggttataatattgactcgcttacagtagcacctttggaaaataaagaattttctcgtattaatatagtcacttcaggaaatgaaagaacttttgagcagatagtcaaacaacttcataagctcattcctacttataaagtgatagaaagtgaagaatttattgacaaagaaatggctttagtgaaaattcctttaaatgaaaatttaggtggacttgatgccgttttgaaagcttataatggtactattgcaaatagcaatgagaattttttgtttttaatggttgctgatgatgcaaatcgcattgataattttttaaaaacaattaaaaaatacaatcctagtgatatagttcgcagtggatctgttttgatggagattaaatga

SEQ ID NO: 6831 - protein, 154 aa, Campylobacter jejuni subsp. jejuni NCTC 11168
MRRVLSVIVLNEHGVLSRIVGLFSGRGYNIDSLTVAPLENKEFSRINIVTSGNERTFEQIVKQLHKLIPTYKVIESEEFIDKEMALVKIPLNENLGGLDAVLKAYNGTIANSNENFLFLMVADDANRIDNFLKTIKKYNPSDIVRSGSVLMEIK

SEQ ID NO: 6832 - DNA, 492 bp, Escherichia coli O157:H7 EDL933
  CDS (1)..(492): transl_table=11
atgcgccggatattatcagtcttactcgaaaatgaatcaggcgcgttatcccgcgtgattggccttttttcccagcgtggctacaacattgaaagcctgaccgttgcgccaaccgacgatccgacattatcgcgtatgaccatccagaccgtgggcgatgaaaaagtgcttgagcagatcgaaaagcaattatacaagctggtcgatgtcttgcgcgtgagtgagttggggcagggcgcgcatgttgagagggaaatcatgctggtgaaaattcaggccagcggttacgggcgtgacgaagttaaacgtaatacggaaatattccgtgggcaaattattgatgtcacaccctcgctttataccgttcaattagcaggcaccagcgataagcttgatgcatttttagcatcgattcgcgatgtggcgaaaattgtggaagttgctcgctctggtgtggtcggactttcgcgcggcgataaaataatgcgttga

SEQ ID NO: 6833 - protein, 163 aa, Escherichia coli O157:H7 EDL933
MRRILSVLLENESGALSRVIGLFSQRGYNIESLTVAPTDDPTLSRMTIQTVGDEKVLEQIEKQLYKLVDVLRVSELGQGAHVEREIMLVKIQASGYGRDEVKRNTEIFRGQIIDVTPSLYTVQLAGTSDKLDAFLASIRDVAKIVEVARSGVVGLSRGDKIMR

SEQ ID NO: 6834 - DNA, 573 bp, Agrobacterium tumefaciens str. C58
  CDS (1)..(573): transl_table=11
atgaacgcacacctacaacccaccggctccgcctatttcatccagaaggaaacggctgccgttgaaaatcacacgctgtcggttctcgtcagcaacgagccgggcgttctcgcccgggtcatcggcctgttttccggccgtggctacaacatcgaaagcctgacggtttcggaaacggaacatgaggcgcatctgtcgcgcatcaccatcgtcacacggggtacgcccatcgtgctggagcagatcaaggcgcagctggaacgcatcgtgccggtgcaccgggttctggaccttaccgtccgtgcccgtgaactgggacaggaacggccgatcgagcgcgaagtggcgctcatcaaggttgccggcacgggcgaagtccgtgccgaggcgctgcggcttgccgatgcgtttcaggccaaggtggtagatgccacggtggagcatttcatcttcgagatcaccggcaagtcatccaagatcgaccagttcgtggcgatcatcaagccgctcggcctgatcgaaatctgccgcacgggcattgccgccatgaaccgcggttcgcagggcatgtaa

SEQ ID NO: 6835 - protein, 190 aa, Agrobacterium tumefaciens str. C58
MNAHLQPTGSAYFIQKETAAVENHTLSVLVSNEPGVLARVIGLFSGRGYNIESLTVSETEHEAHLSRITIVTRGTPIVLEQIKAQLERIVPVHRVLDLTVRARELGQERPIEREVALIKVAGTGEVRAEALRLADAFQAKVVDATVEHFIFEITGKSSKIDQFVAIIKPLGLIEICRTGIAAMNRGSQGM

SEQ ID NO: 6836 - DNA, 573 bp, Sinorhizobium meliloti 1021
  CDS (1)..(573): transl_table=11
atgaatgcacatcttcagccgacgggctccgcctacttcatcgccaaggaaacggagcttgcggaaacgcacacgctttccgttctggtcgacaacgagccgggcgtgctcgcccgcgtcatcggccttttttccggtcgcggctacaatatcgagagcctgacggtctccgagacggagcacgaggctcatctgtcgcgcatcaccatcgtgacccgcggcacgccgcacgtgctcgagcagatcaagaaccagctcgaacgccttgttccggtgcaccgggtcgtggatctcacggtccgcgccgccggcctcggccatgagcggccgatcgagcgtgaactggcgctcgtcaaggtacacggctcgggcgaacatcgggtggaggcgctcaggctcgccgacgccttccgcgcctcggtcatcgacgccaatatcgatcacttcgtcttcgagatcaccggcaagccttccaagatcgagcagttcatcgccatcatgaagccgctcgggctgatcgaagtctgccgcaccggcatcgccgcgatgaaccgcgggccccaggggatgtaa

SEQ ID NO: 6837 - protein, 190 aa, Sinorhizobium meliloti 1021
MNAHLQPTGSAYFIAKETELAETHTLSVLVDNEPGVLARVIGLFSGRGYNIESLTVSETEHEAHLSRITIVTRGTPHVLEQIKNQLERLVPVHRVVDLTVRAAGLGHERPIERELALVKVHGSGEHRVEALRLADAFRASVIDANIDHFVFEITGKPSKIEQFIAIMKPLGLIEVCRTGIAAMNRGPQGM

SEQ ID NO: 6838 - DNA, 495 bp, Yersinia pestis CO92
  CDS (1)..(495): transl_table=11
atgcgccgccggattttatcagtactgctggaaaatgagtcaggtgcactctcacgggtggtggggctgttttctcagcgtggctataatatcgaaagcctgacggtcgcgccaaccgatgacccaacgctttcccgcatgaccatccagaccgtgggtgatgccaaggttctggagcagattgaaaagcagctgcacaagttggtggacgtcttacgtgtcagtgagttggtttctggctcacatgttgagcgcgaaatcatgttggtgaagttgcaagccagtggttatggccgtgaagaggtgaagcgttgtgcagaaatcttccgtgggcaaattgtggatgtgaccgcaacgctctataccgttcagctagcgggtactagcgagaagctggatgcgtttttgaatgcggtgcgtgaagtcgctgaaatagtggaagttgctcgctctgggattgtcggcgtatcgcgtggtgacaaaatcatgcgttaa

SEQ ID NO: 6839 - protein, 164 aa, Yersinia pestis CO92
MRRRILSVLLENESGALSRVVGLFSQRGYNIESLTVAPTDDPTLSRMTIQTVGDAKVLEQIEKQLHKLVDVLRVSELVSGSHVEREIMLVKLQASGYGREEVKRCAEIFRGQIVDVTATLYTVQLAGTSEKLDAFLNAVREVAEIVEVARSGIVGVSRGDKIMR

SEQ ID NO: 6840 - DNA, 558 bp, Caulobacter crescentus CB15
  CDS (1)..(558): transl_table=11
atgaccgccaacgtgcaacccgctcccgcctcggcctacgaccttagccccaaggaccaggccgaacagtccgccaccttcgccctcctcgtcgacaacgagcccggcgtcctgcatcgcgtggtcggcctgttcgccgcgcggggctacaatatcgagagcctcaccgtcgccgagacggaccgcaaggcgcacaccagccgtatcaccgtggtgacccgcggcacccgccatgtgctggaccagatcgaggcccagctaaacaaggtggtcaatgtccgccgcgtccacgacgtgacccgcgatccgaacggcgtcgagcgcgagctggccctggtgaaggtgcgcggctctggcgtcgatcgcctggaagcgctgcggatcgccgagatcttccgcgccaagccggtcgacaccacccttgagagcttcgtcttcgagatctccggtgcgccgtccaagatcgacaagttcctcgacctgatgcgccccctgggcctggtggagctgtcccgtacgggcgttctctccatcgagcgcggcttcgaaggcatgtag

SEQ ID NO: 6841 - protein, 185 aa, Caulobacter crescentus CB15
MTANVQPAPASAYDLSPKDQAEQSATFALLVDNEPGVLHRVVGLFAARGYNIESLTVAETDRKAHTSRITVVTRGTRHVLDQIEAQLNKVVNVRRVHDVTRDPNGVERELALVKVRGSGVDRLEALRIAEIFRAKPVDTTLESFVFEISGAPSKIDKFLDLMRPLGLVELSRTGVLSIERGFEGM

SEQ ID NO: 6842 - DNA, 492 bp, Listeria innocua Clip11262
  CDS (1)..(492): transl_table=11
atgcgccgaatcattactgctacagtgaataactcatctggcgtactaaatcgtatcactggggttatctccagacgccaatataatatcgatagtatctctgttggctggaccgaaatcccgaatgtttctcggattaccatcgtcgtccatgtcgactcactatacgaaattgaacaagtaaccaaacagcttaacaaacaaatcgatgtgctcaaagtaagtgatattactgacgatgcgcacatcgaacgcgaactagctttactcaaaatcaactcccccgctgctttacgttctgagctaaacgcagtaatcgaaccatttcgcgccaccgtcattgatgtcggtactaaaaatgtcgtcattcaagtaactggtacaagcgaaaaaattgatgctttcgttgatacagttcgaccatatggcattaaacaaatggctagaacaggtgtaactggctttacaagaagtcctaaaaaaatgggctga

SEQ ID NO: 6843 - protein, 163 aa, Listeria innocua Clip11262
MRRIITATVNNSSGVLNRITGVISRRQYNIDSISVGWTEIPNVSRITIVVHVDSLYEIEQVTKQLNKQIDVLKVSDITDDAHIERELALLKINSPAALRSELNAVIEPFRATVIDVGTKNVVIQVTGTSEKIDAFVDTVRPYGIKQMARTGVTGFTRSPKKMG

SEQ ID NO: 6844 - DNA, 870 bp, Schizosaccharomyces pombe 972h-
  CDS (1)..(870)
atgttcgcaagaagatgcggccgtttggccaatcgctttgttcgattgaaatcaacctctgccacttctcccatcacatacaaggcgttgcatgcgaattcccccttgcctcgttgtaggatcattgagcctcctagggctactgttccagaggctgtttctaatattataatgtcaacccccttcaaccgtgtgcaaagacccaaacgccatgtcttcaattgcttagtacagaatgagcctggtgttttatcccgtctttctggtattttggccgctcgtggatttaacattgattccttggttgtttgcgcaactgaggtagagaatctttctaggatgacgattgttcttcgaggagctgatgaagtcgttgagcaggcaaaacgtcagattgaagatatcgtatctgtttgggcagtcttggattacaccggtaccagcatggtcgagcgtgagcttcttcttgcaaaagtttcgcttttgggccctgatcacttccaagagcattttgagagaagtgagaaagttgccgagtctaccaatgctaaagctaaaagtgatggtgagggtgtcatgaatgcgaatgctgctttacaacttcgtgccagtcaattggctgctatcaatcaacttactactctctttcatggtcgtgtagctgatatttctacggagactattattcttgagttgactgctactcctgatcgtgttgataactttctttctttgttgcgtccctatggtgtcttggaagcatgccgtactggtacatctgcgatgactcgcgcaccccattctaacgaagttactgaagaagctgaggacgatgttgaagttgaagaggttttccttcctcctggataa

SEQ ID NO: 6845 - protein, 289 aa, Schizosaccharomyces pombe 972h-
MFARRCGRLANRFVRLKSTSATSPITYKALHANSPLPRCRIIEPPRATVPEAVSNIIMSTPFNRVQRPKRHVFNCLVQNEPGVLSRLSGILAARGFNIDSLVVCATEVENLSRMTIVLRGADEVVEQAKRQIEDIVSVWAVLDYTGTSMVERELLLAKVSLLGPDHFQEHFERSEKVAESTNAKAKSDGEGVMNANAALQLRASQLAAINQLTTLFHGRVADISTETIILELTATPDRVDNFLSLLRPYGVLEACRTGTSAMTRAPHSNEVTEEAEDDVEVEEVFLPPG

SEQ ID NO: 6846 - DNA, 519 bp, Corynebacterium glutamicum ATCC 13032
  CDS (1)..(519): transl_table=11
atggctaattctgacgtcacccgccacatcctgtccgtactcgttcaggacgtagacggaatcatttcccgcgtatcaggtatgttcacccgacgcgcattcaacctcgtgtccctcgtgtctgcaaagaccgaaacacacggcatcaaccgcatcacggttgttgtcgacgccgacgagctcaacattgagcagatcaccaagcagctcaacaagctgatccccgtgctcaaagtcgtgcgacttgatgaagagaccactatcgcccgcgcaatcatgctggttaaggtctctgcggacagcaccaaccgtccgcagatcgtcgacgccgcgaacatcttccgcgcccgagtcgtcgacgtggctccagactctgtggttattgaatccacaggcaccccaggcaagctccgcgcactgcttgacgtgatggaaccattcggaatccgcgaactgatccaatccggacagattgcactcaaccgcggtccgaagaccatggctccggccaagatctaa

SEQ ID NO: 6847 - protein, 172 aa, Corynebacterium glutamicum ATCC 13032
MANSDVTRHILSVLVQDVDGIISRVSGMFTRRAFNLVSLVSAKTETHGINRITVVVDADELNIEQITKQLNKLIPVLKVVRLDEETTIARAIMLVKVSADSTNRPQIVDAANIFRARVVDVAPDSVVIESTGTPGKLRALLDVMEPFGIRELIQSGQIALNRGPKTMAPAKI

SEQ ID NO: 6848 - DNA, 525 bp, Streptomyces coelicolor A3(2)
  CDS (1)..(525): transl_table=11
atgtccaagcacacgctctccgtcctggtggagaacacccccggcgtcctggcgcggatcaccgccctcttctcccgccgcggcttcaacatcgactcgctcgccgtcggcgtcaccgagcaccccgacatctcccgcatcaccatcgtggtgagcgtcgaggacttcccgctggagcaggtcaccaagcagctcaacaagctggtgaacgtgctcaagatcgtcgagctggagcccacccaggccgtccagcgcgaactcgttctggtgaaggtgcgctccgacaacgagacgcgctcccagatcgtcgagatcgtccagctgttccgcgccaagacggtcgacgtctccccggaggccgtcaccatcgaggccaccggcagcagcgacaagctgaccgccatgctccggatgctggaaccgtacggcatcaaggagctcgtccagtccggcacgatcgccatcggccgcggcgcccgttcgatcacggaccgctcgctgcgcgcactcgaccggtccgcgtaa

SEQ ID NO: 6849 - protein, 174 aa, Streptomyces coelicolor A3(2)
MSKHTLSVLVENTPGVLARITALFSRRGFNIDSLAVGVTEHPDISRITIVVSVEDFPLEQVTKQLNKLVNVLKIVELEPTQAVQRELVLVKVRSDNETRSQIVEIVQLFRAKTVDVSPEAVTIEATGSSDKLTAMLRMLEPYGIKELVQSGTIAIGRGARSITDRSLRALDRSA

SEQ ID NO: 6850 - DNA, 525 bp, Yersinia pestis KIM
  CDS (1)..(525): transl_table=11
gtggctaagcaaaacggagaggacttaattatgcgccgccggattttatcagtactgctggaaaatgagtcaggtgcactctcacgggtggtggggctgttttctcagcgtggctataatatcgaaagcctgacggtcgcgccaaccgatgacccaacgctttcccgcatgaccatccagaccgtgggtgatgccaaggttctggagcagattgaaaagcagctgcacaagttggtggacgtcttacgtgtcagtgagttggtttctggctcacatgttgagcgcgaaatcatgttggtgaagttgcaagccagtggttatggccgtgaagaggtgaagcgttgtgcagaaatcttccgtgggcaaattgtggatgtgaccgcaacgctctataccgttcagctagcgggtactagcgagaagctggatgcgtttttgaatgcggtgcgtgaagtcgctgaaatagtggaagttgctcgctctgggattgtcggcgtatcgcgtggtgacaaaatcatgcgttaa

SEQ ID NO: 6851 - protein, 174 aa, Yersinia pestis KIM
MAKQNGEDLIMRRRILSVLLENESGALSRVVGLFSQRGYNIESLTVAPTDDPTLSRMTIQTVGDAKVLEQIEKQLHKLVDVLRVSELVSGSHVEREIMLVKLQASGYGREEVKRCAEIFRGQIVDVTATLYTVQLAGTSEKLDAFLNAVREVAEIVEVARSGIVGVSRGDKIMR

SEQ ID NO: 6852 - DNA, 519 bp, Thermosynechococcus elongatus BP-1
  CDS (1)..(519): transl_table=11
atgaaacataccctatcggttttggtggaagatgaggcgggtgtgctcactcgcattgccggtctatttgcgcggcgtggctttaacatcgagagcttggcggtaggacctgcggagcaaattggcatctcccgtattacgatggtggtgcctggagatgatgctgtcattgagcagttgaccaagcaactctacaagctgatcaatgtcctcaaggtgcaggatattaccacaattccctgtgtagaacgggagctgatgctcctgaaggtgaatgccactgccagcacccgctctgaaatcttggaattggtgcaaattttccgcgctaaggtcgtggatgtgtccgacgattcgctcatcatcgaggtctccggtgaccctggcaaaatggttgccctagtgcaaatgctgaataaatttgggattcgcgaaattgcccgcaccggtaaaattgcccttgtgcgcgagtccggggtgaatacagaatacctcaagtctttggaagcacgggtctaa

SEQ ID NO: 6853 - protein, 172 aa, Thermosynechococcus elongatus BP-1
MKHTLSVLVEDEAGVLTRIAGLFARRGFNIESLAVGPAEQIGISRITMVVPGDDAVIEQLTKQLYKLINVLKVQDITTIPCVERELMLLKVNATASTRSEILELVQIFRAKVVDVSDDSLIIEVSGDPGKMVALVQMLNKFGIREIARTGKIALVRESGVNTEYLKSLEARV

SEQ ID NO: 6854 - DNA, 555 bp, Bifidobacterium longum NCC2705
  CDS (1)..(555): transl_table=11
atggctaactatcctgcatcccagcctggttcccagcgtcatacgctgtccgtgctggtggagaaccgcccaggcgtgctggcgcgtatcgccggcctgttcgcccgccgtgcgttcaacatcaactcgctgtccgtctcccccaccgagcgtccggacatctctcgcgtcacggtgaccgccgacgtggaggccgtgccgctggagcagatcatcaagcagctcaacaagctgctgcatgtgctcaaaatcgtggaactcgacccgaactccaccgtggaacgcgaactggtgctcatcaaggtggccgccaacgaatccaaccgttccgacgtgctggagatcgtgcgtctgttccgcgtgcgcgtggtggacgtgaatccggaatcgctgaccattgaggccaccggtgccgaaggcaagatcgacgccctgctggggcttttggagcattacggtgtgattgagctggtgcgctccggtgccgtagccgtgacccgcggcccgcgcgccctgagcgaaaaggtcgtcggttccgaggttaccgggcgctga

SEQ ID NO: 6855 - protein, 184 aa, Bifidobacterium longum NCC2705
MANYPASQPGSQRHTLSVLVENRPGVLARIAGLFARRAFNINSLSVSPTERPDISRVTVTADVEAVPLEQIIKQLNKLLHVLKIVELDPNSTVERELVLIKVAANESNRSDVLEIVRLFRVRVVDVNPESLTIEATGAEGKIDALLGLLEHYGVIELVRSGAVAVTRGPRALSEKVVGSEVTGR

SEQ ID NO: 6856 - DNA, 492 bp, Shigella flexneri 2a str. 301
  CDS (1)..(492): transl_table=11
atgcgccggatattatcagtcttactcgaaaatgaatcaggcgcgttatcccgcgtgattggccttttttcccagcgaggctacaacattgaaagcctgaccgttgcgccaaccgacgatccgacattatcgcgtatgaccatccagaccgtgggcgatgaaaaagtacttgagcagatcgaaaagcaattacacaagctggtcgatgtcttgcgcgtgagtgagttggggcagggcgcgcatgttgagcgggaaatcatgctggtgaaaattcaggccagcggttacgggcgtgacgaagtgaaacgtaatacggaaatattccgtgggcaaattatcgatgtcaccccctcgctttataccgttcaattagcaggcaccagcgataagcttgatgcatttttagcatcgattcgcgatgtggcgaaaattgtggaagttgctcgctctggtgtggtcggactttcgcgcggcgataaaataatgcgttga

SEQ ID NO: 6857 - protein, 163 aa, Shigella flexneri 2a str. 301
MRRILSVLLENESGALSRVIGLFSQRGYNIESLTVAPTDDPTLSRMTIQTVGDEKVLEQIEKQLHKLVDVLRVSELGQGAHVEREIMLVKIQASGYGRDEVKRNTEIFRGQIIDVTPSLYTVQLAGTSDKLDAFLASIRDVAKIVEVARSGVVGLSRGDKIMR

SEQ ID NO: 6858 - DNA, 495 bp, Shewanella oneidensis MR-1
  CDS (1)..(495): transl_table=11
atgcgtcgaattatatctgtattactcgaaaaccaatccggcgccctatcccgagttgtcggcctattttcccagcgcggttataacattgaaagtttaaccgtggcgccgaccgatgataataccttgtcgcgccttaatatttcactggttgccgatgaaaaggtcctcgaacaaatcgaaaaacaactgcataagttggtcgatgttctcaaggtctcgaatgtgaccgagtcagcctatattgaacgcgaactcgcgctggtcaaagtccgtgcccaaggggagcttagggaagaaattaagcgcaccgccgatatcttccgtggtcagattgtcgatgtcaccgctaatctctacaccattcaattggttggcaccacagaaaagcttgatgcctttattcattcgatgggtgaagtgaccaaagtggttgaagtatcacgctctggtgtagtaggtctggcccgcggtgaaaaagcgatgaaagcctaa

SEQ ID NO: 6859 - protein, 164 aa, Shewanella oneidensis MR-1
MRRIISVLLENQSGALSRVVGLFSQRGYNIESLTVAPTDDNTLSRLNISLVADEKVLEQIEKQLHKLVDVLKVSNVTESAYIERELALVKVRAQGELREEIKRTADIFRGQIVDVTANLYTIQLVGTTEKLDAFIHSMGEVTKVVEVSRSGVVGLARGEKAMKA

SEQ ID NO: 6860 - DNA, 495 bp, Vibrio parahaemolyticus RIMD 2210633
  CDS (1)..(495): transl_table=11
atgagacacattatttcattgctattggaaaaccaaccgggtgcgttgtctcgtgttgtcggcttgttctctcaacgtggttacaacattgaatcattgaccgtatcgccgacggatgacgaaacgttatcgcgtttgaacatcacaaccacatcggatgaaatgcagctggagcaaatccagaaacagctacacaagttgattgatgtactgaaagtgcaagaagttactgagtttgaacacattgaacgtgaactgatgatggtgaaagtgaaagccagtggttttgctcgagcggaagtgaaacgtacggcagatattttccgtggacagattgtggatgtcaccgcttctcagtacacagtgcagcttgctggcaccagtgaaaagctcgacgcgttcatccaagccatctccgaagtcaccgaagtggtcgaagtcgcacgtagcggggtagtgggtattgcccgtggagaacgagcgttaaagccttaa

SEQ ID NO: 6861 - protein, 164 aa, Vibrio parahaemolyticus RIMD 2210633
MRHIISLLLENQPGALSRVVGLFSQRGYNIESLTVSPTDDETLSRLNITTTSDEMQLEQIQKQLHKLIDVLKVQEVTEFEHIERELMMVKVKASGFARAEVKRTADIFRGQIVDVTASQYTVQLAGTSEKLDAFIQAISEVTEVVEVARSGVVGIARGERALKP

SEQ ID NO: 6862 - DNA, 495 bp, Salmonella enterica subsp. enterica serovar Typhi Ty2
  CDS (1)..(495): transl_table=11
atgatgcgccggattttatcggtattactggaaaacgaatctggggcgttatcgcgggttatcggcctcttttcgcaacgcggatataatattgaaagcctgaccgttgcgccgacagacgatccgacgttgtcgcgcatgactatccagacggtaggcgatgaaaaagtgcttgagcaaattgaaaagcaactgcacaagctggttgatgtgctgcgcgtcagcgagctgggacagggagcgcacgttgagcgggaaatcatgctggtgaaaatccaggccagcggctacggacgggaagaggtgaagcgtaatacggaaattttccgtggtcagattattgacgttacgccaacgttgtataccgttcaactggcgggcaccagcgataaactggatgcttttctggcctcgctgcgcgatgtggcgaaaattgttgaagtggcgcgttcaggcgtcgtcgggctttcgcgcggcgataaggttatgcgctga

SEQ ID NO: 6863 - protein, 164 aa, Salmonella enterica subsp. enterica serovar Typhi Ty2
MMRRILSVLLENESGALSRVIGLFSQRGYNIESLTVAPTDDPTLSRMTIQTVGDEKVLEQIEKQLHKLVDVLRVSELGQGAHVEREIMLVKIQASGYGREEVKRNTEIFRGQIIDVTPTLYTVQLAGTSDKLDAFLASLRDVAKIVEVARSGVVGLSRGDKVMR

SEQ ID NO: 6864 - DNA, 528 bp, Streptomyces avermitilis MA-4680
  CDS (1)..(528): transl_table=11
atgagcaagcacaccctctccgtcctcgtcgagaacaagcccggtgtcctcgcccggatcaccgccctgttctcccggcgcggcttcaacatcgactcgctcgccgtcggtgtcaccgagcaccccgacatctcccgcatcaccatcgtggtgaacgtgatcgaggcactgccgctcgaacaggtcaccaaacagctcaacaagctcgtcaacgtcctgaagatcgtcgagctggagccgtccgcggccgtgcagcgcgaactcgttctggtgaaggtgcgcgccgacaacgagacgcgctcccagatcgtcgagatcgtccagctgttccgcgccaagaccgtggacgtctccccggaggccgtcaccatcgaggccaccggcggcagcgacaagctggaggccatgctcaagatgctggagccgttcggcatcaaggagctcgtccagtccggaacgatcgcgatcggacgtggggcacgttcgatcacggaccgctcgctgcgcgcgctggaccgatccgcgtaa

SEQ ID NO: 6865 - protein, 175 aa, Streptomyces avermitilis MA-4680
MSKHTLSVLVENKPGVLARITALFSRRGFNIDSLAVGVTEHPDISRITIVVNVIEALPLEQVTKQLNKLVNVLKIVELEPSAAVQRELVLVKVRADNETRSQIVEIVQLFRAKTVDVSPEAVTIEATGGSDKLEAMLKMLEPFGIKELVQSGTIAIGRGARSITDRSLRALDRSA

SEQ ID NO: 6866 - DNA, 492 bp, Nitrosomonas europaea ATCC 19718
  CDS (1)..(492): transl_table=11
atgcgacatattatttctttgttaatggaaaacgaggccggtgccctgtcgcgggtggcaggcctgttttctgctcgtggttacaatattgagtctctgtctgtcgcgcctactgaagatccgacattgtcccgtatgacgctggtcaccaatgggccggatgaaatcgtcgaacagatcaccaaacagctcaataaactgattgaagtcgtcaaactgattgatttgagcagtgaaggttatgtcgagcgggaactcatgctggtaaaagtaagggcggtgggtaaggatcgtgaggagatgaagcggcttgctgatatatttcgaggcaatatcatcgacgttaccaacgagctctacacaatcgagcttacgggaacccggtcgaaactggatggttttttgcaggcagtagattgcaatctgattctggaaatagccagaacaggtgtttcgggtctcagccgtggagaacgggttttaaagctgtaa

SEQ ID NO: 6867 - protein, 163 aa, Nitrosomonas europaea ATCC 19718
MRHIISLLMENEAGALSRVAGLFSARGYNIESLSVAPTEDPTLSRMTLVTNGPDEIVEQITKQLNKLIEVVKLIDLSSEGYVERELMLVKVRAVGKDREEMKRLADIFRGNIIDVTNELYTIELTGTRSKLDGFLQAVDCNLILEIARTGVSGLSRGERVLKL

SEQ ID NO: 6868 - DNA, 1476 bp, Arabidopsis thaliana
  CDS (1)..(1476)
atggcggccatttctgtaagttcttcaccatctattcgctgcttgagatcggcatgttccgattcttctcctgctcttgtatcctcgacgcgtgtatcgttcccggcgaagatttcatatctctccggtatatcttcgcaccgtggcgatgaaatgggtaagagaatggaaggattcgttagaagcgtcgatgggaagatctctgatgcgtctttctccgaagcttcatctgcgactccaaaatcgaaggtgaggaagcacacaatttcagtatttgttggagacgaaagcggaatgattaataggattgcaggagtgtttgcaaggagaggatacaatattgagagtcttgctgttggtctgaacagagacaaggctctattcaccatagttgtctgtggaactgaaagggtacttcagcaggtcatcgagcaactccagaagctcgttaatgttctaaaggttgaagatatctcaagtgagccgcaagtggagcgtgagctgatgcttgtaaaagtgaatgcacatccagaatccagggcagagatcatgtggctagttgacacattcagagcaagagttgtagatatagcggaacatgcattgactatcgaggtaactggagatcctggaaaaatgattgctgtagaaagaaatttgaaaaagtttcagatcagagagattgtaaggacaggaaagatagcactgagaagggaaaagatgggtgcaactgctccattttggcgattttcagcagcatcctatccagatctcaaggagcaagcgcctgttagtgttcttcgaagtagcaaaaaaggagccattgtccctcaaaaggaaacatcagcagggggagatgtttatcccgttgagccattttttgaccccaaggtacatcgtattctcgacgctcactggggacttctcactgacgaagatacgagtggactacggtcgcatactctatcattgcttgtaaatgatattccaggagttcttaatattgtgactggtgttttcgctcgaaggggatacaatatccagagcttggccgtaggacatgctgaaaccaagggcatttcacgcattacaacagttatacctgcaacagatgaatcggtcagcaaattggtgcagcaactttacaaactcgtagatgtgcatgaggtccatgatcttactcatttgccattttctgaaagagaactgatgctgattaagattgccgtgaacgctgctgctagaagagatgtcctggacattgctagtattttcagggctaaagctgttgacgtatctgatcacacaattactttgcagcttactggggatctagacaagatggttgcactgcaaaggttattggagccctatggtatatgtgaggttgcaagaaccggtcgtgtggcattggctcgtgaatcgggagtggactccaagtaccttcgtggatactcctttcctttaacaggctaa

SEQ ID NO: 6869 - protein, 491 aa, Arabidopsis thaliana
MAAISVSSSPSIRCLRSACSDSSPALVSSTRVSFPAKISYLSGISSHRGDEMGKRMEGFVRSVDGKISDASFSEASSATPKSKVRKHTISVFVGDESGMINRIAGVFARRGYNIESLAVGLNRDKALFTIVVCGTERVLQQVIEQLQKLVNVLKVEDISSEPQVERELMLVKVNAHPESRAEIMWLVDTFRARVVDIAEHALTIEVTGDPGKMIAVERNLKKFQIREIVRTGKIALRREKMGATAPFWRFSAASYPDLKEQAPVSVLRSSKKGAIVPQKETSAGGDVYPVEPFFDPKVHRILDAHWGLLTDEDTSGLRSHTLSLLVNDIPGVLNIVTGVFARRGYNIQSLAVGHAETKGISRITTVIPATDESVSKLVQQLYKLVDVHEVHDLTHLPFSERELMLIKIAVNAAARRDVLDIASIFRAKAVDVSDHTITLQLTGDLDKMVALQRLLEPYGICEVARTGRVALARESGVDSKYLRGYSFPLTG

SEQ ID NO: 6870 - DNA, 1266 bp, Arabidopsis thaliana
  CDS (1)..(1266)
atgaaatgggtaagagaatggaaggattcgttagaagcgtcgatgggaagatctctgatgcgtctttctccgaagcttcatctgcgactccaaaatcgaagagtgtttgcaaggagaggatacaatattgagagtcttgctgttggtctgaacagagacaaggctctattcaccatagttgtctgtggaactgaaagggtacttcagcaggtcatcgagcaactccagaagctcgttaatgttctaaaggttgaagatatctcaagtgagccgcaagtggagcgtgagctgatgcttgtaaaagtgaatgcacatccagaatccagggcagagatcatgtggctagttgacacattcagagcaagagttgtagatatagcggaacatgcattgactatcgaggtaactggagatcctggaaaaatgattgctgtagaaagaaatttgaaaaagtttcagatcagagagattgtaaggacaggaaagatagcactgagaagggaaaagatgggtgcaactgctccattttggcgattttcagcagcatcctatccagatctcaaggagcaagcgcctgttagtgttcttcgaagtagcaaaaaaggagccattgtccctcaaaaggaaacatcagcagggggagatgtttatcccgttgagccattttttgaccccaaggtacatcgtattctcgacgctcactggggacttctcactgacgaagatacgagtggactacggtcgcatactctatcattgcttgtaaatgatattccaggagttcttaatattgtgactggtgttttcgctcgaaggggatacaatatccaggcatacttggccgtaggacatgctgaaaccaagggcatttcacgcattacaacagttatacctgcaacagatgaatcggtcagcaaattggtgcagcaactttacaaactcgtagatgtgcatgaggtccatgatcttactcatttgccattttctgaaagagaactgatgctgattaagattgccgtgaacgctgctgctagaagagatgtcctggacattgctagtattttcagggctaaagctgttgacgtatctgatcacacaattactttgcagcttactggggatctagacaagatggttgcactgcaaaggttattggagccctatggtatatgtgaggttgcaagaaccggtcgtgtggcattggctcgtgaatcgggagtggactccaagtaccttcgtggatactcctttcctttaacaggctaa

SEQ ID NO: 6871 - protein, 421 aa, Arabidopsis thaliana
MKWVREWKDSLEASMGRSLMRLSPKLHLRLQNRRVFARRGYNIESLAVGLNRDKALFTIVVCGTERVLQQVIEQLQKLVNVLKVEDISSEPQVERELMLVKVNAHPESRAEIMWLVDTFRARVVDIAEHALTIEVTGDPGKMIAVERNLKKFQIREIVRTGKIALRREKMGATAPFWRFSAASYPDLKEQAPVSVLRSSKKGAIVPQKETSAGGDVYPVEPFFDPKVHRILDAHWGLLTDEDTSGLRSHTLSLLVNDIPGVLNIVTGVFARRGYNIQAYLAVGHAETKGISRITTVIPATDESVSKLVQQLYKLVDVHEVHDLTHLPFSERELMLIKIAVNAAARRDVLDIASIFRAKAVDVSDHTITLQLTGDLDKMVALQRLLEPYGICEVARTGRVALARESGVDSKYLRGYSFPLTG

SEQ ID NO: 6872 - DNA, 1410 bp, Arabidopsis thaliana
  CDS (1)..(1410)
atggcggccatttctgtaagttcttcaccatctattcgctgcttgagatcggcatgttccgattcttctcctgctcttgtatcctcgacgcgtgtatcgttcccggcgaagatttcatatctctccggtatatcttcgcaccgtggcgatgaaatgggtaagagaatggaaggattcgttagaagcgtcgatgggaagatctctgatgcgtctttctccgaagcttcatctgcgactccaaaatcgaaggtgaggaagcacacaatttcagtatttgttggagacgaaagcggaatgattaataggattgcaggagtgtttgcaaggagaggatacaatattgagagtcttgctgttggtctgaacagagacaaggctctattcaccatagttgtctgtggaactgaaagggtacttcagcaggtcatcgagcaactccagaagctcgttaatgttctaaaggttgaagatatctcaagtgagccgcaagtggagcgtgagctgatgcttgtaaaagtgaatgcacatccagaatccagggcagagatcatgtggctagttgacacattcagagcaagagttgtagatatagcggaacatgcattgactatcgaggtaactggagatcctggaaaaatgattgctgtagaaagaaatttgaaaaagtttcagatcagagagattgtaaggacaggaaagatagcactgagaagggaaaagatgggtgcaactgctccattttggcgattttcagcagcatcctatccagatctcaaggagcaagcgcctgttagtgttcttcgaagtagcaaaaaaggagccattgtccctcaaaaggaaacatcagcagggggagatgtttatcccgttgagccattttttgaccccaaggtacatcgtattctcgacgctcactggggacttctcactgacgaagatacgagtggactacggtcgcatactctatcattgcttgtaaatgatattccaggagttcttaatattgtgactggtgttttcgctcgaaggggatacaatatccagagcttggccgtaggacatgctgaaaccaagggcatttcacgcattacaacagttatacctgcaacagatgaatcggtcagcaaattggtgcagcaactttacaaactcgtagatgtgcatgaggtccatgatcttactcatttgccattttctgaaagagaactgatgctgattaagattgccgtgaacgctgctgctagaagagatgtcctggacattgctagtattttcagggctaaagctgttgacgtatctgatcacacaattactttgcaggttgcaagaaccggtcgtgtggcattggctcgtgaatcgggagtggactccaagtaccttcgtggatactcctttcctttaacaggctaa

SEQ ID NO: 6873 - protein, 469 aa, Arabidopsis thaliana
MAAISVSSSPSIRCLRSACSDSSPALVSSTRVSFPAKISYLSGISSHRGDEMGKRMEGFVRSVDGKISDASFSEASSATPKSKVRKHTISVFVGDESGMINRIAGVFARRGYNIESLAVGLNRDKALFTIVVCGTERVLQQVIEQLQKLVNVLKVEDISSEPQVERELMLVKVNAHPESRAEIMWLVDTFRARVVDIAEHALTIEVTGDPGKMIAVERNLKKFQIREIVRTGKIALRREKMGATAPFWRFSAASYPDLKEQAPVSVLRSSKKGAIVPQKETSAGGDVYPVEPFFDPKVHRILDAHWGLLTDEDTSGLRSHTLSLLVNDIPGVLNIVTGVFARRGYNIQSLAVGHAETKGISRITTVIPATDESVSKLVQQLYKLVDVHEVHDLTHLPFSERELMLIKIAVNAAARRDVLDIASIFRAKAVDVSDHTITLQVARTGRVALARESGVDSKYLRGYSFPLTG

SEQ ID NO: 6874 - DNA, 1434 bp, Arabidopsis thaliana
  CDS (1)..(1434)
atggcggcgacgacgactgctacttcattattctcatctcgtcttcacttccagaatcagaatcaaggttatgggtttccggcgaaaacccccaactccctgcaagtaaatcagatcatcgacgggaggaagatgaggaatgccactgttctctcagctgcttccactgataaagccatcaccactgctcaatctgtagctccgacggcttgtgatagagtaaggaggcatacaatctcggtgtttgtgggcgatgagagcggtataataaatagaattgctggagtatttgctagaaggggatacaatattgagtcccttgccgtaggattgaatgaagacaaggctctgtttactatagttgttcttggaacagataaagtcttgcagcaagttgtagaacagcttaacaagctcgtcaatgtcatcaaggtggaagatctctccaaggagccccatgtagaacgtgagttaatgctcattaaacttaacgctgatccaagcacccgctcagagatcatgtggttggtggatatctttagagcaaaaatcgtggatacctcagagcaatctctaacgattgaggtaactggagaccctggaaaaatggttgcactaacgacaaacttagagaagtttggaataaaagaaattgcgagaacagggaagattgctctgagacgggaaaagatgggagaaaccgctccgttttggagattttcagcggcatcatatccacatcttgtaaaggaatcatctcatgagactgttgcagagaaaacaaaactagcattgactggaaatggcaatgcatcatccgggggtgacgtttatccagtggaaccctataacgatttcaaaccggtccttgacgctcattggggaatggtctacgatgaagattcgagcggacttcggtcccacacattatctttacttgtggccaacgttcccggagttctcaatctaataactggagctatctctagaagaggttataacatccagagtctagctgttggtcctgctgagaaagagggcttatctcggattacaacagttattcccggaactgatgaaaatatagataaattggttaggcagctccagaagttgattgatcttcaggagatccaaaatataacgcacatgccatttgcggagcgagaactgatgctcatcaaagtagctgctgatacttctgcaaggagagatgttttagatattgctcaagttttccgtgctaaagccattgatgtctctgatcatactatcacccttgaggttacaggggatctcagaaaaatgtctgcattacaaacgcagttagaggcctatggaatctgcgaggtggctcggacaggaagagtggcattggtaagagaatctggagtggattcgacttatcttcgtggatactctcttcctttgtag

SEQ ID NO: 6875 - protein, 477 aa, Arabidopsis thaliana
MAATTTATSLFSSRLHFQNQNQGYGFPAKTPNSLQVNQIIDGRKMRNATVLSAASTDKAITTAQSVAPTACDRVRRHTISVFVGDESGIINRIAGVFARRGYNIESLAVGLNEDKALFTIVVLGTDKVLQQVVEQLNKLVNVIKVEDLSKEPHVERELMLIKLNADPSTRSEIMWLVDIFRAKIVDTSEQSLTIEVTGDPGKMVALTTNLEKFGIKEIARTGKIALRREKMGETAPFWRFSAASYPHLVKESSHETVAEKTKLALTGNGNASSGGDVYPVEPYNDFKPVLDAHWGMVYDEDSSGLRSHTLSLLVANVPGVLNLITGAISRRGYNIQSLAVGPAEKEGLSRITTVIPGTDENIDKLVRQLQKLIDLQEIQNITHMPFAERELMLIKVAADTSARRDVLDIAQVFRAKAIDVSDHTITLEVTGDLRKMSALQTQLEAYGICEVARTGRVALVRESGVDSTYLRGYSLPL

SEQ ID NO: 6876 - DNA, 585 bp, Rhodopirellula baltica SH 1
  CDS (1)..(585): transl_table=11
ttggcgatcttttttgctctcacatggcgactcacaggcattttcatggccagtcccaaccaacgtcatttgctctcggcgctcgttcaaaacgtgcccggagtgcttgcacacatttccggaatgctcgcttcccgcggttacaacattgattcgttggctgtcggtgaaacggaagatccaacgctttcgcgaatgacgtttgtcgttgtcggcgacgaccaagtcctcgaccaagtccgcaaacaactcgagaaaatcgtcacggtcgtgcgtgtgctggatatcagctccaacgattacgtcgaacgcgatctcctgctggtcaaagtcaccgctcccgctggtggcgtccgcagcgaaattcgcgaattggtcgatatcttccgcggtcaaatcgtcgatgtcggcgaaggggaagtgatgatcgaaatcagcggccgagccaacaaggtccaggctttcatcgaacgaatcgatcgctatggcatcgtcgaattggtccgcacgggccgaatcgcgatggttcgcagtggttcgcaagtcacctcgagtgagcccgctgcagaaaccgtccaagcctaa

SEQ ID NO: 6877 - protein, 194 aa, Rhodopirellula baltica SH 1
MAIFFALTWRLTGIFMASPNQRHLLSALVQNVPGVLAHISGMLASRGYNIDSLAVGETEDPTLSRMTFVVVGDDQVLDQVRKQLEKIVTVVRVLDISSNDYVERDLLLVKVTAPAGGVRSEIRELVDIFRGQIVDVGEGEVMIEISGRANKVQAFIERIDRYGIVELVRTGRIAMVRSGSQVTSSEPAAETVQA

SEQ ID NO: 6878 - DNA, 492 bp, Bordetella bronchiseptica RB50
  CDS (1)..(492): transl_table=11
atgaaacacgtgatttctgtgctgatggaaaacgaacccggcgcgctgtcgcgcgtggtcggcctgttctccgcgcgcggctacaacatcgagacgctgaccgtggcgcccaccgaggacgcgaccctgtcgcgcctgaccgtggtgaccgtcggttcggacgaggtcatcgaacagatcaccaagcacctcaatcgcctggtcgacgtggtcaaggtcgtggacctcaccgaaggcgcgcacatcgagcgcgagctcatgctgatcaaggtgcgggcagtgggcaaggagcgcgaggaaatgaagcgcatggcggatatcttccgcgggcgcatcatcgacgtcaccgacaagtcctacacgatcgagctgaccggcgttcaggagaaaatccaggctttcatcgaagccctcgaccgcagtgccatcctggaaaccgtgcgcaccggcgtgtccggcatcgggcgcggcgaacggatactgaaaatctga

SEQ ID NO: 6879 - protein, 163 aa, Bordetella bronchiseptica RB50
MKHVISVLMENEPGALSRVVGLFSARGYNIETLTVAPTEDATLSRLTVVTVGSDEVIEQITKHLNRLVDVVKVVDLTEGAHIERELMLIKVRAVGKEREEMKRMADIFRGRIIDVTDKSYTIELTGVQEKIQAFIEALDRSAILETVRTGVSGIGRGERILKI

SEQ ID NO: 6880 - DNA, 531 bp, Prochlorococcus marinus str. MIT 9313
  CDS (1)..(531): transl_table=11
atgaagcacaccctttcagtgctagtcgaagacgaatccggagctctaagccggatcgcaggactttttgcacgccgtggtttcaacatcgacagccttgcggtgggcccagccgaaacgcctggacaatcccgactgacgatggttgtagagggagacgatcatgcccttcaacagatgagcaaacagctcgacaaactcgtcaacgtcctgcaggtgcttgatctaaccaggcaacctgcagtcgaacgagaactgatgctgctcaaagtttccgcacccgctcaccagcgcagctccattttcgatctcgttcaggtcttccgagcgaaagtggttgatgtggccgatggcgcgcttacccttgaggtggtgggtgacccaggcaagctggtggcgctcgaaagcttgctgaccccttacgggattatcgaaatcgcccgtaccggcaaggtcgctctggtaagggcctcaggggtaaacaccgaactcttaaaggtctctccgagcgggagccgaataccggcctaa

SEQ ID NO: 6881 - protein, 176 aa, Prochlorococcus marinus str. MIT 9313
MKHTLSVLVEDESGALSRIAGLFARRGFNIDSLAVGPAETPGQSRLTMVVEGDDHALQQMSKQLDKLVNVLQVLDLTRQPAVERELMLLKVSAPAHQRSSIFDLVQVFRAKVVDVADGALTLEVVGDPGKLVALESLLTPYGIIEIARTGKVALVRASGVNTELLKVSPSGSRIPA

SEQ ID NO: 6882 - DNA, 531 bp, Synechococcus sp. WH 8102
  CDS (1)..(531): transl_table=11
atgaaacacaccctttcggtgctggtggaggacgaatccggcgccctcagtcggatcgccggactgttcgcccgccgcggcttcaacatcgacagcctggctgtagggcctgcagaggccgaccgccagtcacgtctcacgatggtggtggagggggatgaccagaccctccagcagatgaccaaacagctggacaagttggtgaacgtgcttcaagtgctcgacctgacccagcgacccgccgttgagcgggaactgatgctgctgaaggtctcagcccccgcagaaacccgcagtgcggtgtttgaccttgtgcaggtgttcagggccaaggtggtggatgtggccgatgaagccctgaccctggaagtggtgggggaccctgggaagctggtggccctggaacggctgatggcgccgtttggcattcttgaaatcgcccgcaccggcaaggtggcgctggaacgggcgtccggcgtgaacaccgagctgcttaaggtatcccccagtgaaaacagagttccggcctga

SEQ ID NO: 6883 - protein, 176 aa, Synechococcus sp. WH 8102
MKHTLSVLVEDESGALSRIAGLFARRGFNIDSLAVGPAEADRQSRLTMVVEGDDQTLQQMTKQLDKLVNVLQVLDLTQRPAVERELMLLKVSAPAETRSAVFDLVQVFRAKVVDVADEALTLEVVGDPGKLVALERLMAPFGILEIARTGKVALERASGVNTELLKVSPSENRVPA

SEQ ID NO: 6884 - DNA, 492 bp, Chromobacterium violaceum ATCC 12472
  CDS (1)..(492): transl_table=11
atgcgacacatcctatccatacttctggaaaacgaggcgggcgcgctgtcgcgcgtcgtcgggctgttttcggcccgcgcctacaacatcgattcgctgacagtgtccaccaccgaggacccgacattgtcgcggatgaccatcgtcacccacggttccgacgaagtcatcgagcagatcaccaagcagctcaacaagctgatcgaggtggtcaaggtgatagacctcaacgaatccgagcacatcgaacgcgagatgatgctgatcaaggtccgcgccgtaggcaaggaccgcgaggagatgaagcgcatggccgacatcttccgcggacgcatcatcgacgtgacggaaaagacttacaccatcgagctgactggtacgagcgacaagctcggcgcctttatcgaggcggtggaccgcacagtgatcctggaaacggtccgtaccggcgcatccggcatcggtcgaggcgagcgggttctgaaaatctga

SEQ ID NO: 6885 - protein, 163 aa, Chromobacterium violaceum ATCC 12472
MRHILSILLENEAGALSRVVGLFSARAYNIDSLTVSTTEDPTLSRMTIVTHGSDEVIEQITKQLNKLIEVVKVIDLNESEHIEREMMLIKVRAVGKDREEMKRMADIFRGRIIDVTEKTYTIELTGTSDKLGAFIEAVDRTVILETVRTGASGIGRGERVLKI

SEQ ID NO: 6886 - DNA, 471 bp, Wolinella succinogenes DSM 1740
  CDS (1)..(471): transl_table=11
atggaaactagaagaattatctccgtcaccgtcatcaacgaacacggcgtcctctctaggatttctgggcttttcgcaggtcggggctacaacatcgaatcactcaccgtggcacccctgcctgagagcgatctctccaaaatcaccatctccacttatggggatgagcgtgttttggagcagattatcaaacagcttcataagctcatccccgttctcacggtcgtggaacacaacgagatggttgagaaggagatggccatggtcaagctccctctagagaccaatctggccgagcttgaagccctttgtcgcgcctatcacggggagatcaccagcaccaatgacaagtatgtcatcgtcatggccacggataaccccacgcgcatcacccacttcctccacgccatcaagcgatttcatcctaaagatatgattcgtagcggcgtggtcgcaatggaacgcctctaa

SEQ ID NO: 6887 - protein, 156 aa, Wolinella succinogenes DSM 1740
METRRIISVTVINEHGVLSRISGLFAGRGYNIESLTVAPLPESDLSKITISTYGDERVLEQIIKQLHKLIPVLTVVEHNEMVEKEMAMVKLPLETNLAELEALCRAYHGEITSTNDKYVIVMATDNPTRITHFLHAIKRFHPKDMIRSGVVAMERL

SEQ ID NO: 6888 - DNA, 528 bp, Gloeobacter violaceus PCC 7421
  CDS (1)..(528): transl_table=11
gtgaagcataccttgtcggtattagtggaagatgaggccggcgccctgacgcgcatcgccggcatgttcgcccggcgcggcttcaatatcgagagcttggcggtgggttcagccgagcaatcgggcaccacccgcatcacgatggtggtggcgggggacgaacaggcggtcgagcagattaccaagcagctgcacaagctcatcaacgtgctgcgtgtgcaggacatcacaaccattccctgcgtcgagcgcgaactgatgctcatcaaagtgaacgccaccaccgccacccgcagcgaaatcatcgaactggccacggtctttcgggcgcgcatcgtcgatgtggcggaagaatcggtcaccgtcgaggtgaccggcgatccgggcaagatggtcgcgattatccagatgctcacccgcttcggcatcaaagaaattgcccgcaccggcaaaatttccctcacccgcgagtcgggggtgaacaccgaatttctgcgcacccagccgcctgcggcgacgcgggtctga

SEQ ID NO: 6889 - protein, 175 aa, Gloeobacter violaceus PCC 7421
MKHTLSVLVEDEAGALTRIAGMFARRGFNIESLAVGSAEQSGTTRITMVVAGDEQAVEQITKQLHKLINVLRVQDITTIPCVERELMLIKVNATTATRSEIIELATVFRARIVDVAEESVTVEVTGDPGKMVAIIQMLTRFGIKEIARTGKISLTRESGVNTEFLRTQPPAATRV

SEQ ID NO: 6890 - DNA, 492 bp, Photorhabdus luminescens subsp. laumondii TTO1
  CDS (1)..(492): transl_table=11
atgcgccggattttatctgtattacttgaaaacgaatcaggggctttgtcccgggttgttggtctgttttcccaacgtggctacaacattgaaagtttaactgttgccccaacggatgatccgacattatcgcggatgacaattcagactaagggcgatgcaagggtacttgaacagattgaaaaacagttgcacaagttggtggatgtgttgcgagtcagcgagttggcaccgggttctcatgtggagcgtgagattatgctagtcaaattgcaggccagtggatatggacgtgaagagatcaagcgcagtactgacatcttccgtgggcagatcgttgatgtgactgcgaccttatataccgtacagttggtgggaaccagcgataaattggatgcctttctcgatgctgttcgggatgttgctgaaattgttgaagttgctcgttcgggtattgtcggtgtctctcgcggggataaaattatgcgatga

SEQ ID NO: 6891 - protein, 163 aa, Photorhabdus luminescens subsp. laumondii TTO1
MRRILSVLLENESGALSRVVGLFSQRGYNIESLTVAPTDDPTLSRMTIQTKGDARVLEQIEKQLHKLVDVLRVSELAPGSHVEREIMLVKLQASGYGREEIKRSTDIFRGQIVDVTATLYTVQLVGTSDKLDAFLDAVRDVAEIVEVARSGIVGVSRGDKIMR

SEQ ID NO: 6892 - DNA, 495 bp, Vibrio vulnificus YJ016
  CDS (1)..(495): transl_table=11
atgagacacattatttcgttgttaatggaaaaccaaccgggtgccttgtctcgtgtggtagggctgttctctcagcgtggctataacattgaatcgttgaccgtttcaccaacggacgatgaaaccttgtctcgtttgaacattaccacgatgaccgacgagatgcagttagagcagattcaaaagcagttacataaactgattgatgtgctgaaagtacaagaggtgacggagttcgatcatatcgaacgtgaactgatgatggtgaaagtgaaagccagtggttttgctcgtgcagaagtgaaacgtactgcggatattttccgaggtcagattgtcgacgttacggcctcgcagtacacggtgcaacttgcaggtaccagcgaaaagttggatgctttcattcaggccatttctgaagtcacggaagtgattgaagttgcgcgcagcggtgtggtcggcattgctcgtggagaaagagcgctaaaagcgtaa

SEQ ID NO: 6893 - protein, 164 aa, Vibrio vulnificus YJ016
MRHIISLLMENQPGALSRVVGLFSQRGYNIESLTVSPTDDETLSRLNITTMTDEMQLEQIQKQLHKLIDVLKVQEVTEFDHIERELMMVKVKASGFARAEVKRTADIFRGQIVDVTASQYTVQLAGTSEKLDAFIQAISEVTEVIEVARSGVVGIARGERALKA

SEQ ID NO: 6894 - DNA, 543 bp, Rhodopseudomonas palustris CGA009
  CDS (1)..(543): transl_table=11
atgacccagcccgcatccgcttacttcatggaagagcgccacgatccgaacgagactcacacgctgtcggtgatcgtgcagaacgagcccggcgttctggcccgggtgatcgggctgttctcgggccgtggctacaacatcgaaagcctcacggtgtcggagacagaggcgcagaagcacctgtcccgtatcaccatcgtcaccaccggcacgccgatggtgatccagcagatcaagaaccagctcgaccgcatggtcccggtgtatcgcgtcgtcgacatgacgctgagcggccgctcgatcgagcgcgagcttgcgatggtgaagctgcggggcgtcggcgaccatcgcgtcgaatcgctgcggcttgccgaagccttccgcgcccgcgtgatcgacgcctcgaccgagagcttcgtgttcgagatcaccggcaactcgtcgaagatcaatcagttcatcgagctgatgcgcccgctcggcctggtcgaggtggtgcgcaccggcgttgccgcgatcggccgcggcgcggaggggatgtaa

SEQ ID NO: 6895 - protein, 180 aa, Rhodopseudomonas palustris CGA009
MTQPASAYFMEERHDPNETHTLSVIVQNEPGVLARVIGLFSGRGYNIESLTVSETEAQKHLSRITIVTTGTPMVIQQIKNQLDRMVPVYRVVDMTLSGRSIERELAMVKLRGVGDHRVESLRLAEAFRARVIDASTESFVFEITGNSSKINQFIELMRPLGLVEVVRTGVAAIGRGAEGM

SEQ ID NO: 6896 - DNA, 510 bp, Methanococcus maripaludis S2
  CDS (1)..(510): transl_table=11
atggaacacaaacacatcatttcagttttggttttgcacaaacctggcgtattgcagagaatttcaggtttgtttaccagaagatggtttaatatctcaagcatgactgttggaagcactgaaaaccctgatgttgcaagaatgacaatagttgttcagggagatgatacagtacttgaacaggttgtaaaacagttgaataaattggtagaagttgtaaaagttactgatttaaacagtaacaagtcagtacaaagagaattatgtcttgtaaaagtttatgcgcctactgaagatagtaaatctcaggtaatccagtatgcaaatatatttaggggaaaaattatcgatttaagcactgaaacactcactgttgaaattactggcgatgagcaaaaagtaaacgcctttttagaccttgtaaggccaatgggcataaaagaaattgcaagaactggacttactgctcttatgaggggttctaaaattttaaaatcaaataaagcataa

SEQ ID NO: 6897 - protein, 169 aa, Methanococcus maripaludis S2
MEHKHIISVLVLHKPGVLQRISGLFTRRWFNISSMTVGSTENPDVARMTIVVQGDDTVLEQVVKQLNKLVEVVKVTDLNSNKSVQRELCLVKVYAPTEDSKSQVIQYANIFRGKIIDLSTETLTVEITGDEQKVNAFLDLVRPMGIKEIARTGLTALMRGSKILKSNKA

SEQ ID NO: 6898 - DNA, 951 bp, Magnaporthe grisea 70-15
  CDS (1)..(951)
atggcttctcgcagcctgctctcgtcgacatggcgcgccgccaccgccgcggcactccgacccacggccgccgtcagacacagctcgagtagctcgacgtcggccatcgcctacaaggcccttcgccgtcgccaagcgccgctcccgaccagcgactctccgcccgcttggtcatctgcccaggctgccgtctctaacattctctacgagaccccgacgccgtccacggctcctccaaagaggcacatcctcaactgcctggttcagaacgagcccggtgtcctgtcccgcgtttccggaattctcgccgcccgtgggttcaacatcgactcactcgtcgtctgcagcaccgaggtcgcggacctgtcgcgcatgacgatcgtgctgacggggcaggacggcgtcgtcgagcaggccaggcggcagctggaggacctcgtccccgtctgggccgtgctggactacaccgactcaccgctagtccagagggagctcctccttgccaaggtcaacatcttggggcaggagtactttgaggagctgctggaccaccatcgcgagatcaccagcgccgacgctgaagtcctggcctccagcgagggagagcagaccttggagcaagtggctgctgacttccacccgagcaggttggccgctagcgaggctttgcgccacaagcacgagcacctcaagagcatcacgtactttacgcatcagtttggtggaaaggttttggacattagcacaaacagctgcattgttgaactgtctgcaaaaccctcgaggattgactcgttcctcaagttgattggccccttcggtattcttgagtccgcgaggactggtctgatggcactgccgcggtcgcccctgtatgggcctaatgaagaggaagctctcatcaaggaggctgatgacattgttgacgccagccagctgccccctggttaa

SEQ ID NO: 6899 - protein, 316 aa, Magnaporthe grisea 70-15
MASRSLLSSTWRAATAAALRPTAAVRHSSSSSTSAIAYKALRRRQAPLPTSDSPPAWSSAQAAVSNILYETPTPSTAPPKRHILNCLVQNEPGVLSRVSGILAARGFNIDSLVVCSTEVADLSRMTIVLTGQDGVVEQARRQLEDLVPVWAVLDYTDSPLVQRELLLAKVNILGQEYFEELLDHHREITSADAEVLASSEGEQTLEQVAADFHPSRLAASEALRHKHEHLKSITYFTHQFGGKVLDISTNSCIVELSAKPSRIDSFLKLIGPFGILESARTGLMALPRSPLYGPNEEEALIKEADDIVDASQLPPG

SEQ ID NO: 6900 - DNA, 939 bp, Gibberella zeae PH-1
  CDS (1)..(939)
atggcatctctgcggtcgttgactgcttcccttcgctgggtagcccccgcgaggggcgtcgccgctgtgcgatatagctcttcctcgacctctgccatcgcctacaaggcacttcgtcgtcgctctgctcctcttcccgtgcgcgacaaccctcccgcctggtccgcccagtccgccgtctccaacatcctctacgagacccccgttccatctaccgttcctcctaagcgacatatcctcaactgccttgtccagaacgagcccggtgttttgtcccgcgtctctggtattctggctgctcgcggtttcaacattgactcccttgtcgtgtgtaacaccgaggttgaagatttgtcccgcatgaccattgtcctcacaggtcaggacggcgttgtcgagcaggctcgccgacagcttgaggatctggtacccgtctgggccgttctcgactacaccgccgctgctctcgtccagcgcgagcttctcctcgccaagatcaacattcttggacctgagtactttgaggagcttctcaaccaccaccgtgagattgctgctggcgagtacgatgtcgacaacgctcatgaggccattgagcgcagcatctccgataccgccaaggacttccaccctagcaagttggctgtcagtcaggctctccgacacaagcatgagcatctcaagtccatcacttactttgctcatcaattcggcggtaaggttctggacattagcaacagcagctgtattgtcgaagtttccgccaagcagtcccgtatcgattcgttcctcaagcttgttgccccattcggcatcctcgagtctgctcgcacaggtttgatggctctgccccgatctcctctgaacgaggccagccaggaggctgtcactatggaggcggatgatgttgttgatgccagccagctccctcccggttaa

SEQ ID NO: 6901 - protein, 312 aa, Gibberella zeae PH-1
MASLRSLTASLRWVAPARGVAAVRYSSSSTSAIAYKALRRRSAPLPVRDNPPAWSAQSAVSNILYETPVPSTVPPKRHILNCLVQNEPGVLSRVSGILAARGFNIDSLVVCNTEVEDLSRMTIVLTGQDGVVEQARRQLEDLVPVWAVLDYTAAALVQRELLLAKINILGPEYFEELLNHHREIAAGEYDVDNAHEAIERSISDTAKDFHPSKLAVSQALRHKHEHLKSITYFAHQFGGKVLDISNSSCIVEVSAKQSRIDSFLKLVAPFGILESARTGLMALPRSPLNEASQEAVTMEADDVVDASQLPPG

SEQ ID NO: 6902 - DNA, 885 bp, Kluyveromyces lactis NRRL Y-1140
  CDS (1)..(885)
atgctaaaaactagagtggttcctctagcattgagaagctttgccagagcaaagtcttcttcgacttcggctcttgcttataagcaactgcatagaaataaggcaagacctcctttaccaacgatcgaaactccatcttggtctactaacagtgccatctcatcgatcctatatgaaaatccagtaatctcaaaggagccaaagaaacaacatgttttgaactgtttggttcaaaacgagccaggtgttctatcgttagtctcaggtactctagctgcaagaggcttcaatatcgattcccttgtggtctgtaacactgaagtgaaagatttatcccgtatgaccattgtgttgcaaggtcaagacggtgtcatcgaacaagccagaagacaaatcgaagatttggtaccagtatttgtcgtgttggattactctcattccaccatcatagaaagagaattgttgatgacaagaatctctttgttgggtgctgaatacttcgaggatttgattcatcaccatgaacaagatgaaaatactgataccgttgaaagaataagacaacagcaattccatccttccaaccttccactgtcccaagtattgagattgaagcatgaacatttaaacgacatctctaacttgactggtaactttggtggtaagattgttgatatcgctgaacaaagttgtattgtggaattatgtgctaaaccatcccgtatctctgcattcttgaaacttgtggaacctttcggtatcttggaagtggcaagatcaggtatgatggctctaccaagaacccatttatctgtcggtgatgaagatgatgctcaaagcaagatgaatgacatcgttgatatctctcaattgcctcctggttga

SEQ ID NO: 6903 - protein, 294 aa, Kluyveromyces lactis NRRL Y-1140
MLKTRVVPLALRSFARAKSSSTSALAYKQLHRNKARPPLPTIETPSWSTNSAISSILYENPVISKEPKKQHVLNCLVQNEPGVLSLVSGTLAARGFNIDSLVVCNTEVKDLSRMTIVLQGQDGVIEQARRQIEDLVPVFVVLDYSHSTIIERELLMTRISLLGAEYFEDLIHHHEQDENTDTVERIRQQQFHPSNLPLSQVLRLKHEHLNDISNLTGNFGGKIVDIAEQSCIVELCAKPSRISAFLKLVEPFGILEVARSGMMALPRTHLSVGDEDDAQSKMNDIVDISQLPPG

SEQ ID NO: 6904 - DNA, 912 bp, Debaryomyces hansenii CBS767
  CDS (1)..(912)
atgattgcttcatcctcattatgtggcattggtcgccgtaattttgctagacaattttccagaaccaagacatcaagctcaacttctgccttggcttacaaggccttgcaccgtaatcaaaagagaccgccattacctacctttgaaaccccaaattggtccgctgatgctgcagtttcttcaattttatacgaaacaccggttccatcgaaggcaccaagaaagcaacacgttttaaactgtttagttcaaaatgaaccaggtgtattaagttccgtttcgagtactttagctgctagagggttcaatattgactctttggttgtttgtagtacagaagttaaggacttgtctcgtatgactatcgtcttggcgggacaagatgccgttgttgaacaagcaagaagacaaatcgaagacttggttccagtttatgctgtcttggattacaccaatgctgaaattatcaaaagagagttgttattagcaagagtttcattattaggacctgaatatttccacgaactcattgctacccataaattgcacaccagtgatggtacctcactcccagatttgagtgccactgcgtcggctttccatccaagtaacttagccccatcagaagctttgaggcacaaacactcccacttagctcacatttcaactataactgaaaaatttggcggtaagatcgttgacattgctgatagaaacgttatcgttgaattgagtgctaagccatctagagtttcctctttcatccaattattacatccatttggtattttagaaattgctagatctggtatgatggcattaccaagaactccattggatggtgcttacgaagaagaagaagccgttaatgctgctgatatcgttgatgcttctcaattacctcctggttag

SEQ ID NO: 6905 - protein, 303 aa, Debaryomyces hansenii CBS767
MIASSSLCGIGRRNFARQFSRTKTSSSTSALAYKALHRNQKRPPLPTFETPNWSADAAVSSILYETPVPSKAPRKQHVLNCLVQNEPGVLSSVSSTLAARGFNIDSLVVCSTEVKDLSRMTIVLAGQDAVVEQARRQIEDLVPVYAVLDYTNAEIIKRELLLARVSLLGPEYFHELIATHKLHTSDGTSLPDLSATASAFHPSNLAPSEALRHKHSHLAHISTITEKFGGKIVDIADRNVIVELSAKPSRVSSFIQLLHPFGILEIARSGMMALPRTPLDGAYEEEEAVNAADIVDASQLPPG

SEQ ID NO: 6906 - DNA, 867 bp, Yarrowia lipolytica CLIB122
  CDS (1)..(867)
atgcttggaaaacgatttgtgggtcccgtgctgacccccaagggcgctcggcactcgtccatcagtgccctggcgtacaagacgctccaccgaaaccgatcgcagcccaagctgcccgttatcgagactccagcatggaacgccaacacggcggtttcttccattctgtacgagaccccgatgccgtccaaggcgcccatcaaggcacacgtgttcaactgtctggttcagaacgaacccggtgttctgtcgcgagttgccggcactctggcgtctcgaggcttcaacattgattcgctggtagtgtgcaacacggaggttgccgatctgtcgcgaatgaccattgttctgcgaggccaggatgccgtgatcgagcaggcgcgacgacagattgaggatctggtgcccgtgtgggcagtgctggactactccaacgcctcgatcatcaagcgagagctgctgctggcccgagtgtcgattctgggccccgagtacttccaggatctgctgacccaccacggccacgagtttgaggacgccgtgctgcagaacgacttccaccccaacaacattgccgcctccgaggctctgcgacacaagcaccagtacctggacgccgtgaccaagctggcccaccagtttggcggcaagattctcgacatttctgagcgaaacgtcattgtcgagctctcggccaagcccgagcgagtctcctccttcctgcaccttctcaagccctttggtattcttgaggtggcccgatccggaatgatggccctgccccgaactcctcttgagacccccgatgaggaggacatcaagaaggccgaggaggtggttgaccagacctctctgcctcctggttag

SEQ ID NO: 6907 - protein, 288 aa, Yarrowia lipolytica CLIB122
MLGKRFVGPVLTPKGARHSSISALAYKTLHRNRSQPKLPVIETPAWNANTAVSSILYETPMPSKAPIKAHVFNCLVQNEPGVLSRVAGTLASRGFNIDSLVVCNTEVADLSRMTIVLRGQDAVIEQARRQIEDLVPVWAVLDYSNASIIKRELLLARVSILGPEYFQDLLTHHGHEFEDAVLQNDFHPNNIAASEALRHKHQYLDAVTKLAHQFGGKILDISERNVIVELSAKPERVSSFLHLLKPFGILEVARSGMMALPRTPLETPDEEDIKKAEEVVDQTSLPPG

SEQ ID NO: 6908 - DNA, 981 bp, Aspergillus nidulans FGSC A4
  CDS (1)..(981)
atggctttccggtatacccggatgttgtccaagacggcatcatcgtctttcttatcggcagccagccgcacctctggactggcgacccgatccactttcgctacaaccaccagggcctcctccagctcaacctcagcattggcctacaaggcgctgcaccgacgttccccgctcacactccccgtaacggatgtctcgcagcaatgggacgcccagaccgccgtctcgtcaattctctacgagacccccgttcggccgacaaacccgcccaagcgtcatgtcttgaactgtctggtacaaaacgagcccggtgtgctctcccgcgtttcggggatcttggccgcccgcggcttcaatattgacagtcttgtcgtttgcaataccgaggtggaggatttgtctcgcatgaccatcgtgctgcagggtcaggatggcgttgtcgagcaggcccgccgccagctggatgatcttgtccccgtctgggctgtcctcgattacacggactctgcgcttgttcagcgtgagctgcttctggccaaggtcagcattttgggcccagagtacttcgaggagcttctccagcatcaccgcgagatcaccacccccgttgagtctatggaggcgcagaagaagagcaccgatagcaaggcctccacgaaaaccgaggaatatcacccccgcaaccttcctagcagtcaggctttgagacacaagcacgagcatctggatgcaatcacacgattaacccaccagttcggtggcaaggtcttggatatcagtactaacaactgcatcgttgaactctctgccaagcccagccgtattgactccttcatgaagctcatttcccccttcggtattctcgagtccacccgaaccggtctgatggctttgccccggtctcctctgtttgaggccaatgaagagctcgagaaggaagctgccgacgttgttgacgccagcacccttccccctggttaa

SEQ ID NO: 6909 - protein, 326 aa, Aspergillus nidulans FGSC A4
MAFRYTRMLSKTASSSFLSAASRTSGLATRSTFATTTRASSSSTSALAYKALHRRSPLTLPVTDVSQQWDAQTAVSSILYETPVRPTNPPKRHVLNCLVQNEPGVLSRVSGILAARGFNIDSLVVCNTEVEDLSRMTIVLQGQDGVVEQARRQLDDLVPVWAVLDYTDSALVQRELLLAKVSILGPEYFEELLQHHREITTPVESMEAQKKSTDSKASTKTEEYHPRNLPSSQALRHKHEHLDAITRLTHQFGGKVLDISTNNCIVELSAKPSRIDSFMKLISPFGILESTRTGLMALPRSPLFEANEELEKEAADVVDASTLPPG

SEQ ID NO: 6910 - DNA, 909 bp, Candida albicans SC5314
  CDS (1)..(909): transl_table=12
atgttaaggagaactccctgtgtgattagacaagtcatcagaactagtattagaaatagtagtaattctggttcgacttcagcattagcatataaaactttacatcgtaatcaaaaacgaccaccattgccaacattagaaaccccaaattggtcagctgatactgctgtttcatcgattttatatgaaaccccagtaccttctaaagctccaccaaagcaacatgttttaaattgtttagttcaaaatgaacctggggtattatcaggagtttccggtacattggctgctcgtggattcaatattgattcattagttgtttgtaatactgaagttaaagatttatcaagaatgacaattgttttaaaaggccaagatggagttgttgaacaagctcgtagacaaattgaagatttagtacctgtttatgctgttttggattatactaatgccgaaattattaaacgagaattattattagctagagtatcattattaggaccagaatatttccaagaattaattgctactcatcaattacatattgatgatggttcatcaattcctgacattgatgcatgtgaatcagcttatcatcccaataatttagctccaagtgaagctttaagacaaaaacatattcatttggatcatatttctactttaacaaaacaatttggtgggaaaattgttgatatttccgatagaaatgtcgttgttgaattaagtgctaaaccttcaagagttagttcttttattactttattacatccatttggaattttggaattggcaagatcaggtatgatggcattgccaagaactccattgaatagttttactgaagtggaagaagagtctattgatgctgctgatattgttgatgcatctcaattacctccaggttag

SEQ ID NO: 6911 - protein, 302 aa, Candida albicans SC5314
MLRRTPCVIRQVIRTSIRNSSNSGSTSALAYKTLHRNQKRPPLPTLETPNWSADTAVSSILYETPVPSKAPPKQHVLNCLVQNEPGVLSGVSGTLAARGFNIDSLVVCNTEVKDLSRMTIVLKGQDGVVEQARRQIEDLVPVYAVLDYTNAEIIKRELLLARVSLLGPEYFQELIATHQLHIDDGSSIPDIDACESAYHPNNLAPSEALRQKHIHLDHISTLTKQFGGKIVDISDRNVVVELSAKPSRVSSFITLLHPFGILELARSGMMALPRTPLNSFTEVEEESIDAADIVDASQLPPG

SEQ ID NO: 6912 - DNA, 513 bp, Clostridium thermocellum ATCC 27405
  CDS (1)..(513): transl_table=11
atggcgaagcatactttatcggtcctggttgaaaaccatgcgggagtgctgtcgagaatagccggtttgttcagcaggaggggatttaacattgacagccttgcagtgggtgttactgaaaatcctgagatttcaagaatgacaattgttgtcgacggtgacgactacatagttgaacaggttaccaaacagttaaacaagcttgttgatgttataaagataaaagaacttgatgaatccgattcggtaagcagggagcttgctcttataaaggttggggcaaatgcttccacaaggtcggagatagttcagattgccgagatattcagggcaaaaatagttgacgtgtcaaaaaccacgctgaccattgaaatatccggcagtgtggacaaagttgccgctttggaggacatgctaaagcagtttggcataaaagaaattgtcagaacaggcacgatagccattgaaagaggcaataaagttataaaaaataagaatagtgatgaggagtga

SEQ ID NO: 6913 - protein, 170 aa, Clostridium thermocellum ATCC 27405
MAKHTLSVLVENHAGVLSRIAGLFSRRGFNIDSLAVGVTENPEISRMTIVVDGDDYIVEQVTKQLNKLVDVIKIKELDESDSVSRELALIKVGANASTRSEIVQIAEIFRAKIVDVSKTTLTIEISGSVDKVAALEDMLKQFGIKEIVRTGTIAIERGNKVIKNKNSDEE

SEQ ID NO: 6914 - DNA, 492 bp, Herminiimonas arsenicoxydans
  CDS (1)..(492): transl_table=11
atgcgacatatcatttctgtattgctggaaaatgaagcaggtgctctgtcacgcgtagtaggcttgttctctgcgcgcggttacaacattgaaaccttgaccgtggcaccgaccgaagacgcaaccttgtcgcgcatgacgatagtcacgagcggctcggatgaggtgattgaacaaatcaccaagcatttgaaccgtttgatcgaagtggtcaaagtggtcgatttgaccgaaggtgcgtttatcgaacgtgagctcatgctcatcaagatccgcgcggtcggtaaggaacgtgaagaaatgaaacgtactgcggatattttccgtggccgtatcatcgacgtcacggacaagacttacacgatcgagttgaccggtaacaaaacaaaactcgacgcgtttatcgagtccatcgatcgcacggcgattctggaaactgtccgtaccggcagctccggcattggtcgcggcgaacgcatactcaaagtttaa

SEQ ID NO: 6915 - protein, 163 aa, Herminiimonas arsenicoxydans
MRHIISVLLENEAGALSRVVGLFSARGYNIETLTVAPTEDATLSRMTIVTSGSDEVIEQITKHLNRLIEVVKVVDLTEGAFIERELMLIKIRAVGKEREEMKRTADIFRGRIIDVTDKTYTIELTGNKTKLDAFIESIDRTAILETVRTGSSGIGRGERILKV

SEQ ID NO: 6916 - DNA, 489 bp, Desulfovibrio vulgaris subsp. vulgaris str. Hildenborough
  CDS (1)..(489): transl_table=11
gtgcgtcacgtcctttccgtcctcgtcgaaaacgaacccggtgtgctctcccgcgtggcggggcttttcagcggtcgcggcttcaatatcgaatcgctcaacgtcgcccccacgctcgaccgtggggtgtcgctcatgaccatctcgaccagaggcgacgagcaggtcaaggaacagatagtcaaacagcttcgaaagctggtcaccgtcatcaaggtggttgacttcgaggggcttgccaccgtagagcgtgagatggttatcgtgaaggtgcaggcagaagatacgcggcgcgcagaagtgctgcgcatcgccgacatcttcagatgcaaggtcgtggatgtaagcctgaatgacctgaccctcgaggcaacgggcgaccatggcaagatagaggcgatcatcagcctcttgcagaagttcggcatcaaggaagttgcgcgcacgggcaccgtagccctacgccgttccatgcagcccgaaatctag

SEQ ID NO: 6917 - protein, 162 aa, Desulfovibrio vulgaris subsp. vulgaris str. Hildenborough
MRHVLSVLVENEPGVLSRVAGLFSGRGFNIESLNVAPTLDRGVSLMTISTRGDEQVKEQIVKQLRKLVTVIKVVDFEGLATVEREMVIVKVQAEDTRRAEVLRIADIFRCKVVDVSLNDLTLEATGDHGKIEAIISLLQKFGIKEVARTGTVALRRSMQPEI

SEQ ID NO: 6918 - DNA, 492 bp, Acinetobacter sp. ADP1
  CDS (1)..(492): transl_table=11
atgagacacattatttctgtactcgttgaaaacgaagcaggtgcgctttcacgtttggtcggattatttagtcaacgtggctacaacattgaaaccttgaatgttgcaccaaccgaagatccaaccctgtcacgtctaacactgaccacctatggcgatgaccataaaatcgaacagatcaccaagcaattgaataagctggttgaagtggtcaaagtggttgatctttcagaaggtgcgcatattgagcgtgagctgatgctgattaaagtcaaagcattaggttcagcacgtgccgaaatcaagcgcacagcggatatctttcgtgcttcaatcgttgatgtgacaccaaccacgtataccatccagatcgctggaacaacagataagctcgacggattcattgacgccttagctgaaaataccattttagaagtggttcgctcaggtgtatcgggtatcgcgcgcggcgaaaaagtattaagtatttaa

SEQ ID NO: 6919 - protein, 163 aa, Acinetobacter sp. ADP1
MRHIISVLVENEAGALSRLVGLFSQRGYNIETLNVAPTEDPTLSRLTLTTYGDDHKIEQITKQLNKLVEVVKVVDLSEGAHIERELMLIKVKALGSARAEIKRTADIFRASIVDVTPTTYTIQIAGTTDKLDGFIDALAENTILEVVRSGVSGIARGEKVLSI

SEQ ID NO: 6920 - DNA, 492 bp, Erwinia carotovora subsp. atroseptica SCRI1043
  CDS (1)..(492): transl_table=11
atgcgtcggattttatcagtattacttgagaatgaatcaggcgccttgtcccgtgttgtcggcctgttttctcagcgcggttacaatatcgaaagcctgaccgtagcgccaaccgaagaccctacgctatcccgtatgactatccagacggtaggcgatgagaaggtgttggaacagatcgaaaagcaactgcacaaactggtggatgtcctgcgcgtcagtgaactcggtcagggtgcgcacgttgagcgtgagatcatgttggtgaagctacaggccacaggttatgcccgtgaagaagtgaaacgctgcgccgatattttccgcggtcagattgtggatgtcactgcctcgctttataccgtacaacttgctggcactagcgataaactggatgcgttcctcagtgccgtgcgtgaagtgtccgaaattgttgaagtggcgcgttctggaatcgtcggcgtatcgcgcggcgataaaatcatgcgttaa

SEQ ID NO: 6921 - protein, 163 aa, Erwinia carotovora subsp. atroseptica SCRI1043
MRRILSVLLENESGALSRVVGLFSQRGYNIESLTVAPTEDPTLSRMTIQTVGDEKVLEQIEKQLHKLVDVLRVSELGQGAHVEREIMLVKLQATGYAREEVKRCADIFRGQIVDVTASLYTVQLAGTSDKLDAFLSAVREVSEIVEVARSGIVGVSRGDKIMR

SEQ ID NO: 6922 - DNA, 534 bp, Symbiobacterium thermophilum IAM 14863
  CDS (1)..(534): transl_table=11
gtgaagcgcatcctggcggtcttggtggagaaccacccgggcgtgctggcgcgggtggcggggttgattcggcggcgagggttcaatatcgagagcctggcggtcggggtgacagacgacccggccatctcccggatgaccctggtggtcgagggcgacgaggccacgctcaaccaggtctccaagcagctcgacaagctgatcgaggtgatccaggtggcggacctggacgcggagcacagcgtcgcccgcgagatggcgttgatcaaggtcagcgtcgacccgcagcggcggccgcaggtcctgcagctggcgtcggtcttccgggccagcgtggtggacgtggggcacgaggcggtcatccttgaagtcacggggacccacgacaaggtggaggccctgatcagcctggcgcaggagttcggcgtccaggaggtggcccgcacggggatcatcgccctggcgcggggagcgcagtcgatgacggcaccgagggaggagcggtacgatgacgcggctgtactacgagtctga

SEQ ID NO: 6923 - protein, 177 aa, Symbiobacterium thermophilum IAM 14863
MKRILAVLVENHPGVLARVAGLIRRRGFNIESLAVGVTDDPAISRMTLVVEGDEATLNQVSKQLDKLIEVIQVADLDAEHSVAREMALIKVSVDPQRRPQVLQLASVFRASVVDVGHEAVILEVTGTHDKVEALISLAQEFGVQEVARTGIIALARGAQSMTAPREERYDDAAVLRV

SEQ ID NO: 6924 - DNA, 492 bp, Mannheimia succiniciproducens MBEL55E
  CDS (1)..(492): transl_table=11
atgcgtagaattttatcagtattactagaaaatgaatcgggtgcattatctcgtgtggttgctttattttctcaacgtgcattcaatatcgaaagtttaaccgtagcgccgaccgatgatccgactttgtcacgtatgactatcgaagcctcgggagatgaagcgatattggagcaaatcgaaaaacaattacacaaattggtggatgtgtttaaagtcattaatttaagtgattgcgaacatgttgagcgtgaagtcatgttattgaaattgcgcgctaccggttcgacccgtgatgaaattaaacgtttaacggatattttccgcggtcagattgtagatgtaacaaccaaatcctatacgattcaattagccggtacaaaggacaaattaaacgcctttgttagcgcggtaaaagaagagactacaattattgagattgtacgttcgggcttaatcagtttgtctcgcggcgagaaaaactgtctataa

SEQ ID NO: 6925 - protein, 163 aa, Mannheimia succiniciproducens MBEL55E
MRRILSVLLENESGALSRVVALFSQRAFNIESLTVAPTDDPTLSRMTIEASGDEAILEQIEKQLHKLVDVFKVINLSDCEHVEREVMLLKLRATGSTRDEIKRLTDIFRGQIVDVTTKSYTIQLAGTKDKLNAFVSAVKEETTIIEIVRSGLISLSRGEKNCL

SEQ ID NO: 6926 - DNA, 492 bp, Methylococcus capsulatus str. Bath
  CDS (1)..(492): transl_table=11
atgcgtcacatcatttccgtactgctcgaaaacgaatcgggcgcgttgtcgcgcgttgccggcctgttctccgcccgcggctacaacatcgaatcgctcaccgtggcgccaacccaggacccgaccctgtcgcgcatgaccatcgtgacttccggcagcgatgaaatcatcgaacagatcaccaagcagctgaacaagctgatcgacgtggtcaagctggtcgacctgtcggaatcggcccacatcgagcgcgaactgatgatggtgaaggtacgcgcgaccaacggcgggcgcgaggaggtcaagcggctggccgacattttccgcggcaacatcatcgacgtgacgccgaccagctacgtgatcgaggtcaccggcgaaaagtccaagctggatgccttcctgcaagctctgcgggacgaggacctcatcgaggtggtgcgctccggcaccaccggcatcctgcgcggggagcgcggactccacgtctga

SEQ ID NO: 6927 - protein, 163 aa, Methylococcus capsulatus str. Bath
MRHIISVLLENESGALSRVAGLFSARGYNIESLTVAPTQDPTLSRMTIVTSGSDEIIEQITKQLNKLIDVVKLVDLSESAHIERELMMVKVRATNGGREEVKRLADIFRGNIIDVTPTSYVIEVTGEKSKLDAFLQALRDEDLIEVVRSGTTGILRGERGLHV

SEQ ID NO: 6928 - DNA, 561 bp, Silicibacter pomeroyi DSS-3
  CDS (1)..(561): transl_table=11
atgtctgccctacacatcaagaaaggctcgtcgagccactccgcctacaacctgcgcccgacattctcggacgtggccgagcggcacaccatcgcccttctggtcgagaacgagccgggtgtcctggcgcgcgtcatcggcctgttctcgggacgtggctacaacatcgaaagcctgaccgtcgccgaggtggaccataccggccacctgagccgcatcaccatcgtgaccaccggaaccccgcaggtgatcgaacagatcaaggcgcagctgggccggatcgtctcggtccgcgacgtgcatgacctgacggtcgagggccgctcggtcgagcgcgaactggcaatgctcaaggtggtgggcagtggcgacaagcgggtcgaagcgctgcgtctggcggatatcttccgcgccaatgtggtcgacagtaccctgtcgagctttgtcttcgaaatcaccggcgcaccggagaagatcgacgccttcgccgatctgatgcggccgctcggccttgccgaaatcgcacgcacaggtgtcgcggcactgctgcgcggcgactga

SEQ ID NO: 6929 - protein, 186 aa, Silicibacter pomeroyi DSS-3
MSALHIKKGSSSHSAYNLRPTFSDVAERHTIALLVENEPGVLARVIGLFSGRGYNIESLTVAEVDHTGHLSRITIVTTGTPQVIEQIKAQLGRIVSVRDVHDLTVEGRSVERELAMLKVVGSGDKRVEALRLADIFRANVVDSTLSSFVFEITGAPEKIDAFADLMRPLGLAEIARTGVAALLRGD

SEQ ID NO: 6930 - DNA, 492 bp, Pseudomonas fluorescens Pf-5
  CDS (1)..(492): transl_table=11
atgcggcacattatttccttgcttctggaaaacgaaccgggtgctctgtctcgtgttgtaggtctgttctcgcaacgcaactacaacatcgaaagcctgacggtggcgccgactgaagacccgacactgtcgcgtctgaccctgaccaccgttggccatgacgagatcatcgagcagatcaccaagaacctgaacaagctggttgaggtggtgaagctggtagacctgtcggaaagcgcgcacatcgagcgtgaactgatgctggtcaagatcaaggccactggcgcccagcgcgccgaggtcaagcgcactaccgatatttaccgtgggcagatcgttgatgtcagcgccagcgtgtataccgttcaactgaccggtaccagcgacaagctcgacagcttcattcaatcgatcggcaccgcatcgattctggaaaccgtacgcagtggcgtcaccgggattgcccgtggcgacaaagtactgagcatctaa

SEQ ID NO: 6931 - protein, 163 aa, Pseudomonas fluorescens Pf-5
MRHIISLLLENEPGALSRVVGLFSQRNYNIESLTVAPTEDPTLSRLTLTTVGHDEIIEQITKNLNKLVEVVKLVDLSESAHIERELMLVKIKATGAQRAEVKRTTDIYRGQIVDVSASVYTVQLTGTSDKLDSFIQSIGTASILETVRSGVTGIARGDKVLSI

SEQ ID NO: 6932 - DNA, 498 bp, Psychrobacter arcticus 273-4
  CDS (1)..(498): transl_table=11
atgcaacaacaacatctgatttcggtattgatggaaaacgaagcgggttcgttgtcgcgtgtagtcggcttgttctcacaacgtggctacaatatcgaaacgctaaacgtcgcgcctactgatgatccaagtatttcacgtctcacagtaacgacaattacgtcacctgaaaaaatagaacaaatcaccaagcaattgcataaattgattgaagtggttaaagtgcttaatctctcagataccgtacacgtcgaacgcgagttgatgctaatcaaagtacgtgcgacgggcggtgtacgtgaagaaatcaaacgcagtgcagatatctttcgtgctcaaatcgttgacgtcaatgccagtttatatacgattcaaatcgttggtgataaagctaagctcgatggttttattgatgtcattggtcgtgaacgtatcatggaagtagtacgctcaggcgtcattggtatcgctcgcggcgataaaacgctaagtctataa

SEQ ID NO: 6933 - protein, 165 aa, Psychrobacter arcticus 273-4
MQQQHLISVLMENEAGSLSRVVGLFSQRGYNIETLNVAPTDDPSISRLTVTTITSPEKIEQITKQLHKLIEVVKVLNLSDTVHVERELMLIKVRATGGVREEIKRSADIFRAQIVDVNASLYTIQIVGDKAKLDGFIDVIGRERIMEVVRSGVIGIARGDKTLSL

SEQ ID NO: 6934 - DNA, 498 bp, Colwellia psychrerythraea 34H
  CDS (1)..(498): transl_table=11
atgcgtagaattttagcgattttgatggagaatgaacctggttcactatcacgtattgttggcttattctctcaacgtgcttttaatattgaaagtttaaccgttgcgccaactgatgataatagcttatctcgaatgaccattgcgactaagggtgatgacaaagtattagagcaaattgttaaacaagtaaataagctgattgatgtgattaaaatcactgatattaccgatagaaaacacattgaacgtgaattactcttagtaaaagtggcggctatgaatgataagtcacgtactgaggtaacacggataacggatatatttcgcggtaatattatagatattggcaagcaagtttatactgttcaacttaccggtgatgcggaaaaacttaatgcctttattaatgccttacaaaacgagactgaaattattgagtcggctcgttcaggttgtgttggtatggcacgtggcgatcaagctttacggatttaa

SEQ ID NO: 6935 - protein, 165 aa, Colwellia psychrerythraea 34H
MRRILAILMENEPGSLSRIVGLFSQRAFNIESLTVAPTDDNSLSRMTIATKGDDKVLEQIVKQVNKLIDVIKITDITDRKHIERELLLVKVAAMNDKSRTEVTRITDIFRGNIIDIGKQVYTVQLTGDAEKLNAFINALQNETEIIESARSGCVGMARGDQALRI

SEQ ID NO: 6936 - DNA, 492 bp, Dechloromonas aromatica RCB
  CDS (1)..(492): transl_table=11
atgcgacacatcatttccatcctgattgaaaacgaatcgggcgcattgtcccgagtggcaggactgttctctgcccgtggttacaacattgatacgctcaccgtggcaccgacggaagatccctcgttgtcacggatgaccatcctgaccaggggttccgacgaggtcctcgaacagatcaccaagcagctcaacaagctggttgatgtggtcaaggtggttgatctctccgaggctgctcatgtcgagcgcgaactgatgctgatcaaggttcgcgccaccggcaaggaccgcgaagagatgaagcgcatggccgatattttccgtggtcgcatcatcgacgtcacggaatcgacctatgtcatcgagttgactggtgcaagctccaagctcgactccttcattgccgcgctcgatgccggcctgattctcgaaaccgtccgtaccggtgtctgtggcatcggccgtggcgatcgtattcttaaagtctaa

SEQ ID NO: 6937 - protein, 163 aa, Dechloromonas aromatica RCB
MRHIISILIENESGALSRVAGLFSARGYNIDTLTVAPTEDPSLSRMTILTRGSDEVLEQITKQLNKLVDVVKVVDLSEAAHVERELMLIKVRATGKDREEMKRMADIFRGRIIDVTESTYVIELTGASSKLDSFIAALDAGLILETVRTGVCGIGRGDRILKV

SEQ ID NO: 6938 - DNA, 525 bp, Thermobifida fusca YX
  CDS (1)..(525): transl_table=11
atgagtctgcacacgctgtccgtcctggtggaggacacgcctggagtgctcgctcgcgtagcctccctgttctcccgtcgcggcttcaacatccactccctcacggtgggacccaccgaatatgaggggctgtcccgcatgacaatcgtggtcaactgcgaccgccatcccctggagcaggtgaccaagcagctcaacaagctggtcaacgtcatcaaaatcgtcgagatggaccccgaggcgtcggtgcgtcgggaactgctgctcatcaaggtcaaagccgattcgagcaaccgttcccacgtgctggagacggcccagttgttccgcgccaacgtcgtcgacgtgaacccggacgtggtggtcatcgaggccaccgggcaaccggagaagctccaagcgctgatccgtaacctggagccgttcgggatcaaggaactagtgaagtcgggagtggtggctctcggccgcggtcccaggtccatcactgaccggtcgctgcgcgtggtcgagcgcagcgcctga

SEQ ID NO: 6939 - protein, 174 aa, Thermobifida fusca YX
MSLHTLSVLVEDTPGVLARVASLFSRRGFNIHSLTVGPTEYEGLSRMTIVVNCDRHPLEQVTKQLNKLVNVIKIVEMDPEASVRRELLLIKVKADSSNRSHVLETAQLFRANVVDVNPDVVVIEATGQPEKLQALIRNLEPFGIKELVKSGVVALGRGPRSITDRSLRVVERSA

SEQ ID NO: 6940 - DNA, 486 bp, Methanosarcina barkeri str. Fusaro
  CDS (1)..(486): transl_table=11
atgaaacatacactggcagtccttgtggaaaataggtctggagtcctttccagggtggcttcgctcttttcaagacgcggatacaatatcgaaagcctggctgttggagtcacagaggaccccaaaacctccagaatgactatagtagttgatggagatgaccatgtgctcgaacaggttacaaaacagcttaacaaactcgttgatgtgatcaaagtttcggacatcggaggagatgactctgtagaaagggaactcgccctcattaaagtttcagccgacgtgagtgcgaggaccgaaattatccagattgcaaatattttcagggcaaggatagtggacgtagctcctaaatccataactattgaagtaaccggggatgaagccaaaattcaggcaattgaaaaactcctcaggcagttcgggattaaggagatggtccggacaggtaagattgctctggttcgtggcccaaagaaggtttaa

SEQ ID NO: 6941 - protein, 161 aa, Methanosarcina barkeri str. Fusaro
MKHTLAVLVENRSGVLSRVASLFSRRGYNIESLAVGVTEDPKTSRMTIVVDGDDHVLEQVTKQLNKLVDVIKVSDIGGDDSVERELALIKVSADVSARTEIIQIANIFRARIVDVAPKSITIEVTGDEAKIQAIEKLLRQFGIKEMVRTGKIALVRGPKKV

SEQ ID NO: 6942 - DNA, 498 bp, Thiobacillus denitrificans ATCC 25259
  CDS (1)..(498): transl_table=11
atgagcacccgccatatcatttcgctcttgatggagaacgaggcgggtgcgctgtcgcgcgtcgccggtctcttctccgcgcgcgcctacaacatcgaatcgctcacggtcgcaccgaccgaggatgccacgctctcgcgcatgaccatcgtcacggtcggctcggaagacatcatcgagcagatcaccaagcagctgaacaagctcgtcgacgtcatcaaggtcatggatctgaccgaaggccgtcacatcgagcgcgagctcatgctggtcaaggtcaaggcgacgggcctcgggcgcgaggagatgaagcgcaccgccgacatcttccgcgggcgcatcatcgacgtcaccgattcgacctacacgatcgaactgaccggcaccggttccaagctcgacgcctttctcgaggcgatcgatcctgccctgatcatcgagaccgtgcgcaccggagcgtccggcatcggacgcggtgagcgcagcctcaaagtctga

SEQ ID NO: 6943 - protein, 165 aa, Thiobacillus denitrificans ATCC 25259
MSTRHIISLLMENEAGALSRVAGLFSARAYNIESLTVAPTEDATLSRMTIVTVGSEDIIEQITKQLNKLVDVIKVMDLTEGRHIERELMLVKVKATGLGREEMKRTADIFRGRIIDVTDSTYTIELTGTGSKLDAFLEAIDPALIIETVRTGASGIGRGERSLKV

SEQ ID NO: 6944 - DNA, 561 bp, Rhodobacter sphaeroides 2.4.1
  CDS (1)..(561): transl_table=11
atggcgccgctcaacatcaagcagggatcgacccagcattcggcctacgatctgcgcgaccccaattcggacgtcatcgagcagcatacgctggcgctcgtggtggacaacgagagcggggttctcgcgcgggtgatcgggctcttctcgggccgcggctacaacatcgacagcctgaccgtggccgaggtggaccataccggccaccgcagccgcatcaccatcgtcacccgcggcacgcccgcggtgatcgagcagatcaaggcgcagctggcgcgtctggtgccggtgcatgaggtgcacgacctgacggtggaaggcccctcggtgcagcgcgaactggcgctgttcaaggtctccggcaagggcgaggcgcggatcgaggcgctgcggctggcggagatcttccgcgccaaggtggtcgattcgacgctggagagcttcgtgttcgagatcaccggcacgccggagaagatcgacgctctggccgatctcatgcggccgctgggcctgcgcgagatggcgcggaccggcgttgcggcgctctcgcgcgggatctga

SEQ ID NO: 6945 - protein, 186 aa, Rhodobacter sphaeroides 2.4.1
MAPLNIKQGSTQHSAYDLRDPNSDVIEQHTLALVVDNESGVLARVIGLFSGRGYNIDSLTVAEVDHTGHRSRITIVTRGTPAVIEQIKAQLARLVPVHEVHDLTVEGPSVQRELALFKVSGKGEARIEALRLAEIFRAKVVDSTLESFVFEITGTPEKIDALADLMRPLGLREMARTGVAALSRGI

SEQ ID NO: 6946 - DNA, 513 bp, Carboxydothermus hydrogenoformans Z-2901
  CDS (1)..(513): transl_table=11
atgcggcataccctggcagtattggtggaaaacaatcctggggttttagcaagggtggcggggctttttagccgccggggctataacattgatagccttgcggtgggcaggacggaaaatccggatatttcccggatgaccattgtggtggaaggggatgaccgggttttagagcaggtagtaaagcaactgagaaagttagttgatgtaatcaaagttcaggacattacctccgaacagtatgtgagccgggagcttttgcttttaaaagttcatgcggattccaatacccggggggaaattatgcaaatagtagaaatcttccgggcccggattgtggatattgggcccaaaaccctgaccattgaagctaccggtgatgaagataaaatcgaagctattgaaaatgcattaaggccttttggtattaaagagctggtacgcaccggaaaaattgccctgctgcggggctccagaacttcaaatataaatggagtaaaggaggaggaataa

SEQ ID NO: 6947 - protein, 170 aa, Carboxydothermus hydrogenoformans Z-2901
MRHTLAVLVENNPGVLARVAGLFSRRGYNIDSLAVGRTENPDISRMTIVVEGDDRVLEQVVKQLRKLVDVIKVQDITSEQYVSRELLLLKVHADSNTRGEIMQIVEIFRARIVDIGPKTLTIEATGDEDKIEAIENALRPFGIKELVRTGKIALLRGSRTSNINGVKEEE

SEQ ID NO: 6948 - DNA, 492 bp, Geobacter metallireducens GS-15
  CDS (1)..(492): transl_table=11
atgagacatacaatcaccgttctggtggaaaacgaatttggtgtgttatcccgcgttgccggccttttttccggccgcggcttcaatatcgactctctctcggtggctcccacgaacgatgagaccatctcacggatgactattgtgacccgcggggacgatcagattcttgagcagatatccaagcaactcaataagctcatcgacgtcatcaaggtaatcgactttaccgatggcgaggtggtcgagcgggagatggcgctcatcaaggttaccgccgaggattccgcacgggctgaagtcctcaggattgccgatatcttccgggcgaagatcatagacgtaacccccaaatcgtttaccattgaggcgactggggccccggcaaaaatcgacgccattctggaactcctccgccccctggggctcaaggagttggttaggaccgggccggttgccataggccgcggtgccaaggcgttgaagggttag

SEQ ID NO: 6949 - protein, 163 aa, Geobacter metallireducens GS-15
MRHTITVLVENEFGVLSRVAGLFSGRGFNIDSLSVAPTNDETISRMTIVTRGDDQILEQISKQLNKLIDVIKVIDFTDGEVVEREMALIKVTAEDSARAEVLRIADIFRAKIIDVTPKSFTIEATGAPAKIDAILELLRPLGLKELVRTGPVAIGRGAKALKG

SEQ ID NO: 6950 - DNA, 528 bp, Rhodospirillum rubrum ATCC 11170
  CDS (1)..(528): transl_table=11
gtgcccaatctgaatgcggccagcgaaccggagatcgccacccataccatcgccgttctggtcgacaacgagtcgggcgttctggcccgggtcatcggcctgttttccggtcgcggctataacatcgaaagcctgaccgtggccgaggtcgatgtcgacgagcaactgtcgcgcatcaccctggtgaccagcggcacgccgatgatcatcgaacagatcaaggcccagcttggccggctggtgcccgttcacaaggtctcggacctgacggtggaaggcccgcatgtgtcgcgcgaattggcgctgatcaaggtggcgggcaccggcgagaagcgcgtcgagtccctgcgcatcgccgatatcttccgcgcccgggttgtcgacagctccaacgagtcgttcgttttcgagatcgtcggcaagaccgaaaagatcaacgccttcatcggtttgatggagccgctcgggctgatcgacgtcgcgcgcaccggcgttgccgccatcgcccgcggcggtcagccgttttaa

SEQ ID NO: 6951 - protein, 175 aa, Rhodospirillum rubrum ATCC 11170
MPNLNAASEPEIATHTIAVLVDNESGVLARVIGLFSGRGYNIESLTVAEVDVDEQLSRITLVTSGTPMIIEQIKAQLGRLVPVHKVSDLTVEGPHVSRELALIKVAGTGEKRVESLRIADIFRARVVDSSNESFVFEIVGKTEKINAFIGLMEPLGLIDVARTGVAAIARGGQPF

SEQ ID NO: 6952 - DNA, 519 bp, Moorella thermoacetica ATCC 39073
  CDS (1)..(519): transl_table=11
atgaagcgcaccctttcagtcctggtggaaaaccgtcccggcgtcctgacccgggtggccggtcttttcagtcgccggggttataacattgacagcctggctgtaggtcgtaccgaaaaccctgctatttcccgcatgaccattgtcgttgatggtgacgagcagattatcgaacaggtcagtaaacagctcaacaagctcatagatgtcatcaagatcagtgacatcaccaacgacccctacgtcgggcgggaactgatccttattaaagtaaacgccgacccttccgtacggggagagattatgcagattgtcgatatcttccgggcccggatcgtcgatattgcccgtaacagcctaattatcgaagccaccggcgatgccgacaaaatcgacgccatcgaaaactccctgcgacccttcggcatccgggaggtagtccggacgggcaagatcgccatgctccggggggcgaagaccaggggaatggaggccagcggcaatggcacaggagactag

SEQ ID NO: 6953 - protein, 172 aa, Moorella thermoacetica ATCC 39073
MKRTLSVLVENRPGVLTRVAGLFSRRGYNIDSLAVGRTENPAISRMTIVVDGDEQIIEQVSKQLNKLIDVIKISDITNDPYVGRELILIKVNADPSVRGEIMQIVDIFRARIVDIARNSLIIEATGDADKIDAIENSLRPFGIREVVRTGKIAMLRGAKTRGMEASGNGTGD

SEQ ID NO: 6954 - DNA, 501 bp, Syntrophus aciditrophicus SB
  CDS (1)..(501): transl_table=11
atgagcattgaagaacgtaccatcacgatcctggttaaaaatgaaccgggggtgctgtcgcgggtcgcgggagttttcagcggacggggatataacatcaagaccctgtgcgtcgcggaaacgacgaatccggaaatctcgcggatcactttaaccagcaatgccgatgcggattttacggaaaagatcaaaaagcagcttgataaactggttgatgtcgtggatgtcctggactacacaggcgaacgttttcttaaaagggaaatgatgctgatcggtctgagaattaccccggatcgctatgcggaacttctccaggccgtgaacactttcggatgccggatcataggtatgcagccggattattacatcatcgagacatcgggccgccggtctgaaaatgatgcagtttttaagtattttcaaactttcgatgtcgaaatgatgaaccggaccggttccatcgcccttccgcggcacccgcagaaggattccgcatga

SEQ ID NO: 6955 - protein, 166 aa, Syntrophus aciditrophicus SB
MSIEERTITILVKNEPGVLSRVAGVFSGRGYNIKTLCVAETTNPEISRITLTSNADADFTEKIKKQLDKLVDVVDVLDYTGERFLKREMMLIGLRITPDRYAELLQAVNTFGCRIIGMQPDYYIIETSGRRSENDAVFKYFQTFDVEMMNRTGSIALPRHPQKDSA

SEQ ID NO: 6956 - DNA, 525 bp, Frankia sp. CcI3
  CDS (1)..(525): transl_table=11
atgacccgccataccctgtccgtgctggtggagaacaagcccggggtgctggcccgggtctcgggcctgttctcccggcgcgggttcaacatcgagtcactcgcggtcgggccgaccgagcagcttgacatctcccggatgacgatcgtcgtcgtcgtggaggacctgccgctggaacaggtgaccaagcagctcaacaagctgatcaatgttttgaagatcgtcgagatggacacctccgcctcggtgcaacgtgagctgatgctcgtgaaggtgcgcgccgacctgtcggtgcgatcccaggtcctcgagacggtcgccctgttccgtgccaaggtggtcgacgtcgcccaggacgccgtcaccatcgaggcgacgggaacccgcgacaagctggacgccctcatccgcatgctggagccgttcggaatccgggaactggtccagtccggcctggtggcactcggccgcggatcgcgttcgatcaccgatcgcagcctgcgagcagtcgaccgtccggcctga

SEQ ID NO: 6957 - protein, 174 aa, Frankia sp. CcI3
MTRHTLSVLVENKPGVLARVSGLFSRRGFNIESLAVGPTEQLDISRMTIVVVVEDLPLEQVTKQLNKLINVLKIVEMDTSASVQRELMLVKVRADLSVRSQVLETVALFRAKVVDVAQDAVTIEATGTRDKLDALIRMLEPFGIRELVQSGLVALGRGSRSITDRSLRAVDRPA

SEQ ID NO: 6958 - DNA, 519 bp, Novosphingobium aromaticivorans DSM 12444
  CDS (1)..(519): transl_table=11
atgatgcacatcgctcaggaggcgcaggagcgccacgtcctcaccatcactgtcgacaacgaggcaggcatcctcgccaagatcgccgggctcttcaccgcgcgcggctataatatcgacagcctgaccgtggccgacatcacagacggccacgacgtcagccgcatcaccatcgtgacgcacggcccgccgccgatcatcgaccagatccgcgcgcagctcgaacgactcgtgccggtccacaaggtcaccgacctcaccgaagtcggccccttcgtcgagcgcgagctggccctgatcaaggtctcgggcaagggcgagaaccgcgtcgaggcgctgcgcctcgccgacgtgttccgcgccaaggtggtcgacaccacgacctccagcttcatcttcgagctgaccggcgcgccggacaagatcgacagcttcgtctcgctgatgaaggagcttggcctcgtcgaggtcggccgcaccggcatcgtcggcatgatccgcggcgccaccgccgcctga

SEQ ID NO: 6959 - protein, 172 aa, Novosphingobium aromaticivorans DSM 12444
MMHIAQEAQERHVLTITVDNEAGILAKIAGLFTARGYNIDSLTVADITDGHDVSRITIVTHGPPPIIDQIRAQLERLVPVHKVTDLTEVGPFVERELALIKVSGKGENRVEALRLADVFRAKVVDTTTSSFIFELTGAPDKIDSFVSLMKELGLVEVGRTGIVGMIRGATAA

SEQ ID NO: 6960 - DNA, 480 bp, Desulfitobacterium hafniense Y51
  CDS (1)..(480): transl_table=11
atgctgcatactttagcggttcttgtcgaaaataaccctggtgtattgaccagagtggccggattgttcgcccgacgggcctacaatatcaacagtctctcagtgtgtcagacggagcatcccggcatttcccggatgaccatcgtcgtcgatggggatgatacagtgattgagcaggtttccaaacagctacataagctggtggtggtccataaagtgacagacctgaccaacgagacggtggtggatcgggagctggctttaatccgcatcaaggtgaaagcggatacccgcctggaagtcctgcaaatcgtggacgttttccggggccgggtagtggatatgggacgaagcaacctgaccgtagaactcaccggggacgaagaaaaaatcgatgccttcgtgaaaaccatacgcccctttgggctgatggaactggtgaggactgggaagattgctataacccgtttggaaagctaa

SEQ ID NO: 6961 - protein, 159 aa, Desulfitobacterium hafniense Y51
MLHTLAVLVENNPGVLTRVAGLFARRAYNINSLSVCQTEHPGISRMTIVVDGDDTVIEQVSKQLHKLVVVHKVTDLTNETVVDRELALIRIKVKADTRLEVLQIVDVFRGRVVDMGRSNLTVELTGDEEKIDAFVKTIRPFGLMELVRTGKIAITRLES

SEQ ID NO: 6962 - DNA, 492 bp, Saccharophagus degradans 2-40
  CDS (1)..(492): transl_table=11
atgagaagaatcatatctttattaatggaaaacgaaccaggcgcattgtctcgtgtagttggcttgttttctcagcgcggttataacattgagtctcttactgtggccccaaccgaagacaacaccttgtctcgcctaacgctaaccactatgggagacgaccacaaaatagagcagataaccaagcatctcaatcgcttgatagacgtggttaagctggtggaccttacagaaggtgctcacatagagcgagagctcatgttggttaaagtgcgcgcgacaggcgctcagcgagcagaagttaagcgttgtgtggatattttccgcggtcaaatagtggatgtaaccgcatcggtttacaccattcaaataacgggtgcgagtgaaaagcttgactcgtttttccaggctgttggcgaagcctctattgttgaagttgtgcgttcaggcgtatctggcatcgcgcgcggcgaaaaagtactaagtctctaa

SEQ ID NO: 6963 - protein, 163 aa, Saccharophagus degradans 2-40
MRRIISLLMENEPGALSRVVGLFSQRGYNIESLTVAPTEDNTLSRLTLTTMGDDHKIEQITKHLNRLIDVVKLVDLTEGAHIERELMLVKVRATGAQRAEVKRCVDIFRGQIVDVTASVYTIQITGASEKLDSFFQAVGEASIVEVVRSGVSGIARGEKVLSL

SEQ ID NO: 6964 - DNA, 492 bp, Methylobacillus flagellatus KT
  CDS (1)..(492): transl_table=11
atgaaacatatcatctccatattgatggaaaacgaagctggcgccctttcccgcgttgctggcctgttctccgcgcgtgcatacaatatcgaatccctgaccgtggcgcccaccgaggatgccacgctgtcacgcatgaccatcgtcacctccggatcggatgaagtgatcgagcagatcatcaaacagctcaacaagctggtggatgtggtcaaggtactggacctcaacgatggccgctttatcgagcgtgagctgatgttggtcaaggtaaaggcgaccgggtcgttccgcgaagaaatgaaacgcatgtgcgacattttccgcggtcgcatcatcgacgtagccgatagcagctacaccatcgaaatgacaggctccggctccaagctggatgctttccttgaagccctggacaaaggtgccatcctggagaccgtccgcaccggcgcctccggcattggtcgcggcgacaggatactcaagctttaa

SEQ ID NO: 6965 - protein, 163 aa, Methylobacillus flagellatus KT
MKHIISILMENEAGALSRVAGLFSARAYNIESLTVAPTEDATLSRMTIVTSGSDEVIEQIIKQLNKLVDVVKVLDLNDGRFIERELMLVKVKATGSFREEMKRMCDIFRGRIIDVADSSYTIEMTGSGSKLDAFLEALDKGAILETVRTGASGIGRGDRILKL

SEQ ID NO: 6966 - DNA, 492 bp, Burkholderia xenovorans LB400
  CDS (1)..(492): transl_table=11
atgagacacatcatttccgtcctgctggaaaacgaaccgggcgcgttatcacgcgtggttggtctcttctcggcacgcggctacaacattgaaaccttgacggtggctccgaccgaagaccgttcgctgtcgcgcatgaccatcgtctccattggctcggacgacgtgatcgaacagatcacgaagcatctgaaccgcctgatcgaggtggtgaaagtggtcgaccttaccgagggcgcccacatcgagcgcgagctgatgttgatcaaggtgagggcggtcggcaaggaacgtgaggagatgaagcggatgtcggatattttccgcggccgcatcatcgacgtcaccgaaaagacctacacgatcgaactgacgggcgcgagcgacaagctcgatgccttcatcgaagggatcgacgctacggcgattctcgaaacggtccgcacgggcagttcgggcattggtcgcggcgagcgcattctgaaggtgtga

SEQ ID NO: 6967 - protein, 163 aa, Burkholderia xenovorans LB400
MRHIISVLLENEPGALSRVVGLFSARGYNIETLTVAPTEDRSLSRMTIVSIGSDDVIEQITKHLNRLIEVVKVVDLTEGAHIERELMLIKVRAVGKEREEMKRMSDIFRGRIIDVTEKTYTIELTGASDKLDAFIEGIDATAILETVRTGSSGIGRGERILKV

SEQ ID NO: 6968 - DNA, 492 bp, Ralstonia metallidurans CH34
  CDS (1)..(492): transl_table=11
atgcgacacatcatctcggtcctgctggagaatgaacccggcgcgctgtcgcgcgtggtgggcctgttttcggcacgtggatacaacatcgagacgctgacggtggcacccaccgaagacgcgtcgctgtcgcggatgaccatcgtcaccaccggttcggacgacgtgatcgagcagatcaccaagcacctgaaccgtctggtggaagtggtcaaagtggtggacctgaccgaaggcgcgcacatcgagcgcgagctgatgctcgtgaaggtgcgtgccgtaggcaaggagcgcgaggaaatgaagcgcaccgccgacattttccgtggccgcatcatcgacgtgaccgaaaagacgtacaccatcgagctgaccggcaacggcggcaagctggatgcgttcctcgatgccatcgaccgcaccgcgatcctggaaaccgtccgtaccggcggttcgggaatcggccgcggcgagcgcatcctgaaggtctga

SEQ ID NO: 6969 - protein, 163 aa, Ralstonia metallidurans CH34
MRHIISVLLENEPGALSRVVGLFSARGYNIETLTVAPTEDASLSRMTIVTTGSDDVIEQITKHLNRLVEVVKVVDLTEGAHIERELMLVKVRAVGKEREEMKRTADIFRGRIIDVTEKTYTIELTGNGGKLDAFLDAIDRTAILETVRTGGSGIGRGERILKV

SEQ ID NO: 6970 - DNA, 504 bp, Rhodococcus sp. RHA1
  CDS (1)..(504): transl_table=11
gtgagcaccagccacaccctcagtgttctcgtcgaggacaagccgggcgtgctggccagggtggccgcgctgttctcgcgtcgtgggttcaacatcgagtcgctcgccgtcggtggcaccgagcttcccgagatctcccgcatgaccatcgtcgtgaccgtcgacgagttcccgctcgagcaggtgaccaagcagctcaacaagctcatcaacgtcatcaagatcgtcgagcaggacggtgaggcctccgtcgcccgcgagctggtgctcatcaaggtgcgagccgacgccagcgtgcgcacgcaggtgatcgagacggtgaatctgttccgcgccaaggtgatcgacgtctccccggagtcggtcacgatcgaggcgactgggacgcgatccaagctggatgcgctgctgcggatgctcgatccgtacggtatccgggagatcgtgcagtccggggtcgtggccgtgggacgggggccgaagtccatcacggccactcgctag

SEQ ID NO: 6971 - protein, 167 aa, Rhodococcus sp. RHA1
MSTSHTLSVLVEDKPGVLARVAALFSRRGFNIESLAVGGTELPEISRMTIVVTVDEFPLEQVTKQLNKLINVIKIVEQDGEASVARELVLIKVRADASVRTQVIETVNLFRAKVIDVSPESVTIEATGTRSKLDALLRMLDPYGIREIVQSGVVAVGRGPKSITATR

SEQ ID NO: 6972 - DNA, 519 bp, Trichodesmium erythraeum IMS101
  CDS (1)..(519): transl_table=11
atgaaacacactctttctgtattagttgaagacgaagcgggagttttaacccgtattgctggtttatttgcccgtcgtggctttaatattgaaagcctagcagttgggccagcagaacaaaccggtgtgtctcgaattacaatggtagtacctggggataatggaattattgaacagttaaccaagcaactatataagttggttaatgttttgaaagtacacgatattacagctgctccctgtgtagaacgagaattaatgttactcaagattaatgctactacaagtatgcgctcagaagtgatagagatcgcaactatttttcgggcgcgagtagtagacgtaggagaggactcattaactattgaagtagtgggagacccaggaaaaatggtagctattgtccaaatgctttctaaatacggtattcgtgaaattgcgagaacaggaaaaatagctttaactcgtgagtctggtgttaatactgaatttcttaaacttcaaacttcagaggtataa

SEQ ID NO: 6973 - protein, 172 aa, Trichodesmium erythraeum IMS101
MKHTLSVLVEDEAGVLTRIAGLFARRGFNIESLAVGPAEQTGVSRITMVVPGDNGIIEQLTKQLYKLVNVLKVHDITAAPCVERELMLLKINATTSMRSEVIEIATIFRARVVDVGEDSLTIEVVGDPGKMVAIVQMLSKYGIREIARTGKIALTRESGVNTEFLKLQTSEV

SEQ ID NO: 6974 - DNA, 495 bp, Alkalilimnicola ehrlichei MLHE-1
  CDS (1)..(495): transl_table=11
atgcggcatatcatatcgatcctggtggagaacgagttcggtgcgctctcgcgtatcgccgggctgttcacggcaaggggctacaacatcgagtgcctcaccgtagcccccaccgacgaccccaccctgtcgcgcatgacgctggtcaccatcggtgacgatcgcatcatcgagcagatcatcaagcagctcaacaaactgctggatgtggtcaaggtcatggacatgaccgagggccggcacatcgaacgcgagatgatgctcatcaaggtggccgccgcgggcgcggaccagcgtgaggagttcaagcgtctgaccgatatcttccgcgggcgcatcctcgatgtcaccgaccgcatctacaccatcgagctcaccgggcccggcgagaagctggacgcctttctcgatgtgttggggcagagcgccatcctcgaggtggtgcgctcgggggtcatcggtattgcccgcggtgagaagcacctgcgggtctga

SEQ ID NO: 6975 - protein, 164 aa, Alkalilimnicola ehrlichei MLHE-1
MRHIISILVENEFGALSRIAGLFTARGYNIECLTVAPTDDPTLSRMTLVTIGDDRIIEQIIKQLNKLLDVVKVMDMTEGRHIEREMMLIKVAAAGADQREEFKRLTDIFRGRILDVTDRIYTIELTGPGEKLDAFLDVLGQSAILEVVRSGVIGIARGEKHLRV

SEQ ID NO: 6976 - DNA, 567 bp, Hyphomonas neptunium ATCC 15444
  CDS (1)..(567): transl_table=11
atgagcgatggcacagccacacccggcccagcgccgaaatctgcctattttctggcccatgaggatgaggaagttgagcgccgcacgctggccgtcatcgtcgataacgagccgggcgttctggcgcgcgtggtcgggctgttctccggacgcggatataatatcgactcgctgacggtcgctgaagtggacgccagccagcaccggtcgcgcatcacgattgttacccagggcacggcgcacattcttgagcagatcgaggcgcagctgctgcgcattgtgccggtggccgaggtaatcgacatcaccaattccaagcgcggcattgagcgcgagttggcgttggtgaaggtggcaggcacgggcgagaagcgggtcgaagcgctgcggatcggcgagattttccgggcgcatgtgatcgacacgacaaatgagagcttcatctttgaagtgaccggcgcctccgacaagctgactcagtttgtcgatctgatgcgccccctgggcctggttgaagtgagccgcacaggcgttctctcgatcaagcgcggcaaggagaagggatga

SEQ ID NO: 6977 - protein, 188 aa, Hyphomonas neptunium ATCC 15444
MSDGTATPGPAPKSAYFLAHEDEEVERRTLAVIVDNEPGVLARVVGLFSGRGYNIDSLTVAEVDASQHRSRITIVTQGTAHILEQIEAQLLRIVPVAEVIDITNSKRGIERELALVKVAGTGEKRVEALRIGEIFRAHVIDTTNESFIFEVTGASDKLTQFVDLMRPLGLVEVSRTGVLSIKRGKEKG

SEQ ID NO: 6978 - DNA, 573 bp, Rhizobium leguminosarum bv. viciae 3841
  CDS (1)..(573): transl_table=11
atgaacgcacacctacagcccacgggctccgcttacttcatctcgccggaaacggcggcggtcgaaagccacacgctttcggttcttgtcgacaacgaaccgggcgttcttgcccgggtcatcggtctgttctccggccgcggctacaatatcgagagcctgacggtctccgagaccgagcatcaggcgcatctttcccgcatcaccgtcgtcacacgcggtacgccgcaggtgctggagcagatcaaggcgcagctggagcgcatcgtgccggtgcatcgcgtcgtcgacctgacggtgcgcgcccgcgaactcggccaggaccggccgatcgagcgcgaagtggcgctgatcaaggtgatcggcgagggcgagatgcgcgccgagaccctgcgccttgccgatgcttttcatgccaaggtagtggatgcgaccatcggtcacttcattctggagatcaccggcaaatcgtcgaagattgatcagtttgtggcgatcatgaagccgctcggcctcatcgaggtgtgccgtaccggcattgcggcgatgaaccgcggcgtgcagggcatgtaa

SEQ ID NO: 6979 - protein, 190 aa, Rhizobium leguminosarum bv. viciae 3841
MNAHLQPTGSAYFISPETAAVESHTLSVLVDNEPGVLARVIGLFSGRGYNIESLTVSETEHQAHLSRITVVTRGTPQVLEQIKAQLERIVPVHRVVDLTVRARELGQDRPIEREVALIKVIGEGEMRAETLRLADAFHAKVVDATIGHFILEITGKSSKIDQFVAIMKPLGLIEVCRTGIAAMNRGVQGM

SEQ ID NO: 6980 - DNA, 492 bp, Pseudomonas aeruginosa UCBPP-PA14
  CDS (1)..(492): transl_table=11
atgcgacacatcatttccctgctgctggaaaacgagccaggcgcattgtcccgcgtggtcggcctgttctcccaacgcaactacaacatcgaaagcctgaccgtggcgccgaccgaggacccgaccctgtcgcgtctgacgctgaccaccgtggggcacgatgaggtgatcgagcagatcaccaagaacctcaacaagctgatcgaagtggtcaagctggtggacctgtcggaaagcgcccatatcgagcgcgagctgatgctggtgaaggtcaaggccacgggcgcccagcgcgccgaggtcaagcgcaccaccgatatcttccgtgggcagatcgtcgacgtcaccagtagcgtctataccgtgcaactggcgggtaccagcgacaaactggacagcttcatccaggccatcggcactgcgtcgatcctggaagtggtccgcagtggcgtcactggcatcgcccgtggcgacaagactctgagcatctga

SEQ ID NO: 6981 - protein, 163 aa, Pseudomonas aeruginosa UCBPP-PA14
MRHIISLLLENEPGALSRVVGLFSQRNYNIESLTVAPTEDPTLSRLTLTTVGHDEVIEQITKNLNKLIEVVKLVDLSESAHIERELMLVKVKATGAQRAEVKRTTDIFRGQIVDVTSSVYTVQLAGTSDKLDSFIQAIGTASILEVVRSGVTGIARGDKTLSI

SEQ ID NO: 6982 - DNA, 522 bp, Solibacter usitatus Ellin6076
  CDS (1)..(522): transl_table=11
atgctgcaagttatctcactactgctcgaaaacaagcccggagcgctgatgcgcgtaaccgggttgctgacccagcgcggctacaacatcgagagcctcacggtggcgcgcacgctggaccccgaactttcccgaatgaccattgtggtggatgtggattccacccagcgcctgcaggtgatcaagcagatgaacaagctgatcaacgtgctgcaggcgaacgatcttacggatgcgcccgcggtaatccgcgaactggtgctgctgcgcattcggaccacgcaggagagccgcacggcggtgctcaaggaggccgagattttcggcggccgcgtagtggattcctccacggaaggcttcgccatcgaggtgacgggcgatccggagaagctgggcgaattcatcgacgtgatgggcagctatggcgaagtggaagtgactcgcagcggagccctggcgatcgcgcttgaatccaagaagcttcggctgcagccgccggttcccacgaaagcagcagtttaa

SEQ ID NO: 6983 - protein, 173 aa, Solibacter usitatus Ellin6076
MLQVISLLLENKPGALMRVTGLLTQRGYNIESLTVARTLDPELSRMTIVVDVDSTQRLQVIKQMNKLINVLQANDLTDAPAVIRELVLLRIRTTQESRTAVLKEAEIFGGRVVDSSTEGFAIEVTGDPEKLGEFIDVMGSYGEVEVTRSGALAIALESKKLRLQPPVPTKAAV

SEQ ID NO: 6984 - DNA, 504 bp, Magnetococcus sp. MC-1
  CDS (1)..(504): transl_table=11
atgaaacatgtgctttcggtgttggtggagaatgaagcgggtgtgttgacgcgggtttccggccttttttcagcccgtggttttaatattgagagtctcaccgtggctccggtaggggatggagagacctcccgcattacccttgtgaccacgggcgaggataatattattgagcagatcatcaagcagctccacaagctggtgccggttattcaggttcacgacctgaccgaccgttcccatgtggagcgggagttgatgatggttaaggtcgatgctgagcgtgaagtgcgtgccgaagtgctgcgcattgccgatatttttcgctcccgcgtggtggatgccacccccaacacctttgtggttgaggtgacgggcagcagtgataagttggatgcctgtcttaacctgctcaccccgctgggggtggtggaggtggtgcgtaccggcaaggtcgccatggcgcggggtcctaaacgtatgaaggaagttctccctgcataa

SEQ ID NO: 6985 - protein, 167 aa, Magnetococcus sp. MC-1
MKHVLSVLVENEAGVLTRVSGLFSARGFNIESLTVAPVGDGETSRITLVTTGEDNIIEQIIKQLHKLVPVIQVHDLTDRSHVERELMMVKVDAEREVRAEVLRIADIFRSRVVDATPNTFVVEVTGSSDKLDACLNLLTPLGVVEVVRTGKVAMARGPKRMKEVLPA

SEQ ID NO: 6986 - DNA, 495 bp, Shewanella sp. ANA-3
  CDS (1)..(495): transl_table=11
atgcgtcgaattatatctgtattactcgaaaaccaatccggcgcattatctcgtgttgtcggtctgttttcccaacgcggttacaacatcgaaagtttaactgtggcaccaaccgatgataacaccttatcgcgcctcaatattaccgtagtggccgacgaaaaggtgctagagcaaatcgagaaacaactgcacaagttagtcgatgtgctcaaggtgtcgaatgtcaccgaatcggcttatattgagcgggagttggcactggttaaagtccgcgctcaaggggaattacgggaagaaattaagcgtaccgccgatatcttccgtgggcagattgtcgatgtcactgccaatctctacaccattcaattggtgggcacgaccgaaaaactcgatgcctttattcattccatgggtgaagtgaccaaagtggttgaagtgtcgcgctcgggcgttgtgggcttagcccgcggcgaaaaagcgatgagagcctaa

SEQ ID NO: 6987 - protein, 164 aa, Shewanella sp. ANA-3
MRRIISVLLENQSGALSRVVGLFSQRGYNIESLTVAPTDDNTLSRLNITVVADEKVLEQIEKQLHKLVDVLKVSNVTESAYIERELALVKVRAQGELREEIKRTADIFRGQIVDVTANLYTIQLVGTTEKLDAFIHSMGEVTKVVEVSRSGVVGLARGEKAMRA

SEQ ID NO: 6988 - DNA, 507 bp, Mycobacterium avium 104
  CDS (1)..(507): transl_table=11
atgagtccgcagacgcacacgctgtcggtgctggtcgaagacaaaccgggtgtgctcgcccgggtggcggcgctgttcagccggcgcggtttcaacatcgaatcgcttgcggtcggtgccaccgagcagaaggacatgtcgcggatgacgatcgtggtgtccgccgaggagaccccgctcgagcagatcaccaagcagctcaacaagctgatcaacgtcatcaagatcgttgagctggaggacggcaactcggtgtcgcgggaattggcgttgatcaaggtgcgcgccgacgccggcacccgcagtcaggtcatcgaggcggtgaacctgttccgcgccaaggtgattgacgtttcgccggaggcgctgacgatcgaggccaccggtgaccgcggcaagatcgaggcgctgctgcgggtgctggagcccttcggtatccgtgagatcgtccaatcgggagtggtgtcgttgtcccgcggtccgcgcggaatcggcacggccaagtaa

SEQ ID NO: 6989 - protein, 168 aa, Mycobacterium avium 104
MSPQTHTLSVLVEDKPGVLARVAALFSRRGFNIESLAVGATEQKDMSRMTIVVSAEETPLEQITKQLNKLINVIKIVELEDGNSVSRELALIKVRADAGTRSQVIEAVNLFRAKVIDVSPEALTIEATGDRGKIEALLRVLEPFGIREIVQSGVVSLSRGPRGIGTAK

SEQ ID NO: 6990 - DNA, 555 bp, Nocardioides sp. JS614
  CDS (1)..(555): transl_table=11
gtgacgacctccgccaacacccgacacaccctgtccgtcctggtggagaacaagcccggcgtcctcgcccggatcgcgggcctgttcagccgtcgcggcttcaacatcgactcgctcgcggtgggcccgaccgagcacccggaggtctcccggatgacgatcgtggtcaacgtcgaggattccccgctcgagcaggtcaccaagcagctgaacaagctggtcgaggtgatcaagatcgtcgagctcgacagcgccgcctcggtcaagcgcgagctgctgctggtcaaggtcaaggccgacgcggagacccgcggccaggtcctcgacgccgtccagctgttccgtgccaaggtcgtcgacgtggccccggacgcgatcacgatccaggcggtcggcaacgccgacaagctctcggacctgctccgggtgctcgagccgttcggcatccgcgagctcgtgcagtccggcatggtcgcgatcgggcgcggctcccgttccatctccgagcgcagcctgcgcccggtcgccatccccgccccgcccgctgcggtttga

SEQ ID NO: 6991 - protein, 184 aa, Nocardioides sp. JS614
MTTSANTRHTLSVLVENKPGVLARIAGLFSRRGFNIDSLAVGPTEHPEVSRMTIVVNVEDSPLEQVTKQLNKLVEVIKIVELDSAASVKRELLLVKVKADAETRGQVLDAVQLFRAKVVDVAPDAITIQAVGNADKLSDLLRVLEPFGIRELVQSGMVAIGRGSRSISERSLRPVAIPAPPAAV

SEQ ID NO: 6992 - DNA, 492 bp, Azoarcus sp. BH72
  CDS (1)..(492): transl_table=11
atgcgtcacgtcatttccctgctgatcgaaaacgaatccggcgcgctgtcgcgcgtctccggcctgttctccgcgcgcggctacaacatcgagtcgctcacggtggcgccgaccgaagacgcctcgatgtcgcgcatgaccatcgtcaccaccggctccgacgacatcatcgagcagatcaccaagcagctgaacaagctcgtcgaggtagtcaaggtggtcgacatctcggaagccgcccacatcgagcgcgagctgatgctgatcaaggtccgcgccaccggcaaggaccgcgaggagatgaagcgcaccgccgacatcttccgcgcccgcatcatcgatgtgaccgacgcgtcctacgtcatcgagctgaccggcaatcagtccaagctcgacgccttcatcggcgcgattgacccggcgctgatcctcgaaaccgtacgttcgggcgtatgcggcatcggccgcggcgaccgcgtgctcaagctctga

SEQ ID NO: 6993 - protein, 163 aa, Azoarcus sp. BH72
MRHVISLLIENESGALSRVSGLFSARGYNIESLTVAPTEDASMSRMTIVTTGSDDIIEQITKQLNKLVEVVKVVDISEAAHIERELMLIKVRATGKDREEMKRTADIFRARIIDVTDASYVIELTGNQSKLDAFIGAIDPALILETVRSGVCGIGRGDRVLKL

SEQ ID NO: 6994 - DNA, 492 bp, Neisseria meningitidis FAM18
  CDS (1)..(492): transl_table=11
atgcgacatatcttatctgttctgattgaaaacgaatcaggtgcgatgagccgcgtggtcggtttgttctctgcacgcgattacaatatcgattctttggcggttgcgccgaccgaagacaaaaccctgtcccgtatgaccatcgttacccacggcgacgagcaggttatcgaacaaatcaccaagcaactcaataaattgattgaagtgattaaagtggtcgatttgaacgaaagccgttttgtcgaacgcgaactgatgttggtaaaagtccgtgccgccggcaaagaccgcgacgaatttttgcgtttgaccgaaatctaccggggcagcatcatcgacgtaaccgaccgcagctatacgattgaaattaccggctcgaccgacaagctggattcctttttggaaacggtcggacgcgcccaaattttggaaaccgtacgtacaggcgcggccggcatcggtcgcggtgagcgtattttgaaaatttaa

SEQ ID NO: 6995 - protein, 163 aa, Neisseria meningitidis FAM18
MRHILSVLIENESGAMSRVVGLFSARDYNIDSLAVAPTEDKTLSRMTIVTHGDEQVIEQITKQLNKLIEVIKVVDLNESRFVERELMLVKVRAAGKDRDEFLRLTEIYRGSIIDVTDRSYTIEITGSTDKLDSFLETVGRAQILETVRTGAAGIGRGERILKI

SEQ ID NO: 6996 - DNA, 492 bp, Acidovorax sp. JS42
  CDS (1)..(492): transl_table=11
atgaaacacatcatcgccgtcctgctggagaacgaaccgggtgcgctgtcgcgcgtcgttggcctgttttccgcgcggggctacaacatcgaatcgctgaccgtggcgcccaccgaggacgcgtccctgtcgcgcatgaccatccagacccatggatcggaagacgtgatcgagcagatcaccaagcacctgaaccgcctcatcgaggtggtcaaggtggttgacctgaccgaaggcgcctacaccgagcgcgaactcatgatggtgaaggtgcgcgccgtgggcaaggagcgcgaagagatgaagcgcatggccgacatctttcgcggacgcatcatcgacgtgaccgaaaagagctacacgatcgagctgaccggcgaccagtccaagaacgacgctttcctgcaggccatcgaccgtaccgccattttggagacggtgcgcacgggcgccagcggcatcggccgtggcgaacgcatcctgcgtgtgtaa

SEQ ID NO: 6997 - protein, 163 aa, Acidovorax sp. JS42
MKHIIAVLLENEPGALSRVVGLFSARGYNIESLTVAPTEDASLSRMTIQTHGSEDVIEQITKHLNRLIEVVKVVDLTEGAYTERELMMVKVRAVGKEREEMKRMADIFRGRIIDVTEKSYTIELTGDQSKNDAFLQAIDRTAILETVRTGASGIGRGERILRV

SEQ ID NO: 6998 - DNA, 522 bp, Magnetospirillum magnetotacticum MS-1
  CDS (1)..(522): transl_table=11
atgcaagtgaccatcgctcagcaggaaatcaaccgccacaccatcgccgtcctggtggacaacgaatccggcgtgctggcccgtgtcgtcggcctgttctcgggacgcggctacaacattgaaagcctgaccgtggccgaggttgatgccagcgaaaagctgtcgcgcatcaccatcgtgaccagcggcaccgccatgatcatcgagcagatcaagaatcagctccgccgcctggtgccggtctacaaggtgcacgacctgaccatcgaaggtccccatgtgtcgcgcgaactggccctggttaaggtggccgccaccggcgacaagcgggtggaatcgttgcgcatcgccgacattttccgggcgcgcgccatcgattccaccaatgaaagcttcgtcttcgaagtggtgggcgccaccgacaaggtggacgccttcatcaagctgatggagcccctgggtctggccgacgtttcgcgcaccggcgtcgtcgccattgcgcgcggaccgaatccgatttag

SEQ ID NO: 6999 - protein, 173 aa, Magnetospirillum magnetotacticum MS-1
MQVTIAQQEINRHTIAVLVDNESGVLARVVGLFSGRGYNIESLTVAEVDASEKLSRITIVTSGTAMIIEQIKNQLRRLVPVYKVHDLTIEGPHVSRELALVKVAATGDKRVESLRIADIFRARAIDSTNESFVFEVVGATDKVDAFIKLMEPLGLADVSRTGVVAIARGPNPI

SEQ ID NO: 7000 - DNA, 519 bp, Nostoc punctiforme PCC 73102
  CDS (1)..(519): transl_table=11
atgaaacataccctttcagttctcgtagaagatgaggcgggtgttctttcccgcatttctggtttattcgcccgtcgtggttttaatattgaaagccttgctgttggtcctgctgaacagggaggagtctcccgaattacaatggttgtacctggtgacgatcgcgtgatcgagcaactcaccaagcaactatacaagttagttaatgtcctcaaggtacaggatattaccgaaactccttgcgtcgaacgagaattgatgcttttgaaggtgaatgctagtagcagcaatcgctcagaagtgattgaactgtctcagattttccgggcgcgagtcgtggatgtcgcagaagattctctcaccttagaagttgtgggagatccaggtaaaatggtagcgatcgtgcaggtgttgcaaaaatttggtttaagagaaatcgcccgcactggcaaaattgccctgactcgtgagtcaggcgtgaataccgagttactcaaatctttggaagcaaaagtttag

SEQ ID NO: 7001 - protein, 172 aa, Nostoc punctiforme PCC 73102
MKHTLSVLVEDEAGVLSRISGLFARRGFNIESLAVGPAEQGGVSRITMVVPGDDRVIEQLTKQLYKLVNVLKVQDITETPCVERELMLLKVNASSSNRSEVIELSQIFRARVVDVAEDSLTLEVVGDPGKMVAIVQVLQKFGLREIARTGKIALTRESGVNTELLKSLEAKV

SEQ ID NO: 7002 - DNA, 522 bp, Crocosphaera watsonii WH 8501
  CDS (1)..(522): transl_table=11
atgaaacataccctttctgtcttagttgaagatgaagcaggtgttttaacccgtattgctggtttatttgcccgtcgtgggtttaatattgagagtctagcagttgggcctgccgaacaaccaggaatatcccgtattaccatggtagtacctggagatgataactccattgaacagttaactaaacaactctacaaattgattaacgttcttaaggttaacgacatcacccaaaccccttgcgtggaaagggaattgatgctattgaaggtcaatgtgagtgcggctaaccgcgctgaagtgttagaagtcgctcaggttttccgcgccagaattgtcgatatttccgatgataccgttaccatagaagttgtgggtgatcctgggaaaatggtcgccattatgaaaatgttaagcaagtttggcattcgagaagtagcccgcaccggaaaaattgccttaacccgtgaatctggagttaatacagaatatctgaagtccctacaggctaaagtaagctaa

SEQ ID NO: 7003 - protein, 173 aa, Crocosphaera watsonii WH 8501
MKHTLSVLVEDEAGVLTRIAGLFARRGFNIESLAVGPAEQPGISRITMVVPGDDNSIEQLTKQLYKLINVLKVNDITQTPCVERELMLLKVNVSAANRAEVLEVAQVFRARIVDISDDTVTIEVVGDPGKMVAIMKMLSKFGIREVARTGKIALTRESGVNTEYLKSLQAKVS

SEQ ID NO: 7004 - DNA, 513 bp, Kineococcus radiotolerans SRS30216
  CDS (1)..(513): transl_table=11
atgtcccagcacaccctgtccgtcctggtcgagaaccgacccggtgtcctgatgcgcgtcacgtcgctgttcgcgcgcaggaacttcaacatccactccctcacggtcggaccgaccgagcgcagcgacatctcccggatgaccatcgtcgtcgacgtggagtcgcagccgttggagcaggtgacgaagcagctcaacaagctgatcaacgtcttgaagatcgtggagctcgaggacggcgcctcggtccagcgcgagctgctgctcgtgaaggtccgggccgacgcctcggcgcgcggggaggtgctcgacaccgtggcgctgttccgcgcccacgtcgtcgacgtcgcccccgacgccgtgacggtcgaggccaccggcagcccggacaagctggccgcgctgctgcgcgtgctggagccgttcggcatccgggagctcgtccagtccggctcggtggcgctcgcccgcggcgggcgcgcgatctccgaccgcgcgctgcgctccgcctga

SEQ ID NO: 7005 - protein, 170 aa, Kineococcus radiotolerans SRS30216
MSQHTLSVLVENRPGVLMRVTSLFARRNFNIHSLTVGPTERSDISRMTIVVDVESQPLEQVTKQLNKLINVLKIVELEDGASVQRELLLVKVRADASARGEVLDTVALFRAHVVDVAPDAVTVEATGSPDKLAALLRVLEPFGIRELVQSGSVALARGGRAISDRALRSA

SEQ ID NO: 7006 - DNA, 477 bp, Streptococcus suis 89/1591
  CDS (1)..(477): transl_table=11
atgcgtagaatattaacagctaaattgcgaaattcatctggtgttctgaatcgttttacaggtgtcctatctcgtcgccaaatcaatattgagtccatctcagtcggcccaacagaagtagatggcatctcacgtgtgacggtgattgtagacgtggtcagtcacgatgaggtcgaacaaatcatcaaacagctaaaccgcttgattgatgtggtccgtgtccgtgatttgacggacattccccacttagagcgtgaggtgattcttgttaaaatttcagctccgccaacaaaacgagcagaaattttagcgattatccaaccctttagagcaaatgttgttgatgtggcaccgcactccattaccattcaaatgacaggtgatggagataagattgacgccctcctgcgtgtgattcagccttatggcatcaagaatatcgcaagaacgggtgcgactggctttagtagagactaa

SEQ ID NO: 7007 - protein, 158 aa, Streptococcus suis 89/1591
MRRILTAKLRNSSGVLNRFTGVLSRRQINIESISVGPTEVDGISRVTVIVDVVSHDEVEQIIKQLNRLIDVVRVRDLTDIPHLEREVILVKISAPPTKRAEILAIIQPFRANVVDVAPHSITIQMTGDGDKIDALLRVIQPYGIKNIARTGATGFSRD

SEQ ID NO: 7008 - DNA, 561 bp, Sulfitobacter sp. EE-36
  CDS (1)..(561): transl_table=11
atgtcagccctaaagatcaaaaaaggctccaacagccattccgcctataacctacgtcccaatttctcggatgtgatcgaacgccacacgctggccgtactggtcgagaacgaacccggtgtgctggcgcgcgtcatcggtctgttttcgggccgtggatacaacatcgacagccttaccgtggcagaggttgaccacacaggccaccttagccgcatcaccatcgtcacctcgggcacgccgcaggtgatcgagcagatcaaggcgcagctggggcggattgtgccagtacacgacgtgcacgacctgaccgtcgaaggccccgtggtcgagcgtgagcttgcgatgttcaaggtgaatggcaccggcgacaaacgggtcgaagccctgcgtctggcggatatcttccgcgccaacgttgtcgatagcaccttggaaacattcgtgttcgagatcaccggcgcgcccgagaagattgacgcatttgccgaattgatgcgccccttggggctggtgtccgtggcacggacgggtgtggcagccctgtcgcgcggcgactga

SEQ ID NO: 7009 - protein, 186 aa, Sulfitobacter sp. EE-36
MSALKIKKGSNSHSAYNLRPNFSDVIERHTLAVLVENEPGVLARVIGLFSGRGYNIDSLTVAEVDHTGHLSRITIVTSGTPQVIEQIKAQLGRIVPVHDVHDLTVEGPVVERELAMFKVNGTGDKRVEALRLADIFRANVVDSTLETFVFEITGAPEKIDAFAELMRPLGLVSVARTGVAALSRGD

SEQ ID NO: 7010 - DNA, 558 bp, Roseovarius nubinhibens ISM
  CDS (1)..(558): transl_table=11
atgtccgcactgaagatcaaaaaaggctccaacaagcattccgcctataacctgcggccgacgttctcggacgtggtggaaagccatacgctggcggtgctcgtcgacaacgaaccgggggttctggcgcgggtgatcgggctgttttcgggccggggctataacatcgacagcctgaccgtggccgaggtcgatcacaccggccacaccagccgcatcaccatcgtgaccaagggcacgccgcagatcatcgaacagatcaaggcccagcttggccggatcgtgccggtgcatgcggtgcatgacctgaccgtcgagggcccggtggtggagcgcgaactggcgctgatgaaggtcgagggcgaaggcgagaaacgcgtcgaagcgctgcggctggcggatattttccgcgccaatgtggtcgacagcacgcttggcagtttcgtcttcgagatcaccggcccgtcggacaagatcgacgcctttgccgatctgatgcggccgctggggctcatcgacatcgcgcgcaccggggtcgccgccctgccgcggggctga

SEQ ID NO: 7011 - protein, 185 aa, Roseovarius nubinhibens ISM
MSALKIKKGSNKHSAYNLRPTFSDVVESHTLAVLVDNEPGVLARVIGLFSGRGYNIDSLTVAEVDHTGHTSRITIVTKGTPQIIEQIKAQLGRIVPVHAVHDLTVEGPVVERELALMKVEGEGEKRVEALRLADIFRANVVDSTLGSFVFEITGPSDKIDAFADLMRPLGLIDIARTGVAALPRG

SEQ ID NO: 7012 - DNA, 567 bp, Oceanicola batsensis HTCC2597
  CDS (1)..(567): transl_table=11
atgagcgcattgcagatcaagaagggctcgaccaagcattcggcctacaatctccgtccgacgttctcggacgtgatcgaaacccacaccctcgcggtgctggtcgacaacgaggccggggttctggcccgggtcatcgggctgttttccggccgtggctacaatatcgagagcctgaccgtcgccgaggtggaccataccgggcatctgagccgcatcaccatcgtgacccgcggcacgccgcaggtgatcgagcagatcaaggcgcagctgggccggatcgtgccggtgcaccgggtccacgacctcacggtcgaggggccgtcggtagagcgcgagttggcgcttctcaaggtgacgggggccggcgacaagcgtgtcgaggcgctgcggctggcggacatcttccgcgccaacgtcgtggacagcacgctggacagtttcgtcttcgagatcaccggcgcgccggagaagatcgacgcgttcgccgatctcatgcggccgctgggcctgctggagatggcgcggaccggcgtcgcggctctgtcgcggggcgccacgacctga

SEQ ID NO: 7013 - protein, 188 aa, Oceanicola batsensis HTCC2597
MSALQIKKGSTKHSAYNLRPTFSDVIETHTLAVLVDNEAGVLARVIGLFSGRGYNIESLTVAEVDHTGHLSRITIVTRGTPQVIEQIKAQLGRIVPVHRVHDLTVEGPSVERELALLKVTGAGDKRVEALRLADIFRANVVDSTLDSFVFEITGAPEKIDAFADLMRPLGLLEMARTGVAALSRGATT

SEQ ID NO: 7014 - DNA, 516 bp, Erythrobacter sp. NAP1
  CDS (1)..(516): transl_table=11
atgaaaatccagagcgccgaaagcgagcggcacgtcttgaccgttacggtcgataacgagccgggtatccttgcgaagatcacaggcctgttcaccgcacgcggctataatatcgacagcctgaccgtcgccgacatcaccgaggaccacgcggtcagccgcatcacgatcgtgaccaacggcccgcctgcagtgatcgaccagatcgaagcgcagcttgagcgattggtgcccgtccacaaggtcaccgacctgacgacggccggcccgcacgtcgaacgcgaactcgctctcatcaaggttgcgggcaaaggcgacgcgcgagtggaggcactgcgcattgcggagcttttccgagccaatgtcgtcgacacgaccacgcacagcttcgtcttcgaactcactggagcgcccgacaagatcaacagcttcatcagcctaatgcgcgagcttggcctcgtcagcgtgggccgctcgggcgtggtcgggatgatgcgcggggccgaagaggtctga

SEQ ID NO: 7015 - protein, 171 aa, Erythrobacter sp. NAP1
MKIQSAESERHVLTVTVDNEPGILAKITGLFTARGYNIDSLTVADITEDHAVSRITIVTNGPPAVIDQIEAQLERLVPVHKVTDLTTAGPHVERELALIKVAGKGDARVEALRIAELFRANVVDTTTHSFVFELTGAPDKINSFISLMRELGLVSVGRSGVVGMMRGAEEV

SEQ ID NO: 7016 - DNA, 498 bp, Pseudoalteromonas tunicata D2
  CDS (1)..(498): transl_table=11
atgaaacgaattttagctatcttacttgaaaacgaacctggggctttatcgcgcattgtcgggctcttttctcaacgtgcgtacaatatcgatagcctgactgttggtaccacggatgacagctcattatcacgaattacaataaccacccaaggtgatgatcgcattattgaacaaatcactaaacaagttaataaactagttgatgtacttaaggttatcgatttaaccgataccaaccatattgagcgcgaactggtattaataaaagtacgcgcagctgatgagcaagctcgagctgctgtaacgcgtgttagtgatgtgtttggtggttcaatcattgatatgggcaaaaccacctactcgcttcaacttgttggcagcacagataaactagcttcgtttattgatacactacgtaatgaaacagaaattgttgaagtggtgcgctctggcgcggttggatttattagaggtgataaagcgctaagagtttaa

SEQ ID NO: 7017 - protein, 165 aa, Pseudoalteromonas tunicata D2
MKRILAILLENEPGALSRIVGLFSQRAYNIDSLTVGTTDDSSLSRITITTQGDDRIIEQITKQVNKLVDVLKVIDLTDTNHIERELVLIKVRAADEQARAAVTRVSDVFGGSIIDMGKTTYSLQLVGSTDKLASFIDTLRNETEIVEVVRSGAVGFIRGDKALRV

SEQ ID NO: 7018 - DNA, 498 bp, Photobacterium sp. SKA34
  CDS (1)..(498): transl_table=11
atgcgtagaattatttcagtattacttgaaaaccaaccgggtgcattatctcgtgtggtgggtctgttttctcaacgtggctacaatatcgaatcactcactgttgcgccgactgacgatccaacgttgtcgcgtttgaacatcacgaccaatgtgaaaaatgaatcggcttatgagcaaattgaaaaacaccttcataagcttattgatattttaaaggtcagtaacattactgaatcagagcatgttgagcgtgaattaatgctaaccaaagttaaagctagtggctttgcgcgagcagaagttaaacgtactgcagatattttccggggacagattattgatgttacaagccaaatttatactattcaattaatcggtacaggtgaaaaacttgatgcatttctagcggcagtaggtgaagcgacagaaattattgaagtcgctcgaagtggcgtagtaggcatggctcgaggagaacgtgcattaaaggcgtaa

SEQ ID NO: 7019 - protein, 165 aa, Photobacterium sp. SKA34
MRRIISVLLENQPGALSRVVGLFSQRGYNIESLTVAPTDDPTLSRLNITTNVKNESAYEQIEKHLHKLIDILKVSNITESEHVERELMLTKVKASGFARAEVKRTADIFRGQIIDVTSQIYTIQLIGTGEKLDAFLAAVGEATEIIEVARSGVVGMARGERALKA

SEQ ID NO: 7020 - DNA, 495 bp, Oceanospirillum sp. MED92
  CDS (1)..(495): transl_table=11
atgcgtcatattatttcagtattgatggaaaacgagccaggtgcactgtctcgcgtagtgggtttgttctctcagcgtaacttcaacattgaatcactaacggtagcgccaaccgaagacgaaacactgtctcgtctgacggtaacgactatcggtgatgatcgtgttgttgagcagatcacaaagcagctgaataagctaattgatgtagtaaaagttgttgatttgacggaaggtgaccatcttgagcgtgagctgatgatgatcaagatgaaggcaaacaacggaacggtacgtgcagagatcaaacgtactgcggacatcttccgtggcactattattgatgtaacgccgaatacttttacggttcagttggtaggctctagcagcaaactggatgcgtttattgaagcgctgggcacttctaatattatggaagttgttcgttctggtgtatccggtattgctcgtggtgagaaggttctgacactgtaa

SEQ ID NO: 7021 - protein, 164 aa, Oceanospirillum sp. MED92
MRHIISVLMENEPGALSRVVGLFSQRNFNIESLTVAPTEDETLSRLTVTTIGDDRVVEQITKQLNKLIDVVKVVDLTEGDHLERELMMIKMKANNGTVRAEIKRTADIFRGTIIDVTPNTFTVQLVGSSSKLDAFIEALGTSNIMEVVRSGVSGIARGEKVLTL

SEQ ID NO: 7022 - DNA, 516 bp, Xanthobacter autotrophicus Py2
  CDS (1)..(516): transl_table=11
atgtcccaatcccctgagcccatcgagcgccacaccctctccgtcctcgtcgacaacgagccgggcgtgcttgcgcgcgtcatcggcctgttctccggtcgcggctacaacatcgacagcctcaccgtgtccgaggtgagccacgaggggcggctgtcgcgcatcaccctcgtcaccaccggcacccccatggtgatcgagcagatcaagaaccagctcgaccggctggtgccggtgcaccgggttcgcgatctcaccgtggaaggcacggcgctggagcgcgagctggccatggtgaaggtgcgcggcctgggcgaggcccgcggcgaggcgctgcgccttgccgaggcgttccgcgcccgcgtcatcgacgccacccgcgagagcttcgtgttcgagatcaccggcaagtccgacaagatcgaccagttcgcctggctcatggagcccctgggcctcgtggaagtggcgcgcaccggcgtggtcgccatctcccgcgggccggaggccatgtag

SEQ ID NO: 7023 - protein, 171 aa, Xanthobacter autotrophicus Py2
MSQSPEPIERHTLSVLVDNEPGVLARVIGLFSGRGYNIDSLTVSEVSHEGRLSRITLVTTGTPMVIEQIKNQLDRLVPVHRVRDLTVEGTALERELAMVKVRGLGEARGEALRLAEAFRARVIDATRESFVFEITGKSDKIDQFAWLMEPLGLVEVARTGVVAISRGPEAM

SEQ ID NO: 7024 - DNA, 495 bp, marine gamma proteobacterium HTCC2207
  CDS (1)..(495): transl_table=11
atgaaacggataatctctattttgatcgaaaatgaatccggcgcactttcacgggtagtgggtctatttgcccagcgtggttataacatcgacactctgactgtggcacccacagatgacgataccttgtcccggttaaccctaaccactcagggtgacgatcatatggcggagcagattgttaaacagctgcacaagttgatcgacaccattaaggtcgttgatttgactcagggcgcctatattgagcgcgaactgatgttggttaaaattaaagcgaccgaaagtgaaattcgacgggaacttaaaagctgtgtggaaattttccgtggtcatattatcgatgtcacaccggctacctacacagttcagcttgctggcgacagtgaaaagctcgatgcctttattgaggcggtgcgcgaaatgggcattatggaagtggtcagaagtggtgtttccggtatagcgcgcggtgataaatttctgcgtgtttaa

SEQ ID NO: 7025 - protein, 164 aa, marine gamma proteobacterium HTCC2207
MKRIISILIENESGALSRVVGLFAQRGYNIDTLTVAPTDDDTLSRLTLTTQGDDHMAEQIVKQLHKLIDTIKVVDLTQGAYIERELMLVKIKATESEIRRELKSCVEIFRGHIIDVTPATYTVQLAGDSEKLDAFIEAVREMGIMEVVRSGVSGIARGDKFLRV

SEQ ID NO: 7026 - DNA, 483 bp, delta proteobacterium MLMS-1
  CDS (1)..(483): transl_table=11
atgaaacatactatttccgtacttctgcaaaacaagcccggcgtgctttcccgggttaccggcctgttcagtggccgtggtttcaatatcgacagcctgtcggtggccgaaaccctggagaaagacgtatcctgcctgaccctggtgacccacggtgatgaggcgatcatcgaacagatcaccaagcagttgcataaactgatcgacgtcatcaaggtcaccgacatggtcgagcatgagcatgtcgaacgggagatggtgctgctgcgggtcaaggccgaggccgaaacccgggccgaggtgctgcgggttatcgatatcttccggggcaaggtggtggatgtctcccccaaaagctacgtggtggagattaccggctccaagagcaaggtccaggcggtgattgacatcctgcggcccattggcatccaggaaatcgtccgcaccggcggggtggccatcacccgcggcaagaaattctaa

SEQ ID NO: 7027 - protein, 160 aa, delta proteobacterium MLMS-1
MKHTISVLLQNKPGVLSRVTGLFSGRGFNIDSLSVAETLEKDVSCLTLVTHGDEAIIEQITKQLHKLIDVIKVTDMVEHEHVEREMVLLRVKAEAETRAEVLRVIDIFRGKVVDVSPKSYVVEITGSKSKVQAVIDILRPIGIQEIVRTGGVAITRGKKF

SEQ ID NO: 7028 - DNA, 492 bp, Oceanobacter sp. RED65
  CDS (1)..(492): transl_table=11
atgagacgtatcatatctatcctgttggaaaatgaaccgggtgcattggctcgcgttgttggtttgttcgcacagcgttcatacaacattgaaaccctaaccgttgcaccaaccgaagatgaaagtttgtcacgtatgacgatcacgaccacaggtccggatcgtgttatcgagcaaatcaccaagcaattaaataaattgattgcggttgttaagctggtggatttaacagaaggtgcgcatattgagcgtgaactgatgctgattaaagtcaaagcatccggtgcccagcgcgctgaaattaaacgtactgccgatattttccgcggacaaatcgtggatgttacgtcaaacgtttataccattcagttaacaggttcgactgataagctagaagctttcatcgatgctatcggtgaaaactgtatattagaaaccgttcgcacaggtgtatctggtatttctcgtggagagaagaccttaagcttgtaa

SEQ ID NO: 7029 - protein, 163 aa, Oceanobacter sp. RED65
MRRIISILLENEPGALARVVGLFAQRSYNIETLTVAPTEDESLSRMTITTTGPDRVIEQITKQLNKLIAVVKLVDLTEGAHIERELMLIKVKASGAQRAEIKRTADIFRGQIVDVTSNVYTIQLTGSTDKLEAFIDAIGENCILETVRTGVSGISRGEKTLSL

SEQ ID NO: 7030 - DNA, 495 bp, Vibrio sp. Ex25
  CDS (1)..(495): transl_table=11
atgagacacattatttcattgctattggaaaaccaaccgggtgcgttgtctcgtgttgttggcttgttctctcaacgtggttacaacattgaatctttgacggtatcaccgacagatgatgaaacgctgtcgcgaatgaacattaccacgacgtctgatgagatgcagttggagcaaattcagaagcagttacacaaattgatcgatgtgctgaaagtacaagaagtcaccgagtatgagcacatcgaacgtgaactgatgatggtgaaagtgaaagccagcggttttgcgcgagcagaagtgaaacggacggcagacatcttccgtggccagatcgtggatgtcactgctgctcaatacacggtacaacttgcgggcacgagtgaaaagttggatgccttcattcaagcgatatctgaagtaactgaagtcgtcgaagttgctcgtagtggggtagtgggcattgcccgaggtgagcgcgcactcaaaccttag

SEQ ID NO: 7031 - protein, 164 aa, Vibrio sp. Ex25
MRHIISLLLENQPGALSRVVGLFSQRGYNIESLTVSPTDDETLSRMNITTTSDEMQLEQIQKQLHKLIDVLKVQEVTEYEHIERELMMVKVKASGFARAEVKRTADIFRGQIVDVTAAQYTVQLAGTSEKLDAFIQAISEVTEVVEVARSGVVGIARGERALKP

SEQ ID NO: 7032 - DNA, 498 bp, Alteromonadales bacterium TW-7
  CDS (1)..(498): transl_table=11
atgcgtcgtattttatcaatattattagaaaacgaacccggtgcactatctcgtattgttggactattttcacaacgagcatataacattgacagcctaacggtaggtactactgacgatcagtctttatcgcgtattaccataacaacaatgggtgatgaccgaattgttgaacaaattaccaagcaagtgaacaagctagttgatgtattaaaaattattgatttaacagaaatgagccacattgaacgagagctactccttgtaaaagtatttgcacaagacgaaacaacgcgtgctgcagttacccgggtagtagatgtgtttaaaggtgatattttagatatgggccgtcagagttacagcttacaacttgtgagcagcacagacaaaatagaatcatttttagatacgctacgccatgaaacagatatcatagaagttgtacgttcaggtgcagttggaattggtagaggcgataaagccttaaaagcataa

SEQ ID NO: 7033 - protein, 165 aa, Alteromonadales bacterium TW-7
MRRILSILLENEPGALSRIVGLFSQRAYNIDSLTVGTTDDQSLSRITITTMGDDRIVEQITKQVNKLVDVLKIIDLTEMSHIERELLLVKVFAQDETTRAAVTRVVDVFKGDILDMGRQSYSLQLVSSTDKIESFLDTLRHETDIIEVVRSGAVGIGRGDKALKA

SEQ ID NO: 7034 - DNA, 492 bp, marine gamma proteobacterium HTCC2080
  CDS (1)..(492): transl_table=11
atgcgtcgcattctgtctgtattactagaaaatgaaccgggcgcgctatctcgcgtcgtgggcctcttctcacagcgtggctacaacattgaatccttgaatgtggctcccactgatgatcattccttatcgcgcttgacgctaacgacttcaggggatgacctgaagatcgagcagatcaacaagcagctcaataagcttattgatgtggtaaaggtcgttgatcttaccgagggtgctcacgttgaacgcgatttgttgctcgttaaagtgcgggcggtagggcagcagcgagacgaagttaaacgcactaccgatattttccgtggacagattatcgatgtgggccctgcgacctacgtgattcagttaacagggccaactgagaaactggattcgtttgtcgctgcactcggtgacgctgaaattatggaagtcgtacggtccggtgtggcgggaatggcgcggggagagaaggtcttggccccctaa

SEQ ID NO: 7035 - protein, 163 aa, marine gamma proteobacterium HTCC2080
MRRILSVLLENEPGALSRVVGLFSQRGYNIESLNVAPTDDHSLSRLTLTTSGDDLKIEQINKQLNKLIDVVKVVDLTEGAHVERDLLLVKVRAVGQQRDEVKRTTDIFRGQIIDVGPATYVIQLTGPTEKLDSFVAALGDAEIMEVVRSGVAGMARGEKVLAP

SEQ ID NO: 7036 - DNA, 501 bp, Candidatus Desulfococcus oleovorans Hxd3
  CDS (1)..(501): transl_table=11
atgaacggaaccaaacacattctttccattctcgtggacaaccagcccggcgtgctgtcgcgcattgccggcctgttcagcggccggggctacaacatcgaaagcctctgcgtggcgaccactaccgatccggggatctcccggctgaccatggtcaccatcggcgacgaggccattgtggagcagattcagaagcagctcaacaagctgatcaacgtgatcaaggtgattgatctcaccggcacccagtacgtgcagcgggagctgatcctgatccaggtgcgggccaagccggaaaaccgggccgagatcctgcgcatcgtggacatcttccggggcaaggtggtggatgtgggggccgagaactacatgatcgaggccaccggcagcgaggagaagcttgcggcctttctgatgctgttaaaacccctgggcatcaaggagatcgcccgcaccggccccatcgccctgcagcgggacgccaacagcaaaggtaaatag

SEQ ID NO: 7037 - protein, 166 aa, Candidatus Desulfococcus oleovorans Hxd3
MNGTKHILSILVDNQPGVLSRIAGLFSGRGYNIESLCVATTTDPGISRLTMVTIGDEAIVEQIQKQLNKLINVIKVIDLTGTQYVQRELILIQVRAKPENRAEILRIVDIFRGKVVDVGAENYMIEATGSEEKLAAFLMLLKPLGIKEIARTGPIALQRDANSKGK

SEQ ID NO: 7038 - DNA, 492 bp, Marinobacter sp. ELB17
  CDS (1)..(492): transl_table=11
atgcgtcgaatcatttctgttttgttggaaaacgagccgggtgcgctgtcgcgggtagtgggtctgttttcgcagcgcaactacaacattgaaaccctgacggttgcgcccaccgaagacccgacaatgtcgcgtttgactgtaacgactacgggttccgagcgggtgattgagcagattaccaagcagctgaacaagctgattgaagtgatcaagctcgttgacctcaccgagggtgcccatatcgaacgtgaactcatgctggtgaagctgaaagcaacgggctcccagcgcgctgaaatcaaacgcaccgtagacatcttccgtggccagatcgttgacgtcaccagttcggtgtataccgtgcagctggcgggcgacagtgccaagctggatggctttattcaggccattggtgcaaccggtgttctggaggtagtgcgtagcggtgtatccggtattgctcgcggtgaaaaagtgctcagcctttaa

SEQ ID NO: 7039 - protein, 163 aa, Marinobacter sp. ELB17
MRRIISVLLENEPGALSRVVGLFSQRNYNIETLTVAPTEDPTMSRLTVTTTGSERVIEQITKQLNKLIEVIKLVDLTEGAHIERELMLVKLKATGSQRAEIKRTVDIFRGQIVDVTSSVYTVQLAGDSAKLDGFIQAIGATGVLEVVRSGVSGIARGEKVLSL

SEQ ID NO: 7040 - DNA, 930 bp, Saccharomyces pastorianus
  CDS (1)..(930)
atgttgagatcgttgttgcaaagtggccaccgcagagtcgctgcctcgtcgtgcgccactatggtgcgttgcagttcatcgtcgacctccgcgttggcgtataagcagatgcatagacacgccgcaagacccccattgcccaccttggacaccccttcgtggaacgccaacagtgccgtctcatccatcatctatgagaccccagccccctctcgtcagccaagaaaacagcacgtcttgaactgtttggtgcagaacgagcccggtgtcctgtccaggatctctgggactttggccgccagaggattcaacatcgactcgttggtcgtgtgcaacaccgaggtcaaggacctgagcagaatgaccatcgtcttgcaaggccaagatggtgtcatcgagcaagcacgcagacagatcgaggacctggtccccgtctacgccgtcctcgactacaccaactccgagatcatcaagagggagttggtcatggccagaatctccttgctaggtacagagtactttgaagacctgctgttgcaccaccacacttccaccagctccggtggcgccgacgccaacgagttagttgccgaaatcagagaaaagcaattccaccctgccaacttgcccgccagtgagatcttaaggttgaagcacgagcacttgaacgacgtcaccaatttgaccaacaacttcggtggtcgtgtcgtcgacatcagcgaaaccagctgtatcgtcgagctttccgccaagcccacccgtatttccgccttcttgaagctggttgagccattcggtgttctagagtgtgcaagaagcggtatgatggcactgccaagaactcctttaaagacaagcatcgaggaggccgccgacgaagacgagaagatcaacgaaatcgtcgacatctcccaattgccacctggttaa

SEQ ID NO: 7041 - protein, 309 aa, Saccharomyces pastorianus
MLRSLLQSGHRRVAASSCATMVRCSSSSTSALAYKQMHRHAARPPLPTLDTPSWNANSAVSSIIYETPAPSRQPRKQHVLNCLVQNEPGVLSRISGTLAARGFNIDSLVVCNTEVKDLSRMTIVLQGQDGVIEQARRQIEDLVPVYAVLDYTNSEIIKRELVMARISLLGTEYFEDLLLHHHTSTSSGGADANELVAEIREKQFHPANLPASEILRLKHEHLNDVTNLTNNFGGRVVDISETSCIVELSAKPTRISAFLKLVEPFGVLECARSGMMALPRTPLKTSIEEAADEDEKINEIVDISQLPPG

SEQ ID NO: 7042 - DNA, 531 bp, Streptomyces avermitilis
  CDS (1)..(531): transl_table=11
atgagcaagcacaccctctccgtcctcgtcgagaacaagcccggtgtcctcgcccggatcaccgccctgttctcccggcgcggcttcaacatcgactcgctcgccgtcggtgtcaccgagcaccccgacatctcccgcatcaccatcgtggtgaacgtgatcgaggcactgccgctcgaacaggtcaccaaacagctcaacaagctcgtcaacgtcctgaagatcgtcgagctggagccgtccgcgggccgtgcaggcggcgaactcgttctggtgaaggtgcgcgccgacaacgagacgcgctcccagatcgtcgagatcgtccagctgttccgcgccaagaccgtggacgtctccccggaggccgtcaccatcgaggccaccggcggcagcgacaagctggaggccatgctcaagatgctggagccgttccggcatcaaggagctcgtcagtccggaacgatcgcgatcggacgtggggcacgttcgatcacggaccgctcgctgcggccgctggaccgatccgcgtaa

SEQ ID NO: 7043 - protein, 176 aa, Streptomyces avermitilis
MSKHTLSVLVENKPGVLARITALFSRRGFNIDSLAVGVTEHPDISRITIVVNVIEALPLEQVTKQLNKLVNVLKIVELEPSAGRAGGELVLVKVRADNETRSQIVEIVQLFRAKTVDVSPEAVTIEATGGSDKLEAMLKMLEPFRHQGARQSGTIAIGRGARSITDRSLRPLDRSA

SEQ ID NO: 7044 - DNA, 525 bp, Streptomyces viridifaciens
  CDS (1)..(525): transl_table=11
atggcgaagcacacactctccgtcctggtggagaacacgccgggcatcctcgcccgcatcgctgccctcttttcccgccgaggcttcaacatagactccctcgccgaaggactgactgaacacccggccatcggacggatcaccatcgtggtccacgccgaggacgacctcctcgaacaagtcgtcaggcaggtcagcaagctggtcaatgtcctgagaatcgtcgagttggagcgggattccgctgtcgagcgcggactggtgctagccaagatccgagccgataaccgtacacggcctcagatcatcgagatcgtccagctgttccgcgccaagaccgtggacgtctccccggaggccgtgaccatcgaggcgaccggtaccagcgacaagctgtccgccctgctcaagatgctggagccgtacggcatcacggaactcgtccagtccggcacgatcgcgatcggccgtggcgccgactccatcagccaccgtgcggcctacgaacttgagcgcatcgcttga

SEQ ID NO: 7045 - protein, 174 aa, Streptomyces viridifaciens
MAKHTLSVLVENTPGILARIAALFSRRGFNIDSLAEGLTEHPAIGRITIVVHAEDDLLEQVVRQVSKLVNVLRIVELERDSAVERGLVLAKIRADNRTRPQIIEIVQLFRAKTVDVSPEAVTIEATGTSDKLSALLKMLEPYGITELVQSGTIAIGRGADSISHRAAYELERIA

SEQ ID NO: 7046 - DNA, 528 bp, Streptomyces cinnamonensis
  CDS (1)..(528): transl_table=11
atgtccaccaagcacacgctctccgtcctggtcgagaacaagcccggcgtcctcgcccggatcaccgccctgttctcgcgccgcggcttcaacatcgactcgctcgccgtgggcgtcaccgagcaccccgacatctcccgcatcaccatcgtggtgaacgtcgaggacctgccgctcgaacaggtgaccaagcagctcaacaagctcgtcaacgtcctcaagatcgtcgaactggagccgggcgccgcggtggcccgcgagctcgtcctggcgaaggtccgcgccgacaacgagacccgctcccagatcgtcgagatcgtccagctgttccgcgccaagaccgtcgacgtctccccggaggccgtcaccatcgaggcgaccggcagcagcgacaagctggaggccatgctcaagatgctggagcccttcggcatcaaggagctcgtgcagtccggcaccatcgcgatcggccgcggctcccgctccatcacggaccgcagcctgcgggcgctcgaccgcagcgcctga

SEQ ID NO: 7047 - protein, 175 aa, Streptomyces cinnamonensis
MSTKHTLSVLVENKPGVLARITALFSRRGFNIDSLAVGVTEHPDISRITIVVNVEDLPLEQVTKQLNKLVNVLKIVELEPGAAVARELVLAKVRADNETRSQIVEIVQLFRAKTVDVSPEAVTIEATGSSDKLEAMLKMLEPFGIKELVQSGTIAIGRGSRSITDRSLRALDRSA

SEQ ID NO: 7048 - DNA, 480 bp, Buchnera aphidicola
  CDS (1)..(480): transl_table=11
atgcgcagaattttgtctattttattagaaaatgaatcaggtgcactgtcaagagtaatagggcttttttcccaaagaggatataacatagaaacgataacacttgcaccaactgaagatccaactctatcaaaaatgactatacaaacaatcggagatgaaaaaaatattgagcaaatcgaaaaacaactgcataaattaatagatgtattaagagttgttcagattgaccaattttctcatatagaacgcgaaattatgttagttaaggtccagattaatacttcttctaagagagatgatattaaacatactactgaagtgtttagaggtcaaattgtagatatgacatctacaacatatatactacaattatctggaacaacaaaaaaattaaattcttttttaaaagttataagaaagatatcagatatcatagaaataagtcgttctggcatagtaggtatttcacggggataa

SEQ ID NO: 7049 - protein, 159 aa, Buchnera aphidicola
MRRILSILLENESGALSRVIGLFSQRGYNIETITLAPTEDPTLSKMTIQTIGDEKNIEQIEKQLHKLIDVLRVVQIDQFSHIEREIMLVKVQINTSSKRDDIKHTTEVFRGQIVDMTSTTYILQLSGTTKKLNSFLKVIRKISDIIEISRSGIVGISRG

SEQ ID NO: 7050 - DNA, 1455 bp, Arabidopsis thaliana
  CDS (1)..(1455)
atggcggccatttctgtaagttcttcaccatctattcgctgcttgagatcggcatgttccgattcttctcctgctcttgtatcctcgacgcgtgtatcgttcccggcgaagatttcatatctctccggtatatcttcgcaccgtggcgatgaaatgggtaagagaatggaaggattcgttagaagcgtcgatgggaagatctctgatgcgtctttctccgaagcttcatctgcgactccaaaatcgaaggtgaggaagcacacaatttcagtatttgttggagacgaaagcggaatgattaataggattgcaggagtgtttgcaaggagaggatacaatattgagagtcttgctgttggtctgaacagagacaaggctctattcaccatagttgtctgtggaactgaaagggtacttcagcaggtcatcgagcaactccagaagctcgttaatgttctaaaggttgaagatatctcaagtgagccgcaagtggagcgtgagctgatgcttgtaaaagtgaatgcacatccagaatccagggcagagatcatgtggctagttgacacattcagagcaagagttgtagatatagcggaacatgcattgactatcgaggtaactggagatcctggaaaaatgattgctgtagaaagaaatttgaaaaagtttcagatcagagagattgtaaggacaggaaaggtagtgtatatagcactgagaagggaaaagatgggtgcaactgctccattttggcgattttcagcagcatcctatccagatctcaaggagcaagcgcctgttagtgttcttcgaagtagcaaaaaaggagccattgtccctcaaaaggaaacatcagcagggggagatgtttatcccgttgagccattttttgaccccaaggtacatcgtattctcgacgctcactggggacttctcactgacgaagatacgagtggactacggtcgcatactctatcattgcttgtaaatgatattccaggagttcttaatattgtgactggtagcttggccgtaggacatgctgaaaccaagggcatttcacgcattacaacagttatacctgcaacagatgaatcggtcagcaaattggtgcagcaactttacaaactcgtagatgtgcatgaggtccatgatcttactcatttgccattttctgaaagagaactgatgctgattaagattgccgtgaacgctgctgctagaagagatgtcctggacattgctagtattttcagggctaaagctgttgacgtatctgatcacacaattactttgcagcttactggggatctagacaagatggttgcactgcaaaggttattggagccctatggtatatgtgaggttgcaagaaccggtcgtgtggcattggctcgtgaatcgggagtggactccaagtaccttcgtggatactcctttcctttaacaggctaa

SEQ ID NO: 7051 - protein, 484 aa, Arabidopsis thaliana
MAAISVSSSPSIRCLRSACSDSSPALVSSTRVSFPAKISYLSGISSHRGDEMGKRMEGFVRSVDGKISDASFSEASSATPKSKVRKHTISVFVGDESGMINRIAGVFARRGYNIESLAVGLNRDKALFTIVVCGTERVLQQVIEQLQKLVNVLKVEDISSEPQVERELMLVKVNAHPESRAEIMWLVDTFRARVVDIAEHALTIEVTGDPGKMIAVERNLKKFQIREIVRTGKVVYIALRREKMGATAPFWRFSAASYPDLKEQAPVSVLRSSKKGAIVPQKETSAGGDVYPVEPFFDPKVHRILDAHWGLLTDEDTSGLRSHTLSLLVNDIPGVLNIVTGSLAVGHAETKGISRITTVIPATDESVSKLVQQLYKLVDVHEVHDLTHLPFSERELMLIKIAVNAAARRDVLDIASIFRAKAVDVSDHTITLQLTGDLDKMVALQRLLEPYGICEVARTGRVALARESGVDSKYLRGYSFPLTG

SEQ ID NO: 7052 - DNA, 1860 bp, Nicotiana plumbaginifolia
  CDS (181)..(1530)
ggattcggcacgagggcggctgtttcaactcccttcaacagctctctaaataaacccttcctttctctctattcctctattccccatttgggtttctcccaagttgttcaatttccaactttgaaaccaaaatttcttctttcaaagatcaaaacagttgtaatttctgcgccaaagctgatggaacatatacaaacgaggacgactctctcacaactttcgactcttccatcagacaaaagactaggcgccatacgattcaagtgtttgttggtgatgaaagtggaaatgatcaatcgtattgcgggagtctttgctcgaagagggtacaatattgagtctcttgctgttggtctaaacaaggacaaggctctttttactatagttgtttctggaactgaaagggtgttacagcaagttatggaacagttacaaaagcttgtaaatgtgatcaaggttgaagatctatccaaggagccacaagttgaacgagaattaatgcttattaaaatcagcgccgatccaaaataccgcgcagaggttatgtggttggtggacgttttcagggcaaaaattgtggatatatctgatcaatctctgactattgaggtaactggagatccagggaagatggtggctgttcagaggaacttaagtaaatttggaattagagaaattgctcgtactgggaagattgccttgagaagagaaaaaatgggggaatctgctcctttttggcggttttcagcagcatcatacccagatcttgaaggtgcaatgtctgctggtactatttcgaggacaatcaagaggacccctaatggagaatctatgtctatggctgagggagatgtctatcctgttgagacagatgacaactctggagtcagtcaagttcttgatgctcactggggtgttctcaatgatgaagatacaagtgggcttcgctcacatactttgtcaatgcttgtgaatgacactcctggagttctcaacatagtcaccggagtttttgctcgacgagggtataacatccaaagtttagctgttggacatgctgaagttgaggggctttctcgtattacaacggttgttcctggcacagatgagtcagttagcaagttggtgcagcaactatataagttggttgatattcatgaggttcgggatattactcacctcccatttgcggaaagagaactaatgttgataaagattgctgtgaatgctgcagcgcgccgcaatgttcttgacattgccagcattttcagagcaaaagctgttgatgtgtctgaccacactataactcttgagcttacaggagatttgcataagatggttcgtttgcagcggctactagagccttatggtatttgtgaggtagcgcgaacagacgtctggcactggtacgtgaatcaggtgtggattcgaagtacttgcgaggatattcataccctttgtagtctaaagtcctcgaacctaaggaaaatacctgctctttgcggaatgtgtgcgaacgtggatgactgaatgatacggagatggtctcgtgccccagctgtgaccctaccgctttcaagtcaagtttgcatgcttttagcttgaggtagttgcaagtttatgaaaatgaatagggtacaatttgaccattctatgaacaaaagcggacccagtctttaagatacaagagttttcagctcttttcttttcacctttattctttagcagagatagttcttcaataagcttcactgaaaatgattgacgtcgcgtcgtcatttgacttacaagtaaaatatgactagcatttttggtttttaaatctgaaagtgatatgaaacataaaaaaaaaaaaaaaaa

SEQ ID NO: 7053 - protein, 449 aa, Nicotiana plumbaginifolia
MEHIQTRTTLSQLSTLPSDKRLGAIRFKCLLVMKVEMINRIAGVFARRGYNIESLAVGLNKDKALFTIVVSGTERVLQQVMEQLQKLVNVIKVEDLSKEPQVERELMLIKISADPKYRAEVMWLVDVFRAKIVDISDQSLTIEVTGDPGKMVAVQRNLSKFGIREIARTGKIALRREKMGESAPFWRFSAASYPDLEGAMSAGTISRTIKRTPNGESMSMAEGDVYPVETDDNSGVSQVLDAHWGVLNDEDTSGLRSHTLSMLVNDTPGVLNIVTGVFARRGYNIQSLAVGHAEVEGLSRITTVVPGTDESVSKLVQQLYKLVDIHEVRDITHLPFAERELMLIKIAVNAAARRNVLDIASIFRAKAVDVSDHTITLELTGDLHKMVRLQRLLEPYGICEVARTDVWHWYVNQVWIRSTCEDIHTLCSLKSSNLRKIPALCGMCANVDD

SEQ ID NO: 7054 - DNA, 513 bp, Zymomonas mobilis
  CDS (1)..(513): transl_table=11
atggatagtggagaagtgatagacgcacatacgctttctgtcactgttgataacgttgctggtattcttgcccgcatttcaggcatgtttctaccagaggctataatatcgaaaagcctgacagttgcggatgtcacaaaagataacgccataagccggctaagcattgtgaccagtggccttcctcatgtcatcgaccagatggttcaccagttggaccgtctgccgccggtgcatcgggttgtcgatttgacagccattggcccccatgttgaacgggaattagcccttattaaagtggttggcgtaggtgataatcgtattgaagccttgcgtttggctgaagtttatcatgcccgggtggttgatgcgaccattgccagttttatctttgaagttaccggcacaactgaaaaagttgaaaaatttctcgagcttatgggtgaattgggcttggttgaagtcgcgcgcacgggtattgcagccatggcgcgcggtcgggatgctttttaa

SEQ ID NO: 7055 - protein, 170 aa, Zymomonas mobilis
MDSGEVIDAHTLSVTVDNVAGILARISGMFLPEAIISKSLTVADVTKDNAISRLSIVTSGLPHVIDQMVHQLDRLPPVHRVVDLTAIGPHVERELALIKVVGVGDNRIEALRLAEVYHARVVDATIASFIFEVTGTTEKVEKFLELMGELGLVEVARTGIAAMARGRDAF

SEQ ID NO: 7056 - DNA, 579 bp, Aquifex aeolicus
  CDS (1)..(579): transl_table=11
atggcggatactttgggaaagagtgagcttgaagttattaaaccccagaagagggaaattagaaaaggacaggtcaggaagcacataatcacggtaaaagtcaggaacgagatgggagtccttgcgagaatagcgaccttaatcgcgggaaagggttacaacatagaaggactttccgtaggcgaaactcacgaaaagggaatatcgagaatgactattgaggttatcggagacgatatagtaattgagcaggtcgtaaaacaactcaggagactaatagacaccctgaaggtttccgacctgacggacgttccccacgtggagagggaactcgctctcataaaggtttacactccctcttccagggcaagggacgaagttctgaggataacggagatattcaggggcaaggtcgttgacgtttctccggacacttacacgatagaggttactggagatgaggataaaataaacgccatgattgagctcttaaaacctttcggtatcaaggagatggcgagaaccggtaaggtcgccatgaggagggaaatgtccataaaggaggaggaaaatgaatag

SEQ ID NO: 7057 - protein, 192 aa, Aquifex aeolicus
MADTLGKSELEVIKPQKREIRKGQVRKHIITVKVRNEMGVLARIATLIAGKGYNIEGLSVGETHEKGISRMTIEVIGDDIVIEQVVKQLRRLIDTLKVSDLTDVPHVERELALIKVYTPSSRARDEVLRITEIFRGKVVDVSPDTYTIEVTGDEDKINAMIELLKPFGIKEMARTGKVAMRREMSIKEEENE

SEQ ID NO: 7058 - DNA, 525 bp, Bacillus subtilis
  CDS (1)..(525): transl_table=11
ttgaaaagaattatcacattgactgtggtgaaccgctccggggtgttaaaccggatcaccggtctattcacaaaaaggcattacaacattgaaagcattacagttggacacacagaaacagccggcgtttccagaatcaccttcgtcgttcatgttgaaggtgaaaatgatgttgaacagttaacgaaacagctcaacaaacagattgatgtgctgaaagtcacagacatcacaaatcaatcgattgtccagagggagctggccttaatcaaggttgtctccgcaccttcaacaagaacagagattaatggaatcatagaaccgtttagagcctctgtcgttgatgtcagcagagacagcatcgttgttcaggtgacaggtgaatctaacaaaattgaagcgcttattgagttattaaaaccttatggcattaaagaaatcgcgagaacaggtacaacggcttttgcgaggggaaccagcaaaaggcgtcatccaataaaacaatatctattgtataaaacataa

SEQ ID NO: 7059 - protein, 174 aa, Bacillus subtilis
MKRIITLTVVNRSGVLNRITGLFTKRHYNIESITVGHTETAGVSRITFVVHVEGENDVEQLTKQLNKQIDVLKVTDITNQSIVQRELALIKVVSAPSTRTEINGIIEPFRASVVDVSRDSIVVQVTGESNKIEALIELLKPYGIKEIARTGTTAFARGTSKRRHPIKQYLLYKT

SEQ ID NO: 7060 - DNA, 492 bp, Salmonella typhimurium
  CDS (1)..(492): transl_table=11
atgcgccggattttatcggtattactggaaaacgaatctggggcgttatcgcgggttatcggcctcttttcgcaacgcggatataatattgaaagcctgaccgtcgcgccgacagacgatccgacgttgtcgcgcatgactatccagacggtaggcgatgaaaaagtgcttgagcaaattgaaaagcaactgcacaagctggttgatgtgctgcgcgtcagcgagctgggacagggagcgcacgttgagcgggaaatcatgctggtgaaaatccaggccagcggctacggacgggaagaggtgaagcgtaatacggaaattttccgtggtcagattattgacgttacgccaacgctgtataccgttcaactggcgggcaccagcgataaactggatgcttttctggcctcgctgcgcgacgtggcgaaaattgttgaagtggcgcgttcaggcgtcgtcgggctttcgcgcggcgataagattatgcgctga

SEQ ID NO: 7061 - protein, 163 aa, Salmonella typhimurium
MRRILSVLLENESGALSRVIGLFSQRGYNIESLTVAPTDDPTLSRMTIQTVGDEKVLEQIEKQLHKLVDVLRVSELGQGAHVEREIMLVKIQASGYGREEVKRNTEIFRGQIIDVTPTLYTVQLAGTSDKLDAFLASLRDVAKIVEVARSGVVGLSRGDKIMR

SEQ ID NO: 7062 - DNA, 1455 bp, Oryza sativa
  CDS (1)..(1455)
atgtccgtcgcctccccgcaccatctccgcccctcgccgctggcgccggcatgccgtgctggcggcgtccccgcgcgcgccgcggcggcgcaccggccatggtgcccgcgcgtccgccgggccgtcgccgcggcctcctccggcggcggcggcggcgaggcggtgacggcggtgagcgcggcggcggtgggggcgcccgcgagcgccgcgagggacacggaatgcagggtgcggcgccacacgatctctgtgttcgtcggcgacgagagcgggatgataaaccggatcgccggggtgttcgccaggagagggtacaacatcgagtcgctcgccgtggggctcaacaaggacaaggccatgttcaccattgtcgtctccggcacggacagggtgctcaaccaagtcatcgagcagctcaacaagcttgtcaacgtcttgaatgtggaagatctatctaaggagccacaggttgaaagagagctgatgcttataaaaattaatgttgaaccagatcagcgtcctgaggtcatggttttagttgatattttccgagcgaaagttgttgatatttcggagaacacccttaccatcgaggtaactggagatcctggcaaaattgttgctgtgcaaaggaacctcagcaaatttgggataaaagaaatttgtagaacgggaaaaattgctttgagacgtgaaaaaattggagcaactgcccgcttctggggattttctgctgcttcttacccagatctcatagaggcattgcccaaaaattctcttcttacttctgtaaataagacagtcaatggaagttttgatcaaccatccaatgctgggggcgatgtctatcctgtggaaccttatgagggttcatccatgaaccaagtacttgatgctcactggggcgtccttgatgatgaagattcaagtggacttcgatcacatactctatccatccttgtcaatgattgccctggtgttctcaacattgttacaggggtctttgctcgcagaggctacaatatacagagtcttgctgtaggcccagctgaaaagtcaggcctttcgcgtattacaacagttgctcctggaacagatgaatccattgagaagttagttcagcagcttaacaaacttgttgatgtgcatgaggttcaagatataactcacttgccttttgctgaaagagaacttatgcttatcaaggtttctgtgaacactgctgctcggagagacatactagatattgctgaaatcttccgggcaaaatctgttgatgtttctgatcacactgttacgttacagcttactggggatctcgacaagatggttgcattacaaaggctgttggagccttatggcatctgtgaggtcgccagaacagggcgagtggcgctggtccgcgaatccggtgtcgattccaagtaccttcgtggctactcctttccgttgtaa

SEQ ID NO: 7063 - protein, 484 aa, Oryza sativa
MSVASPHHLRPSPLAPACRAGGVPARAAAAHRPWCPRVRRAVAAASSGGGGGEAVTAVSAAAVGAPASAARDTECRVRRHTISVFVGDESGMINRIAGVFARRGYNIESLAVGLNKDKAMFTIVVSGTDRVLNQVIEQLNKLVNVLNVEDLSKEPQVERELMLIKINVEPDQRPEVMVLVDIFRAKVVDISENTLTIEVTGDPGKIVAVQRNLSKFGIKEICRTGKIALRREKIGATARFWGFSAASYPDLIEALPKNSLLTSVNKTVNGSFDQPSNAGGDVYPVEPYEGSSMNQVLDAHWGVLDDEDSSGLRSHTLSILVNDCPGVLNIVTGVFARRGYNIQSLAVGPAEKSGLSRITTVAPGTDESIEKLVQQLNKLVDVHEVQDITHLPFAERELMLIKVSVNTAARRDILDIAEIFRAKSVDVSDHTVTLQLTGDLDKMVALQRLLEPYGICEVARTGRVALVRESGVDSKYLRGYSFPL

SEQ ID NO: 7064 - DNA, 1371 bp, Oryza sativa
  CDS (1)..(1371)
atgtccgtcgcctccccgcaccatctccgcccctcgccgctggcgccggcatgccgtgctggcggcgtccccgcgcgcgccgcggcggcgcaccggccatggtgcccgcgcgtccgccgggccgtcgccgcggcctcctccggcggcggcggcggcgaggcggtgacggcggtgagcgcggcggcggtgggggcgcccgcgagcgccgcgagggacacggtgcggcgccacacgatctctgtgttcgtcggcgacgagagcgggatgataaaccggatcgccggggtgttcgccaggagagggtacaacatcgagtcgctcgccgtggggctcaacaaggacaaggccatgttcaccattgtcgtctccggcacggacagggtgctcaaccaagtcatcgagcagctcaacaagcttgtcaacgtcttgaatgtggaagatctatctaaggagccacaggttgaaagagagctgatgcttataaaaattaatgttgaaccagatcagcgtcctgaggtcatggttttagttgatattttccgagcgaaagttgttgatatttcggagaacacccttaccatcgaggtaactggagatcctggcaaaattgttgctgtgcaaaggaacctcagcaaatttgggataaaagaaatttgtagaacgggaaaaattgctttgagacgtgaaaaaattggagcaactgcccgcttctggggattttctgctgcttcttacccagatctcatagaggcattgcccaaaaattctcttcttacttctgtaaataagacagtcaatggaagttttgatcaaccatccaatgctgggggcgatgtctatcctgtggaaccttatgagggttcatccatgaaccaagtacttgatgctcactggggcgtccttgatgatgaagattcaagtggacttcgatcacatactctatccatccttgtcaatgattgccctggtgttctcaacattgttacaggggtctttgctcgcagaggctacaatatacagagtcttgctgtaggcccagctgaaaagtcaggcctttcgcgtattacaacagttgctcctggaacagatgaatccattgagaagttagttcagcagcttaacaaacttgttgatgtgcatgaggttcaagatataactcacttgccttttgctgaaagagaacttatgcttatcaaggtttctgtgaacactgctgctcggagagacatactagatattgctgaaatcttccgggcaaaatctgttgatgtttctgatcacactgttacgttacagcttactggggatctcgacaagatggttgcattacaaaggctgttggagccttatggcatctgtgaggtatattga

SEQ ID NO: 7065 - protein, 456 aa, Oryza sativa
MSVASPHHLRPSPLAPACRAGGVPARAAAAHRPWCPRVRRAVAAASSGGGGGEAVTAVSAAAVGAPASAARDTVRRHTISVFVGDESGMINRIAGVFARRGYNIESLAVGLNKDKAMFTIVVSGTDRVLNQVIEQLNKLVNVLNVEDLSKEPQVERELMLIKINVEPDQRPEVMVLVDIFRAKVVDISENTLTIEVTGDPGKIVAVQRNLSKFGIKEICRTGKIALRREKIGATARFWGFSAASYPDLIEALPKNSLLTSVNKTVNGSFDQPSNAGGDVYPVEPYEGSSMNQVLDAHWGVLDDEDSSGLRSHTLSILVNDCPGVLNIVTGVFARRGYNIQSLAVGPAEKSGLSRITTVAPGTDESIEKLVQQLNKLVDVHEVQDITHLPFAERELMLIKVSVNTAARRDILDIAEIFRAKSVDVSDHTVTLQLTGDLDKMVALQRLLEPYGICEVY

SEQ ID NO: 7066 - DNA, 1431 bp, Oryza sativa
  CDS (1)..(1431)
atggctaccgccaccgccgcctcccgcctcgcggtggccggcgctgaacccgctcgcgcccggcgccaccgcccgacgacggtggcagtctgcgggggcgcgaggccgaggtcgcgccccgcggccgtcgttgccgccgccggcgccgccgctccctctccggccaccggcggcgtcgcgccggttccgccaagccccaggggctcgattataaagcgtcatacactatcagtttttgttggagatgaaagtgggatgattaatcgaattgctggagtttttgctagaagaggatacaacattgagtcattggcagttgggctgaacaaggacaaggcattatttacaatagtagtatctggaactgagaaaatactgaaacaggttgtagagcaactaaacaaacttgttaatgttatacaggttgacgatctgtcgaaggaaccacaagttgaaagagagctaatgcttataaaactaaatgttgagccagataagcgaccggaggtgatgggtttggttgacatcttcagagcaaaggtggttgacctttctgaccacacactaactattgaggtaactggagatcctggaaaaattgttgctgtacagaggaacctaagcaaatttggaatcaaagaaattgccagaactggcaagatagctttgcggcgtgagaaaatgggagaaagtgctcctttttggcggttctctgcagcttcctatcctgatcttgaagtggcaatgccatcaaaatctcatgtcaacactgcgatgaaaacagctaaccagaattctgaagaatcttcacaaggtgatgtctatccagtggagtcatatgaaaacttcacaacaaatcaaattcttgatgctcattggggtgtcatggctgacggtgatccaacagggctttgttcacattctttgtccattttggtgaatgatttccctggagttctcaatgttgtaacaggtgttttctcccgaagaggctacaatattcagagtctggctgttggcccagctgaaaaagaaggcacttctcggatcactactgttgtccctggaactgatgagtctattgccaagctagtacaccaactgtataagctcattgatgtttatgaggtccaggatcttactcatttaccatttgctgctagagagttaatgatcataaagattgctgtaaacaccacagcccgcagggctatcctagatattgctgatattttccgggccaaaactgtggatgtatcagatcacaccgtaactcttcagcttactggagaccttgataaaatggtcgcattacaaaggatgctcgagccctatggcatttgtgaggttgcacgaactggcagggttgcgttgcgccgtgagtcaggagtcgattccaaatacctccgtgggttttcccttcctctgtag

SEQ ID NO: 7067 - protein, 476 aa, Oryza sativa
MATATAASRLAVAGAEPARARRHRPTTVAVCGGARPRSRPAAVVAAAGAAAPSPATGGVAPVPPSPRGSIIKRHTLSVFVGDESGMINRIAGVFARRGYNIESLAVGLNKDKALFTIVVSGTEKILKQVVEQLNKLVNVIQVDDLSKEPQVERELMLIKLNVEPDKRPEVMGLVDIFRAKVVDLSDHTLTIEVTGDPGKIVAVQRNLSKFGIKEIARTGKIALRREKMGESAPFWRFSAASYPDLEVAMPSKSHVNTAMKTANQNSEESSQGDVYPVESYENFTTNQILDAHWGVMADGDPTGLCSHSLSILVNDFPGVLNVVTGVFSRRGYNIQSLAVGPAEKEGTSRITTVVPGTDESIAKLVHQLYKLIDVYEVQDLTHLPFAARELMIIKIAVNTTARRAILDIADIFRAKTVDVSDHTVTLQLTGDLDKMVALQRMLEPYGICEVARTGRVALRRESGVDSKYLRGFSLPL

SEQ ID NO: 7068 - DNA, 1428 bp, Brassica napus
  CDS (1)..(1428)
atggcggcggctacgaccactgctgcttcactagcctgtgcccacttcttaaatcagaccaaggtccacgcgtttccgtccaaaacctccgtgcaagtctctcaaatcatcgatgggaggaagatgagaagtgccactctcttctcagccgcctcaaccgataaagccatcaccactgctcagtctgtctcgtccactgcatgtgatagagtgaggaggcatacgatctcggtgtttgtgggtgacgagagcggtataatcaaccgtatagctggagtgtttgctagaagagggtacaacattgagtctctagctgtgggattgaacgaagacaaagctatgtttactattgttgttcttgggacagacaaagtcttgcagcaagttgtagaacagcttaacaaactcgtcaacgtcatcaaggttgaagatctctccaaggagccgaatgtggaacgtgagttaatgctgattaagcttaacgctgatccaaccacacgctctgagatcatgtggttggtggatatctttagagcaaaagtggtggatacttcggatcacactctgacgatcgaggtaactggagacccaggaaagatggttgcactaacagcgaacttagagaagtttgggataaaagaagtcgctagaacagggaagattgctctgagacgggaaaagatgggagaaactgctccgttctggagattttcagctggatcatacccacacctcgtaaaccaatcatctcatgagactgttgcagagaatacaaagcgagcgttgactggtggaaatggcactgcatcatctgggggtgacgtctatccagtggagccttataatgatttcaaaccggtccttgacgctcattggggagtggtctacgacgaagattcggatggtctgcgctcccacacattatctatacttgtagccaacgttcctggagttctcaatctaataaccggagctatctccaggagaggttataacatccagagtctagcggttggtcctgctgagaaagagggcttgtctcggatcacaacagttatccctggaactgatgaaaacatcgacaagttggtgaggcagcttcagaagctgattgatcttcatgaggttcaaaatataacccgcatgccatttgcggagcgagaactgatgctcatcaaagtagctgctcatacttctgcaaggagagatgttctcgatatcgctcaagtgttccgagctaaagccattgatgtctctgatcatactatcactcttgaggttacaggggatatcagaaagatggctgcattgcaaacgcagttagaggtctacggaatctgcgaggtggctaggacaggaagagtggcattggtaagagaatctggagtggattcgacttacctccgtggatactctcttcctttgtag

SEQ ID NO: 7069 - protein, 475 aa, Brassica napus
MAAATTTAASLACAHFLNQTKVHAFPSKTSVQVSQIIDGRKMRSATLFSAASTDKAITTAQSVSSTACDRVRRHTISVFVGDESGIINRIAGVFARRGYNIESLAVGLNEDKAMFTIVVLGTDKVLQQVVEQLNKLVNVIKVEDLSKEPNVERELMLIKLNADPTTRSEIMWLVDIFRAKVVDTSDHTLTIEVTGDPGKMVALTANLEKFGIKEVARTGKIALRREKMGETAPFWRFSAGSYPHLVNQSSHETVAENTKRALTGGNGTASSGGDVYPVEPYNDFKPVLDAHWGVVYDEDSDGLRSHTLSILVANVPGVLNLITGAISRRGYNIQSLAVGPAEKEGLSRITTVIPGTDENIDKLVRQLQKLIDLHEVQNITRMPFAERELMLIKVAAHTSARRDVLDIAQVFRAKAIDVSDHTITLEVTGDIRKMAALQTQLEVYGICEVARTGRVALVRESGVDSTYLRGYSLPL

SEQ ID NO: 7070 - DNA, 1455 bp, Brassica napus
  CDS (1)..(1455)
atggcggccatttccgcaagctcttccccatcccttctctccttgagatcgtcatctcccgaatcttctccctctctcacaccctcgacgcggcgggtatcattcccttcgaagatttctcatttctcccgaaaatcttcgaaccgagacaacgaaacgggaaagagaacggagaaaatcgttagaagcgtcaacgagagggtctccgatgctccaccaacgtcgaaggtgaggaagcacacgatctcagtgttcgttggagacgaaagcgggatgattaacaggatcgcaggagtctttgcgaggagaggttacaacatcgagagtcttgctgttggtctcaacagagacaaggctctattcaccattgttgtctctggaactgaaagggtgcttcagcaggtcatcgagcagcttcagaagctcgttaatgttctcaaggttgaggatatctcgagtgagccgcaagtggagcgtgaactgatgcttgtcaaagtgaatgcacatccggaatccagggctgagatcatgtggctagttgacacattcagagcaaaagttgtagatattgcggaacacgcattgactattgaggtaactggagatcctgggaaaatgattgctgttgaaagaaatttgaaaaagtttgagatcagagagattgtcaggacaggaaagatagcactgagaagggaaaagatgggtgctactgctccattttggcgattctcagcagcatcctatccagatctcaaggagcaagcacctgttaatgttcttcgaggtagcaaaacaggagctatagtccctccaagtgaaacaacagcagggggagatgtttatcccgttgagtcaacttctgacctaaaggtgcaacgtgttcttgacgctcactggggacttctcacggacgaagatacgagtggactacggtcacatactctatctttgcttgtaaacgatgttccaggagtccttaatcttgtaactggtgttttcgctcgaaggggatacaatattcagagtttggcggtaggacatgctgaagcacagggcatttcacgcattacaacagttgttcctgcaacagatgaatcagtcagcaaattagtgcagcaactttataaactcgtagatgtgcatgaggtccatgatcttactcatttgccatttgctgaaagagaactgatgctgattaagattgctgtgaacgctgctgcgagaagagatgtcctggacattgctagtattttcagggcaaaagctgttgacgtatccgatcatacaattactttgcagcttactggggatcttgacaagatggttgcactgcaaaggttgttggaaccttacggtatatgcgaggttgcaagaacagggcgtgtggcattggctcgtgaatcaggagtggactctaagtatcttcgtggatactccttccctttatcaagttaa

SEQ ID NO: 7071 - protein, 484 aa, Brassica napus
MAAISASSSPSLLSLRSSSPESSPSLTPSTRRVSFPSKISHFSRKSSNRDNETGKRTEKIVRSVNERVSDAPPTSKVRKHTISVFVGDESGMINRIAGVFARRGYNIESLAVGLNRDKALFTIVVSGTERVLQQVIEQLQKLVNVLKVEDISSEPQVERELMLVKVNAHPESRAEIMWLVDTFRAKVVDIAEHALTIEVTGDPGKMIAVERNLKKFEIREIVRTGKIALRREKMGATAPFWRFSAASYPDLKEQAPVNVLRGSKTGAIVPPSETTAGGDVYPVESTSDLKVQRVLDAHWGLLTDEDTSGLRSHTLSLLVNDVPGVLNLVTGVFARRGYNIQSLAVGHAEAQGISRITTVVPATDESVSKLVQQLYKLVDVHEVHDLTHLPFAERELMLIKIAVNAAARRDVLDIASIFRAKAVDVSDHTITLQLTGDLDKMVALQRLLEPYGICEVARTGRVALARESGVDSKYLRGYSFPLSS

SEQ ID NO: 7072 - DNA, 1461 bp, Zea mays
  CDS (1)..(1461)
atgtctctcgcctcctcccaccacctgcagccgtcgccggcgggcccggcgcggcgcccgggctgccccgcgccgcgcgtggcgctctgccggccacccggtgcctcgcccccgtaccgcggccgctgctgcaccatcgtggcggcggcggcgcctgccgcgggcgccggcggagaggcagcctcggcccccgccgccgctgtgccggcggtcgcccccggtgccgccgccagggacaaggtgcggcgccacacgatttcggtgttcgtcggggacgagagcggcatgatcaaccggatcgccggggtgttcgccaggagaggctacaacatcgagtcgctcgccgtggggctcaacaaggacaaggccctcttcaccattgtcgtctccgggaccgacatggtgctcaaccaagtcattgagcagctcaataagctcgtcaacgttcatagtgttgaagatctatctaaagaacctcaggttgaaagagagctgatgcttataaagctaaacgttgaacctgatcagcgccctgaggtcatggttttagttgacattttcagagcaaaagttgttgatatatctgagaaaacacttaccatagaggtagctggagatcctggcaaaattgctgcagtgcagaggaatctaaggaaattcggcatcaaagaaatttgcaggacaggaaaaattgctttgagacgtgaaaagattggtgcaacagcccgtttctggcgattttctgctgcttcttatccagaccttatagaggcattaccaaaaaaaccgcttacatctgtaaataagacagtgaatggcagttttgttcaaccatccaatgctgggggtgatgtttatcctgtggaatcttacgagagctcagctaaccaagtacttgatgctcactggggtgttctggatgatgatgatgcaactggactttgctcgcataccctctccatccttgtgaatgattgtcctggtgttctcaacattgtaacaggagtctttgctcgcaggggctacaatatacagagccttgctgttggctcagctgagaaggaaggcatttcacgtattacaacagttgttcctggtactgttgaatccattgggaagttagttcagcagctttacaagcttattgatgtgcatgaagttcatgacattacccactcaccttttgctgaaagggaactgatgcttattaaggtttctgtaaacactgctgctcggaaggaaatcctagatattgctgaaatcttccgagcaaaacctattgacgtttctgaccacacagtaacccttcagcttactggagatcttgacaagatggttgcactacaaaggttattagagccatatggcatctgcgaggtcgccagaactggacgagtagcactggtccgcgaatcgaaggtcgactccaagtacctccgcggctactctcttccactgtag

SEQ ID NO: 7073 - protein, 486 aa, Zea mays
MSLASSHHLQPSPAGPARRPGCPAPRVALCRPPGASPPYRGRCCTIVAAAAPAAGAGGEAASAPAAAVPAVAPGAAARDKVRRHTISVFVGDESGMINRIAGVFARRGYNIESLAVGLNKDKALFTIVVSGTDMVLNQVIEQLNKLVNVHSVEDLSKEPQVERELMLIKLNVEPDQRPEVMVLVDIFRAKVVDISEKTLTIEVAGDPGKIAAVQRNLRKFGIKEICRTGKIALRREKIGATARFWRFSAASYPDLIEALPKKPLTSVNKTVNGSFVQPSNAGGDVYPVESYESSANQVLDAHWGVLDDDDATGLCSHTLSILVNDCPGVLNIVTGVFARRGYNIQSLAVGSAEKEGISRITTVVPGTVESIGKLVQQLYKLIDVHEVHDITHSPFAERELMLIKVSVNTAARKEILDIAEIFRAKPIDVSDHTVTLQLTGDLDKMVALQRLLEPYGICEVARTGRVALVRESKVDSKYLRGYSLPL

SEQ ID NO: 7074 - DNA, 1431 bp, Zea mays
  CDS (1)..(1431)
atgaccatgaacgctgcgatcgcctcccgactcggcctcgccgtctccaggtgtggggctgggtcccgagtggacagccggccgctgacgccggcagtgggtttcacggcggggccgagggcgcgctcagtagccgtcaccgccgcctcctcttctccggcgaccggtggcgtgacgccggtgccaccccgctcgaatcgctcggttatgaagcgtcacacgctatcagtttttgttggtgatgaaagtgggatgatcaatcgaattgctggggtttttgctagaagaggatataacatcgagtcattggctgttgggttgaacaaggataaagcattatttacaatagtagtgtcaggaacagacaaaatattaaaccaggtcgtagagcaactaaacaagcttgttaatgtcataaaggttgatgatttatcaatggaaccacaagttgaaagagaacttatgcttataaaagtaaatgcagagcgagaaaagttacctgagataatgggtttggttcgcattttcaaagcagaagtggttgatctttcagactatacactaactattgaggtaactggagatcctggaaagatggttgcaatacagaagactctgagcaaatatgggatcagagaaattgctagaactggcaagatagctttgcgccgtgaaaaaatgggagaaactgctccattttggaggttctctgcagcttcttatccggatctcgaagtggcaataccttcaaatttccagcaaaacactggtgtgaaggcaatcaatcagaatccggaagaatcttcagggggtgatgtttatccagtggaatcttatgaaagcttctcatcaacaagtcaaattctggatgctcattggggtgttatgactgatggcgatccaacagggttttgttcacatactctatcaattcttgtgaatgatgtccctggagttctcaatcttgtaacaggtgtattctccagaaggggctacaatattcagagtcttgctgttggcccagctgaaaaagaaggaacttctcgcatcactactgttgttcctggaactgatgaatccattgccaagctagtacatcaactgtacaagctcattgatgtttatgaagttcaggattttacccacttaccatttgctgctagagagttaatgatcataaaggtcgcggcaaatgctacagctcgaagggatgtcttagatattgctcagatttttgaggcacagaaagttgacatatcagaccacacaattacactactgctcaccggagacattgacagaatggttagattgcaaaagatgctagagcagtatggcatctgtgaggttgcacggacaggccggattgctctgctccgagagtctggagttgactccaagtacctccgcgggttttccctcccgctgtaa

SEQ ID NO: 7075 - protein, 476 aa, Zea mays
MTMNAAIASRLGLAVSRCGAGSRVDSRPLTPAVGFTAGPRARSVAVTAASSSPATGGVTPVPPRSNRSVMKRHTLSVFVGDESGMINRIAGVFARRGYNIESLAVGLNKDKALFTIVVSGTDKILNQVVEQLNKLVNVIKVDDLSMEPQVERELMLIKVNAEREKLPEIMGLVRIFKAEVVDLSDYTLTIEVTGDPGKMVAIQKTLSKYGIREIARTGKIALRREKMGETAPFWRFSAASYPDLEVAIPSNFQQNTGVKAINQNPEESSGGDVYPVESYESFSSTSQILDAHWGVMTDGDPTGFCSHTLSILVNDVPGVLNLVTGVFSRRGYNIQSLAVGPAEKEGTSRITTVVPGTDESIAKLVHQLYKLIDVYEVQDFTHLPFAARELMIIKVAANATARRDVLDIAQIFEAQKVDISDHTITLLLTGDIDRMVRLQKMLEQYGICEVARTGRIALLRESGVDSKYLRGFSLPL

SEQ ID NO: 7076 - DNA, 24 bp, Artificial sequence
  primer
atgcgccggatattatcagtctta

SEQ ID NO: 7077 - DNA, 25 bp, Artificial sequence
  primer
ttaacgcattattttatcgccgcgc

SEQ ID NO: 7078 - protein, 217 aa, Artificial sequence
  consensus sequence
  Variant (2)..(6): Xaa in position 2 to 6 is any amino acid
  Variant (8)..(8): Xaa in position 8 is any amino acid
  Variant (10)..(10): Xaa in position 10 is any amino acid
  Variant (12)..(13): Xaa in position 12 to 13 is any amino acid
  Variant (15)..(15): Xaa in position 15 is any amino acid
  Variant (17)..(18): Xaa in position 17 to 18 is any amino acid
  Variant (21)..(21): Xaa in position 21 is any amino acid
  Variant (24)..(24): Xaa in position 24 is any amino acid
  Variant (27)..(27): Xaa in position 27 is any amino acid
  Variant (29)..(34): Xaa in position 29 to 34 is any amino acid
  Variant (35)..(37): Xaa in position 35 to 37 is any or no amino acid
  Variant (40)..(40): Xaa in position 40 is any amino acid
  Variant (42)..(51): Xaa in position 42 to 51 is any amino acid
  Variant (52)..(52): Xaa in position 52 is any or no amino acid
  Variant (55)..(57): Xaa in position 55 to 57 is any amino acid
  Variant (60)..(61): Xaa in position 60 to 61 is any amino acid
  Variant (63)..(64): Xaa in position 63 to 64 is any amino acid
  Variant (66)..(67): Xaa in position 66 to 67 is any amino acid
  Variant (69)..(76): Xaa in position 69 to 76 is any amino acid
  Variant (77)..(85): Xaa in position 77 to 85 is any or no amino acid
  Variant (87)..(87): Xaa in position 87 is any amino acid
  Variant (90)..(90): Xaa in position 90 is any amino acid
  Variant (92)..(92): Xaa in position 92 is any amino acid
  Variant (94)..(100): Xaa in position 94 to 100 is any amino acid
  Variant (101)..(101): Xaa in position 101 is any or no amino acid
  Variant (103)..(103): Xaa in position 103 is any amino acid
  Variant (105)..(109): Xaa in position 105 to 109 is any amino acid
  Variant (110)..(164): Xaa in position 110 to 164 is any or no amino acid
  Variant (167)..(170): Xaa in position 167 to 170 is any amino acid
  Variant (172)..(182): Xaa in position 172 to 182 is any amino acid
  Variant (184)..(186): Xaa in position 184 to 186 is any amino acid
  Variant (188)..(201): Xaa in position 188 to 201 is any amino acid
  Variant (202)..(202): Xaa in position 202 is any or no amino acid
  Variant (204)..(205): Xaa in position 204 to 205 is any amino acid
  Variant (207)..(207): Xaa in position 207 is any amino acid
  Variant (209)..(213): Xaa in position 209 to 213 is any amino acid
  Variant (214)..(216): Xaa in position 214 to 216 is any or no amino acid
LXXXXXGXLXRXXGXFXXRGXNIXSLXVXXXXXXXXXSRXTXXXXXXXXXXXEQXXXQLXXLXXVXXVXXXXXXXXXXXXXXXXXRXELXLXKXXXXXXXXRXEXXXXXXXXXXXXXXXXXXXXXXXXXXXXXXXXXXXXXXXXXXXXXXXXXXXXXXXXXXXXFRXXXXDXXXXXXXXXXXGXXXKXXXXXXXXXXXXXXXEXXRXGXXXXXXXXR

SEQ ID NO: 7079 - protein, 28 aa, Artificial sequence
  protein pattern
  Variant (2)..(3): Xaa in position 2 to 3 is any amino acid
  Variant (4)..(5): Xaa in position 4 to 5 is any or no amino acid
  Variant (7)..(8): Xaa in position 7 to 8 is any amino acid
  Variant (9)..(9): Xaa in position 9 is any or no amino acid
  Variant (11)..(11): Xaa in position 11 is any amino acid
  Variant (13)..(14): Xaa in position 13 to 14 is any amino acid
  Variant (15)..(15): Xaa in position 15 is Ile, Leu or Val
  Variant (16)..(16): Xaa in position 16 is any amino acid
  Variant (17)..(17): Xaa in position 17 is Ala, Gly or Ser
  Variant (18)..(18): Xaa in position 18 is any amino acid
  Variant (19)..(19): Xaa in position 19 is Phe, Ile or Leu
  Variant (20)..(21): Xaa in position 20 to 21 is any amino acid
  Variant (23)..(23): Xaa in position 23 is any amino acid
  Variant (24)..(24): Xaa in position 24 is Phe or Tyr
  Variant (27)..(27): Xaa in position 27 is any amino acid
  Variant (28)..(28): Xaa in position 28 is Ala, Cys, Ser or Thr
LXXXXNXXXGXLXXXXXXXXXRXXNIXX

SEQ ID NO: 7080 - protein, 12 aa, Artificial sequence
  protein pattern
  Variant (2)..(2): Xaa in position 2 is any amino acid
  Variant (3)..(3): Xaa in position 3 is Ala, Cys, Ser or Val
  Variant (5)..(5): Xaa in position 5 is Ser or Thr
  Variant (7)..(8): Xaa in position 7 to 8 is any amino acid
  Variant (9)..(9): Xaa in position 9 is Ala, Gly or Ser
  Variant (10)..(10): Xaa in position 10 is Phe, Ile, Leu, Met or Val
  Variant (11)..(11): Xaa in position 11 is any amino acid
EXXRXGXXXXXR

SEQ ID NO: 7081 - DNA, 1425 bp, Escherichia coli
  CDS (1)..(1425): transl_table=11
atgaaaaaaaccacattagcactgagtgcactggctctgagtttaggtttggcgttatctccgctctctgcaacggcggctgagacttcttcagcaacgacagcccagcagatgccaagccttgcaccgatgctcgaaaaggtgatgccttcagtggtcagcattaacgtagaaggtagcacaaccgttaatacgccgcgtatgccgcgtaatttccagcagttcttcggtgatgattctccgttctgccaggaaggttctccgttccagagctctccgttctgccagggtggccagggcggtaatggtggcggccagcaacagaaattcatggcgctgggttccggcgtcatcattgatgccgataaaggctatgtcgtcaccaacaaccacgttgttgataacgcgacggtcattaaagttcaactgagcgatggccgtaagttcgacgcgaagatggttggcaaagatccgcgctctgatatcgcgctgatccaaatccagaacccgaaaaacctgaccgcaattaagatggcggattctgatgcactgcgcgtgggtgattacaccgtagcgattggtaacccgtttggtctgggcgagacggtaacttccgggattgtctctgcgctggggcgtagcggcctgaatgccgaaaactacgaaaacttcatccagaccgatgcagcgatcaaccgtggtaactccggtggtgcgctggttaacctgaacggcgaactgatcggtatcaacaccgcgatcctcgcaccggacggcggcaacatcggtatcggttttgctatcccgagtaacatggtgaaaaacctgacctcgcagatggtggaatacggccaggtgaaacgcggtgagctgggtattatggggactgagctgaactccgaactggcgaaagcgatgaaagttgacgcccagcgcggtgctttcgtaagccaggttctgcctaattcctccgctgcaaaagcgggcattaaagcgggtgatgtgatcacctcactgaacggtaagccgatcagcagctttgccgcactgcgtgctcaggtgggtactatgccggtaggcagcaaactgaccctgggcttactgcgcgacggtaagcaggttaacgtgaacctggaactgcagcagagcagccagaatcaggttgattccagctccatcttcaacggcattgaaggcgctgagatgagcaacaaaggcaaagatcagggcgtggtagtgaacaacgtgaaaacgggcactccggctgcgcagatcggcctgaagaaaggtgatgtgattattggcgcgaaccagcaggcagtgaaaaacatcgctgaactgcgtaaagttctcgacagcaaaccgtctgtgctggcactcaacattcagcgcggcgacagcaccatctacctgttaatgcagtaa

SEQ ID NO: 7082 - protein, 474 aa, Escherichia coli
MKKTTLALSALALSLGLALSPLSATAAETSSATTAQQMPSLAPMLEKVMPSVVSINVEGSTTVNTPRMPRNFQQFFGDDSPFCQEGSPFQSSPFCQGGQGGNGGGQQQKFMALGSGVIIDADKGYVVTNNHVVDNATVIKVQLSDGRKFDAKMVGKDPRSDIALIQIQNPKNLTAIKMADSDALRVGDYTVAIGNPFGLGETVTSGIVSALGRSGLNAENYENFIQTDAAINRGNSGGALVNLNGELIGINTAILAPDGGNIGIGFAIPSNMVKNLTSQMVEYGQVKRGELGIMGTELNSELAKAMKVDAQRGAFVSQVLPNSSAAKAGIKAGDVITSLNGKPISSFAALRAQVGTMPVGSKLTLGLLRDGKQVNVNLELQQSSQNQVDSSSIFNGIEGAEMSNKGKDQGVVVNNVKTGTPAAQIGLKKGDVIIGANQQAVKNIAELRKVLDSKPSVLALNIQRGDSTIYLLMQ

SEQ ID NO: 7083 - DNA, 1452 bp, Borrelia burgdorferi B31
  CDS (1)..(1452): transl_table=11
ttgagtaattatgtggaggttataaaagtggaaaaaaagtttttttctggatttcttcttagttttttggctttgagtattggattttttattgggatgcattatttagcttctaatagaagcaacattgtttttgcagaagaaaaggacaataccgtacgagccttacaagattcttttagagaggtttccaagaaaattttaccatcatctgtggaagttcatgcaacaggggtaatcaagcagagttttcctattccatttttcttttttgatatgccagaatttgattctgagagaaaaagcaattgggcggggtctggagtaataattggtagagattctcaaaaaaaatcattattttatgtggttacgaatagtcatgtggtagataaggcaactgaacttgaagttgtatcttatgataaaaaaaagcacaaggctaagttaattggcaaagatgaaaaaaaggatattgcccttattagctttgaaagtgatgacgcaactattaaagtagctgatcttggagatagtgataagcttgaaataggtgattgggttatggcagtgggcagcccttttcaatttagttttacagttacagcaggtattgtaagtggattgcaacgttctgcaaatcctaatttgcaatcaaggaatctgtttattcaaaccgatgctgcaatcaacaggggtaattcaggtggtcctcttgtaaatataaagggcgaggttattggaattaatgcttggatagcttcaaattctggcggaaatattgggttgggttttgcaattcctgttaacaatattaaaagcactgtagattttttccttaaaggtaaaaaaattgaatcggcttggcttggaatttctttttatccgctaaagacaagagattctgaggtgctaaaaagcttaggggttgaaagtaatgatgtttcagctgcaattattgcttctctttatccgggttcacccgctgttaaatcagggcttagggcaggggatattattatgaaggttaatggggtttccatgagcgtttttcaagatgttacatcatatattagtgatttttatgctggtgagaaagtaaatgtagaaatcttaagaggcaatgtcaaaaaaaatattgagattgttcttgctgttagacctaaggataaagagctttcttcttcaaagatgcttccaggctttgttgtgtatccattggttgaggatattaaagctcagcttaatttaagaaattggattaaaggtgttgttgttgattatattgataaaaatttagcatcaaatattaaaatgaaatcaggagatgtaattctttctgtaaattcaaaaagtgtttctaatttaagagaattttatgatgctcttgaggttggaaaaaatacttataaaattttgagaggaaacgattcttttaaaattacattttag

SEQ ID NO: 7084 - protein, 483 aa, Borrelia burgdorferi B31
MSNYVEVIKVEKKFFSGFLLSFLALSIGFFIGMHYLASNRSNIVFAEEKDNTVRALQDSFREVSKKILPSSVEVHATGVIKQSFPIPFFFFDMPEFDSERKSNWAGSGVIIGRDSQKKSLFYVVTNSHVVDKATELEVVSYDKKKHKAKLIGKDEKKDIALISFESDDATIKVADLGDSDKLEIGDWVMAVGSPFQFSFTVTAGIVSGLQRSANPNLQSRNLFIQTDAAINRGNSGGPLVNIKGEVIGINAWIASNSGGNIGLGFAIPVNNIKSTVDFFLKGKKIESAWLGISFYPLKTRDSEVLKSLGVESNDVSAAIIASLYPGSPAVKSGLRAGDIIMKVNGVSMSVFQDVTSYISDFYAGEKVNVEILRGNVKKNIEIVLAVRPKDKELSSSKMLPGFVVYPLVEDIKAQLNLRNWIKGVVVDYIDKNLASNIKMKSGDVILSVNSKSVSNLREFYDALEVGKNTYKILRGNDSFKITF

SEQ ID NO: 7085 - DNA, 1431 bp, Helicobacter pylori J99
  CDS (1)..(1431): transl_table=11
atgatgaaaaaaactttttttgtctctttggctttagcgttaagcttgaatgcgggcaatatccaaatccaaaacatgcccaaagtgaaagagcgaataagcgtcccctctaaagaggatacgatctattcttaccacgattctattaaggattctattaaagcggtggtgaatatctccactgaaaagaagattaaaaacaattttataggtggcggtgtgtttaatgacccctttttccaacaatttttcggggatttgggtggcatgatccctaaagaaagaatggaaagggctttaggcagcggcgtcatcatttctaaagatggctatatcgttacgaataaccatgtgattgatggcgcggataagattaaagtaaccattccagggagcaacaaagaatattccgccactttagtaggcacggattctgaaagcgatttagcggtgattcgcatcactaaagacaacttacccacgatcaaattctctgattctaatgatattttagtgggcgatttggtttttgccatcggtaacccttttggcgtgggtgaaagcgttacgcaaggcattgtttcagcgctcaataaaagcgggattgggatcaacagctatgaaaatttcattcaaacagacgcttccattaatcctggaaattccggcggcgctttaattgatagccgtggagggttagtggggatcaataccgctatcatttctaaaaccggcggtaaccacggtattggctttgccatcccttctaacatggttaaagatattgtaacccagctcatcaaaaccggtaagattgaaagaggttacttgggcgtgggcttgcaagatttgagcggcgatttgcaaaattcttatgacaataaagaaggggcggtggtcattagcgtagaaaaagactctccggctaaaaaagcagggattttggtgtgggatttgatcactgaagtcaatgggaaaaaggttaaaaacacgaatgagttaagaaacctaatcggctccatgctacccaatcaaagagtaaccttaaaagtcattagagacaaaaaagaacgcactttcaccctcactcttgctgaaaggaaaaaccctaacaaaaaagaaaccatttctgctcaaaacggtgtgcaaggtcagttgaacgggcttcaagtagaagatttaacccaaaaaaccaaaaggtctatgcgtttgagcgatgacgttcaaggggttttagtctctcaagtgaatgaaaattccccagcagagcaagccggcttcagacaaggcaacatcatcacaaaaattgaagaggttgaagttaaaagcgttgcggattttaaccatgctttagaaaaatataaaggcaaacccaaacgattcttagttttagacttgaaccaaggttatagaatcattttggtgaaatga

SEQ ID NO: 7086 - protein, 476 aa, Helicobacter pylori J99
MMKKTFFVSLALALSLNAGNIQIQNMPKVKERISVPSKEDTIYSYHDSIKDSIKAVVNISTEKKIKNNFIGGGVFNDPFFQQFFGDLGGMIPKERMERALGSGVIISKDGYIVTNNHVIDGADKIKVTIPGSNKEYSATLVGTDSESDLAVIRITKDNLPTIKFSDSNDILVGDLVFAIGNPFGVGESVTQGIVSALNKSGIGINSYENFIQTDASINPGNSGGALIDSRGGLVGINTAIISKTGGNHGIGFAIPSNMVKDIVTQLIKTGKIERGYLGVGLQDLSGDLQNSYDNKEGAVVISVEKDSPAKKAGILVWDLITEVNGKKVKNTNELRNLIGSMLPNQRVTLKVIRDKKERTFTLTLAERKNPNKKETISAQNGVQGQLNGLQVEDLTQKTKRSMRLSDDVQGVLVSQVNENSPAEQAGFRQGNIITKIEEVEVKSVADFNHALEKYKGKPKRFLVLDLNQGYRIILVK

SEQ ID NO: 7087 - DNA, 1380 bp, Pasteurella multocida subsp. multocida str. Pm70
  CDS (1)..(1380): transl_table=11
atgagaaaaagacgttttctattaacaagtattgcactcggattaagcattttatcgacgccgatgataagtcaagcgtccttaccaactcaagttgacggtcagcaagtccctagcctcgcccctatgttagaaaaagtcttaccagcggtggtatctatttctgtggaagggaaagccaagaatcatggtagtacaccatttcaaggtatcccagaagaatttcgttttttctttggtcccgatcttttcaatgatcgcgcaccacgtaatttccgtggtatcggctcaggcgtcatcattaacgctgaaaaaggttatgtgttaacgaataatcacgtcattgacagtgcagataaaatcaccgtgcagttacaagatggtcgagagttaagcgcaaaagtgattggtactgatgaattatctgatgttgcactgattcaaattgaaaaacccaaaaatttgaccgcactaacgattgctgattccgataaactccgcgttggcgattttactgtagctattggtaatccttttggcttgggacaaaccgtgacatctggtatcgtctctgccttaggtcgttcaacgggttcagataacggtacgtatgaaaactatatccaaactgatgccgcagtaaaccgcggaaattcaggaggtcctttaatcaacctacaaggagagctaattggtattaatactgcgattatttcaccaagtgggggaaatgccggcattgcttttgcaattccaagtaatatggcaaataacttagtacaacaaattttagaattcggtgaagtacgtcgtggcatgctaggcattaaagggggcgagctcaacgcggatctagcgaaagcttttgatattgaagctcaacaaggggcatttgtaagtgaagtcttgcctaattctgctgcagaaaaagccggtttaaaagcaggtgatgtcattgtcgcgatgaatggtcagaaaatttccagttttgctgaaatgcgagcaaagatcgcgacatctggtgcagggaaagaaattgctctcacctatctacgcgacggtaaaacacatcaaacaaaggtcacattacaatcagatgatcaaactcaagccgatgcaagtcacttattaccggcattagctggggctgagatgagcaatcatgatgataaaggcgtcaaaggcgtactcatcacgagtgtgacacctaaatcgcttgcagaacaacgtggtttgaaaaagggcgatgtcatcattggggtgaaccgtcaaaaagtagaaaatttaggtcaactgcgtaaaattttagatgcaaaaccttcggcgattgctctaaatattgtgcgtggcaatacgaatttctatcttcttattcaataa

SEQ ID NO: 7088 - protein, 459 aa, Pasteurella multocida subsp. multocida str. Pm70
MRKRRFLLTSIALGLSILSTPMISQASLPTQVDGQQVPSLAPMLEKVLPAVVSISVEGKAKNHGSTPFQGIPEEFRFFFGPDLFNDRAPRNFRGIGSGVIINAEKGYVLTNNHVIDSADKITVQLQDGRELSAKVIGTDELSDVALIQIEKPKNLTALTIADSDKLRVGDFTVAIGNPFGLGQTVTSGIVSALGRSTGSDNGTYENYIQTDAAVNRGNSGGPLINLQGELIGINTAIISPSGGNAGIAFAIPSNMANNLVQQILEFGEVRRGMLGIKGGELNADLAKAFDIEAQQGAFVSEVLPNSAAEKAGLKAGDVIVAMNGQKISSFAEMRAKIATSGAGKEIALTYLRDGKTHQTKVTLQSDDQTQADASHLLPALAGAEMSNHDDKGVKGVLITSVTPKSLAEQRGLKKGDVIIGVNRQKVENLGQLRKILDAKPSAIALNIVRGNTNFYLLIQ

SEQ ID NO: 7089 - DNA, 1368 bp, Escherichia coli O157:H7 EDL933
  CDS (1)..(1368): transl_table=11
  misc_feature (265)..(265): k is g or t
atgaaaaaacaaacccagctgttgagtgcattagcgttaagtgtcgggttaactctctcggcgtcatttcaggccgttgcgtcgatcccaggccaggttgccgatcaggcccccctccccagtctggctccaatgctggaaaaagtgcttccggcagtggtgagcgtacgggtggaaggaacggccagtcagggacagaaaatcccggaagaattcaaaaagttttttggtgatgatttaccggatcaacctgcacaacccttckaaggtttaggctccggtgtcatcatcaacgccagtaaaggctatgtgctgaccaacaaccatgtgattaatcaggcacagaaaatcagtattcagctcaatgatgggcgcgagtttgatgcaaaactgattggtagcgatgaccagagcgatatcgccctgttgcaaattcaaaacccgagcaaattaacgcaaatcgctattgccgactccgataaattgcgcgtcggtgattttgccgtggcggtcggtaacccatttggccttgggcaaaccgccacctctggcattgtttccgcattaggacgcagcgggttgaatcttgaaggtctggaaaactttatccagacagatgcttccattaaccgcggtaactccggcggtgcactgttaaaccttaacggtgagttaattggcatcaacactgcaatccttgcgcctggcggcgggagcgtcggaattggatttgccatccccagtaatatggcgcgaacactggcgcagcagcttatcgactttggtgaaatcaaacgcggtttgttaggcatcaaaggcaccgagatgagtgccgatatcgccaaagccttcaaccttgacgtgcagcgtggcgcgtttgtcagcgaagtgttgccaggttctggctcggcgaaagcgggcgtcaaaacgggcgatattattaccagcctcaacggcaaaccgctgaatagctttgctgagttgcgctctcgtatcgcgaccaccgagccgggcacgaaagtgaagcttggcctgctgcgtaacggcaaaccactggaagtagaagtgacgctcgataccagcacctcttcgtcggccagcgctgaaatgatcacgccagcgctggaaggtgcaacgttgagcgatggtcagctaaaagatggcggcaaaggtattaaaatcgatgaagttgtcaaaggaagcccagctgctcaggctggcttgcaaaaagacgatgtgatcattggcgtcaaccgcgatcgggtgaactcgattgctgaaatgcgtaaagtgctggcggcaaaaccggccatcatcgccctgcaaattgtacgcggcaatgaaagcatctatctgctgatgcgttaa

SEQ ID NO: 7090 - protein, 455 aa, Escherichia coli O157:H7 EDL933
  misc_feature (89)..(89): The Xaa at location 89 stands for Stop, or Glu.
MKKQTQLLSALALSVGLTLSASFQAVASIPGQVADQAPLPSLAPMLEKVLPAVVSVRVEGTASQGQKIPEEFKKFFGDDLPDQPAQPFXGLGSGVIINASKGYVLTNNHVINQAQKISIQLNDGREFDAKLIGSDDQSDIALLQIQNPSKLTQIAIADSDKLRVGDFAVAVGNPFGLGQTATSGIVSALGRSGLNLEGLENFIQTDASINRGNSGGALLNLNGELIGINTAILAPGGGSVGIGFAIPSNMARTLAQQLIDFGEIKRGLLGIKGTEMSADIAKAFNLDVQRGAFVSEVLPGSGSAKAGVKTGDIITSLNGKPLNSFAELRSRIATTEPGTKVKLGLLRNGKPLEVEVTLDTSTSSSASAEMITPALEGATLSDGQLKDGGKGIKIDEVVKGSPAAQAGLQKDDVIIGVNRDRVNSIAEMRKVLAAKPAIIALQIVRGNESIYLLMR

SEQ ID NO: 7091 - DNA, 1446 bp, Xylella fastidiosa 9a5c
  CDS (1)..(1446): transl_table=11
atgcgaccgctacctactttactgacgctatctatcgctgccgcattcggcggttttgccgccactgggatgaatgcttggcttgacaaccgggccgaagcggcatccaacaccaatgccatctcaccaatatcatcactgccaacgggcacggtgcctcaaaccacggctgccaaccagccgctaccatcgttagcacccatgctgcaacaagtgatgccagcagtggtcagcatcaacagtaaacaagtggtacgggtgcgcaatccatttttcgacgacccgatcctacgtcggctattcccagagatcccccaagaacgcattaatgagtcgctcggatctggggtgatcatcgacgcgcgcaatggctacgtacttaccaatcatcacgtgatcgaaaatgccgacgccgtgcaggtgacattagcagatgggcgcagcttcaaggccgagttcctcggttctgacgcagacaccgacatcgccttgatccggatcaaagcaaataaactgaccgaaatcaaactcgcagacagtaacaaattacgcgtgggcgacttcgtcgtagccattggtaacccgttcggctttacccaaacggtgacctcaggcatcgtttcggcggtaggtcgcagtggcatcctcggcctgggttaccaaaacttcatccagaccgacgcatcgatcaacccgggtaactcaggcggcgcactggtgaatcttcatggccagttggttggcatcaacacggccagcttcaacccacagggcagcatggctggcaacatcggcttaggcctggcgattccttcgaatctagcgcgcaacgtcgtcgagcaattggtcacgaaaggcgttgtggtacgcgggacaatcggcgtacaaacacagaatattgatgcacgaatggcacgaagcttaggcctgagtaatccacacggcgcattagtgacgcgcgtattacccaattccgctggtgccacagccggactgcaaccaggtgatgtgatcctggcagccaatgaccaaagggtggacaacgcggaaacattgcacaactacgaaggactacagcccgtcggtagctcagtaacactggaagtacaccgtggcggcaagccactcaaaatacgcctcacacttaaagaattgccacgcgcaatcgccggagaaacgctggattcacgactgtcgggcgccatcttcgttgacctgcccgagtccctccgtcaatcgggagtcggtggagtcatggtcaacaaagtcaaacacggcagccgcgctgcggccaatgggttggtagccggagatgtcatcattgccgcatccatcggtggattctctgatctggcgagctggcgggcaagcttttcccacccaccacaacggctgatactgcgtgtgctacgtgataacacccagtacgatgcgctgatgcgctga

SEQ ID NO: 7092 - protein, 481 aa, Xylella fastidiosa 9a5c
MRPLPTLLTLSIAAAFGGFAATGMNAWLDNRAEAASNTNAISPISSLPTGTVPQTTAANQPLPSLAPMLQQVMPAVVSINSKQVVRVRNPFFDDPILRRLFPEIPQERINESLGSGVIIDARNGYVLTNHHVIENADAVQVTLADGRSFKAEFLGSDADTDIALIRIKANKLTEIKLADSNKLRVGDFVVAIGNPFGFTQTVTSGIVSAVGRSGILGLGYQNFIQTDASINPGNSGGALVNLHGQLVGINTASFNPQGSMAGNIGLGLAIPSNLARNVVEQLVTKGVVVRGTIGVQTQNIDARMARSLGLSNPHGALVTRVLPNSAGATAGLQPGDVILAANDQRVDNAETLHNYEGLQPVGSSVTLEVHRGGKPLKIRLTLKELPRAIAGETLDSRLSGAIFVDLPESLRQSGVGGVMVNKVKHGSRAAANGLVAGDVIIAASIGGFSDLASWRASFSHPPQRLILRVLRDNTQYDALMR

SEQ ID NO: 7093 - DNA, 1572 bp, Agrobacterium tumefaciens str. C58
  CDS (1)..(1572): transl_table=11
atgtctcattcgcaaaacggccattcctcgctgaagacggcctcgctgaagacggccctgaaggccacgaccgttggcggcctcgcggcgctgatgctgtcgaccggtatcgccgcaccgatcctccactcctttgctgcccccgtcgaagtgaccgcaccgcaggttccgagcttcgccaatgtggttgatgccgtctcgcccgccgtcgtttccgttcgcgtgcagtcgaacgtgcagccggcttccgacgattccagcaacttctccttcaatttcggcggccgcggcctcgaccagctgccggatgatcacccgctgaagcgtttcttcaaggaattcggcggccagaaccaggatcgctccgaccgtggtccgaaccgccaccgtgacggcaagggtccgctgcgcccggtcgcgcaaggctccggcttcttcatctccgaagacggttatgtcgtcaccaacaatcacgtcgttgacgacggttccgcctatacggtcgtgatgaatgacggtaccgaactcgaagccaagcttgtcggccgcgatccgcgtaccgatctggcgctgctgaaggtcgatgtgaaccgcaagttcacctatgtgaaattcgccgatgacaccaagattcgcgtcggtgactgggtcgttgccgtcggtaaccccttcggcctcggcggtacggtgacgtcaggtatcatttcggcccgcggccgtgacatcggctcaggcccctatgacgactatctgcagatcgacgctgccgtgaaccgtggtaactcgggtggtcccgccttcaaccttaacggtgaagtggtgggcatcaacaccgccatcttctcgccctccggcggcaatgtcggtatcgccttcgccatcccgtcctcggtcgccaaggatgtgatcgccgacctgcaaaaggacggcaaggtcgaacgcggctggctcggcgtgcagatccagcccgtcagcaaggatatcgccgaatcgctcggccttgccgaagccaagggcgcgctggtcgtttcgccgcagtccggttctccgggcgacaaggccggcatcaagcagggtgacatcatcaccgccgtcaacggcgatccggtcaaggatgcccgcgatctgtcgcgccgcatcggcggcatggcgcccaacagcaaggttgaaatctcgctgtggcgtggcggcaagtcgcagtccgtgacggtgacgctcggtgatctcaccagcgatgaagcctccaaggcgacgccaagccagaacgatgacaagggcggcagccagtcctccagcgagaaggtgctgtccagcctcggcctgacggtttcgccttccgatgacggcaacggccttgccatcaccgatgtcgaccccgatagcgacgccgctgcccggggcctgaagacgggcgagaagatcacctcggtcaacaaccagcaggtggcttccgcagctgatatcgagaagatcctcgagcaggccaagaaggacggacgttccaaggcgctgttccagatccagacggatgacggcagccgcttcatcgcgctggatatcgaccagggttga

SEQ ID NO: 7094 - protein, 523 aa, Agrobacterium tumefaciens str. C58
MSHSQNGHSSLKTASLKTALKATTVGGLAALMLSTGIAAPILHSFAAPVEVTAPQVPSFANVVDAVSPAVVSVRVQSNVQPASDDSSNFSFNFGGRGLDQLPDDHPLKRFFKEFGGQNQDRSDRGPNRHRDGKGPLRPVAQGSGFFISEDGYVVTNNHVVDDGSAYTVVMNDGTELEAKLVGRDPRTDLALLKVDVNRKFTYVKFADDTKIRVGDWVVAVGNPFGLGGTVTSGIISARGRDIGSGPYDDYLQIDAAVNRGNSGGPAFNLNGEVVGINTAIFSPSGGNVGIAFAIPSSVAKDVIADLQKDGKVERGWLGVQIQPVSKDIAESLGLAEAKGALVVSPQSGSPGDKAGIKQGDIITAVNGDPVKDARDLSRRIGGMAPNSKVEISLWRGGKSQSVTVTLGDLTSDEASKATPSQNDDKGGSQSSSEKVLSSLGLTVSPSDDGNGLAITDVDPDSDAAARGLKTGEKITSVNNQQVASAADIEKILEQAKKDGRSKALFQIQTDDGSRFIALDIDQG

SEQ ID NO: 7095 - DNA, 1482 bp, Agrobacterium tumefaciens str. C58
  CDS (1)..(1482): transl_table=11
gtggcgggcagcctttcggcgccggttgcggcaagagcgcagagccatgggccggaatcggtggctgatcttgccgagccgctgctcgatgcggtggtgaatatttccacgtcccagaacgtcaagaccgagggcaagggtccagttccgccgaagctgccggaaggttcgcccttccaggagttcttcaaggattatttcgacagccagaagccggaaggcggcgaaaaggtcaattcgctggggtcgggtttcgtgatcgatccggctggctatgtcgtgaccaacaaccacgtcatcgagggtgctgatgccatcgaggtgattttcccgaatggctcgaagctcaaggcgacgctggtcggtaccgataccaagaccgacctttcggtcctgaaggtggagccgaaaacaccgctgaaggccgtgaagttcggcgattcgcgcagcatgcgcatcggcgactgggtgatggctgtcggcaatccgttcgggcttggcggatcgctgaccgtgggcgtcatttccgcgcgcggccgcaatatcaatgccggcccctatgacaatttcatccagacggatgcggccatcaacaagggtaactccggtggcccgctcttcaacatgaagggtgaggtgatcggcatcaatacggcgatcatttcgccgagcggcggttcgatcggtattggtttcgccgtaccgacggagcttgcccagaatatcgtgcagcagctcatcgaattcggcgagacccgccgcggctggctcggcgttcgcgttcagcctgttactgatgatgtggctgcgagcctcggcatggacagcgccaagggcgcgctgatatcaggcgtggccaagggcggcccggtggagaacggcccgatccaggcgggtgatgtcgtgctgaagttcgacggcaaggatatcaatgaaatgcgcgacctcttgcgtatcgtggcggaaagccctgtcggcaaggaagtcgatgttgtcgtttatcgcgacggcaaggaagagaccgtcaaggtcaagctcgggcaattgcaggatacgaccgacgagaaggcctcgaccgacgacccgcagggtgaagacggtgatggcagcatggtcgcccccgacgataaagacggtggcgacgatcaggcgcaggaccagacacctgaagtgcgcgaagcaccgcagaccgtgctcggcatgaatctcgtggtgctgagcaatgagctgcgcacggaaaagggcattgccgaaagcgtggaaggcgtgcttgtcgcaagcgtcgatcccggttctcccgccgaacagaagggcatgaaggccggcgacgtcatcgtcgaggtcgggcaggatttcatggaagttcctggcgacgtgctggtacgtgtgaacggcctgaagtccgaaggccgcaagaacgcgcatatgatggtggcggatgctcagggcaatctgcgcgtggtggcgttgccgctggaataa

SEQ ID NO: 7096 - protein, 493 aa, Agrobacterium tumefaciens str. C58
MAGSLSAPVAARAQSHGPESVADLAEPLLDAVVNISTSQNVKTEGKGPVPPKLPEGSPFQEFFKDYFDSQKPEGGEKVNSLGSGFVIDPAGYVVTNNHVIEGADAIEVIFPNGSKLKATLVGTDTKTDLSVLKVEPKTPLKAVKFGDSRSMRIGDWVMAVGNPFGLGGSLTVGVISARGRNINAGPYDNFIQTDAAINKGNSGGPLFNMKGEVIGINTAIISPSGGSIGIGFAVPTELAQNIVQQLIEFGETRRGWLGVRVQPVTDDVAASLGMDSAKGALISGVAKGGPVENGPIQAGDVVLKFDGKDINEMRDLLRIVAESPVGKEVDVVVYRDGKEETVKVKLGQLQDTTDEKASTDDPQGEDGDGSMVAPDDKDGGDDQAQDQTPEVREAPQTVLGMNLVVLSNELRTEKGIAESVEGVLVASVDPGSPAEQKGMKAGDVIVEVGQDFMEVPGDVLVRVNGLKSEGRKNAHMMVADAQGNLRVVALPLE

SEQ ID NO: 7097 - DNA, 1374 bp, Yersinia pestis CO92
  CDS (1)..(1374): transl_table=11
atgaagaaaacatcattacttcttagtgcgctagcaataagcgtcggcttaggtctcgcttctgttcctatggtgagtgcagcagcactgcctgcggcggtcgccggacaaacgttacctagcctggcaccaatgctggaaaaagtattacccgccgttgtcagtgttcatgtctctgggagccaggcacagcaacaacgcttgccagaagagtttaaattcttctttggcccgaatgcaccatcaggaaaagagagcagccggccattcgaaggcttaggatcaggcgttattattaacgctgagaagggctacatcctgaccaacaatcacgtcatcaataatgccgataaaattcgtgttcagctgaatgatggtcgtgaatacgatgcaaaattgttgggtcgtgatgaacaaaccgacatcgctttactgcaattaacggatgctaaaaatctgactgcgatcaaaattgcagattccgataacctgcgggtgggggattttgctgtcgccgtaggtaacccgtttggtctagggcaaaccgcgacgtcaggtattatttcagcactgggtcgtagtggcttgaatctggaagggctggaaaactttatccagaccgatgcctcaatcaaccgtggtaattctggcggtgctctggtgaatctggatggggaactgatcggaattaataccgccatccttgcgccaggtggcggtaatatcggtatcggcttcgctatcccaagtaacatggcacaaaacctcagccagcagttgatcgagtttggcgaagtgaaacgtgggctgctcggtatccgtggtagtgagatgacggctgacattgcgaaagcctttaatattgatgctcagcgtggggcttttgtcagtgaagtgctgccaaaatcagcggcagcgaaagccgggatcaaaccaggtgatgtgttgatttccgttgatgggaaaaagattagcagctttgctgaattgcgcgccaaagtcgggacaacggggccaggcaaaaccattaaaattggtttactgcgcgaagggaaaccactggaagtatcggtgacgctggataacagtagctcaacatccaccagcgctgaaaatctatcgccatcattacagggcgcatccctgagtaacggtgagctcaaagacggtagtaaggggatcaaagttgatagcgtcactaaaggttcgccagccgcacaatctggcttacaaaaagatgatgtgattattgccgtaaaccgcgaacgggttaaggatattgctgagttgcgtaaagccatcgaagccaaacctgccgtgattgcactgaatatcgtgcgtggtgaagataatatttacttattaatccgctaa

SEQ ID NO: 7098 - protein, 457 aa, Yersinia pestis CO92
MKKTSLLLSALAISVGLGLASVPMVSAAALPAAVAGQTLPSLAPMLEKVLPAVVSVHVSGSQAQQQRLPEEFKFFFGPNAPSGKESSRPFEGLGSGVIINAEKGYILTNNHVINNADKIRVQLNDGREYDAKLLGRDEQTDIALLQLTDAKNLTAIKIADSDNLRVGDFAVAVGNPFGLGQTATSGIISALGRSGLNLEGLENFIQTDASINRGNSGGALVNLDGELIGINTAILAPGGGNIGIGFAIPSNMAQNLSQQLIEFGEVKRGLLGIRGSEMTADIAKAFNIDAQRGAFVSEVLPKSAAAKAGIKPGDVLISVDGKKISSFAELRAKVGTTGPGKTIKIGLLREGKPLEVSVTLDNSSSTSTSAENLSPSLQGASLSNGELKDGSKGIKVDSVTKGSPAAQSGLQKDDVIIAVNRERVKDIAELRKAIEAKPAVIALNIVRGEDNIYLLIR

SEQ ID NO: 7099 - DNA, 1368 bp, Salmonella typhimurium LT2
  CDS (1)..(1368): transl_table=11
atgaaaaaacacacccagctgttaagtgcattagcgttaagtgtcgggttaactctttcggcgccgtttccagcccttgcatcgataccaggccaggtgccaggccaggcgacgctgccaagccttgcccctatgctggagaaagtgctgcctgctgtcgtcagcgtaaaagtcgagggaaccgccgcccagagccaaaaagtgccggaggagtttaaaaaattctttggcgaggatctgccagaccagccgtcccagccgtttgaaggactcggttcgggggtgattatcgatgccgcgaaaggctatgtattaaccaataatcatgtgattaatcaggcacagaagatcagcattcaactgaatgacggacgcgaattcgacgcgaagcagatcggcggcgacgaccagagcgatatcgctctgttacaaattcagaatcccagcaagttaacgcaaattgccatcgccgattccgacaaactccgcgtcggcgatttcgccgtggcggtcggtaatccgtttggtcttggacaaaccgccacctccgggattatttcagcgctgggacgcagcgggcttaatctggaagggcttgagaactttattcaaaccgatgcctctattaaccgcggcaactccggcggcgcgctgcttaacctgaacggcgagctgatcgggattaataccgcgatcctcgcgccagggggcgggagcatcggcattggctttgctattccttccaatatggcgcagacgctggcgcagcagttgattcagttcggcgaaatcaaacgcggattgctgggaattaaaggcactgaaatgaccgctgatatcgccaaggcattcaaactgaacgttcagcgtggcgcttttgtcagcgaggttttacccaattcaggttcggcgaaggccggggtgaaatccggagacgtgattatcagtcttaacggtaagcagctgaatagctttgccgaactgcgttcacgtatcgccaccaccgaaccgggcacgaaagtgaagctgggcctgctgcgcgatggtaagccgctggaggtggaagtcacgctggattccaatacctcttcttccgccagcgccgaaatgatcgccccggcgttgcaaggcgcaacgttgagcgacggccaactgaaagacgggacgaaaggcgttaaggttgatagcgtcgaaaaaagcagtcctgccgcgcaggccggtttgcaaaaagatgatgttatcatcggcgttaatcgcgatcgcatcagttctatcgccgaaatgcgcaaagtgatggcggcaaaaccgtccatcattgctcttcaggtagtacgcggcaacgagaacatttatctattgctgcgctaa

SEQ ID NO: 7100 - protein, 455 aa, Salmonella typhimurium LT2
MKKHTQLLSALALSVGLTLSAPFPALASIPGQVPGQATLPSLAPMLEKVLPAVVSVKVEGTAAQSQKVPEEFKKFFGEDLPDQPSQPFEGLGSGVIIDAAKGYVLTNNHVINQAQKISIQLNDGREFDAKQIGGDDQSDIALLQIQNPSKLTQIAIADSDKLRVGDFAVAVGNPFGLGQTATSGIISALGRSGLNLEGLENFIQTDASINRGNSGGALLNLNGELIGINTAILAPGGGSIGIGFAIPSNMAQTLAQQLIQFGEIKRGLLGIKGTEMTADIAKAFKLNVQRGAFVSEVLPNSGSAKAGVKSGDVIISLNGKQLNSFAELRSRIATTEPGTKVKLGLLRDGKPLEVEVTLDSNTSSSASAEMIAPALQGATLSDGQLKDGTKGVKVDSVEKSSPAAQAGLQKDDVIIGVNRDRISSIAEMRKVMAAKPSIIALQVVRGNENIYLLLR

SEQ ID NO: 7101 - DNA, 1407 bp, Agrobacterium tumefaciens str. C58
  CDS (1)..(1407): transl_table=11
atgcgaggcgtgttgaagtatctgtccaccggctttcttgctgcgctcgttctcctgcccgtgggcgcaagagcgcaggacaacaagaccgtgccggcaagccacacggaaatgcagctctccttcgcgccgctggtgaagcgcaccgcaggtgctgtggtgaatgtctatgccgagcgcgtcgtgcagcggcgtgtttccccttttgccggtgatcccttcttcgagcagtttttcggccagcaaatgccgaaccgtacggaaaagcagtcatcgctcggttcgggcgtgatcgtaacggcgggcggcctcgtggtgacgaacaatcacgtcatcgacggcgctgatgacatcaaggtggcgctggcggatggtcgcgagttttcctccaaggtgctgatgaaggacgatcgggttgatctcgccgtgttgcagattgacgccaaggagcaattccccgtgctgtcgctcggcgattccgacaagatcgaggttggtgatctggtgctcgccatcggcaaccccttcggggtcggccagacggtgacgagcggcatcgtctccggtctagcgcgcaaccaggtgacgcagggtgatttcggcttcttcatccagaccgacgcctccatcaaccccggcaattccggcggtgcgctgatgaacatggcgggcgagctggtcggcatcaataccgcgatcttttccaagggcggcgggtcgaacggcatcggttttgccattcccgccaatctggttcgggttttcgtagcggccgcggagcgcggcgacgctaacttccagaggccctatatcggtgcaacgttcgatccggtgacgtcagatgtcgcggaagcgctcggcttgcatcgcgcgcgcggcgcgctcgtcgtcggcgtcaccaagggtggtccggcggagaaggctggtatcgagcccggacaggtggtgactgcggtcaatggcctggaagtggagcatcccgatgcgctgggttatcgcctgacgacggccggcatcggcaaatcggccgaattgacggtggtggaaaagggcaaagaaaagaagctgaccatcgctctcaatacggcacccgaaaccgcgccgcgtgacgagcggctgctcgaaggccgcaatcccttcgcaggtgctaccgtcgccaacctctcgccgaagcttgcggatgaattgcgcatgccttcgcaggtgacgggcgtcgtcatcaccgatgtgaagcgtggctcaccggcctatcgcgtcggtttccagccgaaggatgtcatcctgtcgctgaatggtgcggatatcggctccaccgctgcggttgaaaaggcgctggacgacaatcccggcttctggcgggtggaaatcctgcgcgacgggcagcgtatccggcagttcctgcgatga

SEQ ID NO: 7102 - protein, 468 aa, Agrobacterium tumefaciens str. C58
MRGVLKYLSTGFLAALVLLPVGARAQDNKTVPASHTEMQLSFAPLVKRTAGAVVNVYAERVVQRRVSPFAGDPFFEQFFGQQMPNRTEKQSSLGSGVIVTAGGLVVTNNHVIDGADDIKVALADGREFSSKVLMKDDRVDLAVLQIDAKEQFPVLSLGDSDKIEVGDLVLAIGNPFGVGQTVTSGIVSGLARNQVTQGDFGFFIQTDASINPGNSGGALMNMAGELVGINTAIFSKGGGSNGIGFAIPANLVRVFVAAAERGDANFQRPYIGATFDPVTSDVAEALGLHRARGALVVGVTKGGPAEKAGIEPGQVVTAVNGLEVEHPDALGYRLTTAGIGKSAELTVVEKGKEKKLTIALNTAPETAPRDERLLEGRNPFAGATVANLSPKLADELRMPSQVTGVVITDVKRGSPAYRVGFQPKDVILSLNGADIGSTAAVEKALDDNPGFWRVEILRDGQRIRQFLR

SEQ ID NO: 7103 - DNA, 1545 bp, Agrobacterium tumefaciens str. C58
  CDS (1)..(1545): transl_table=11
atggccgtgacccttctttcgccttttcgcagcagcattgccgcagttgcgggcatcgcgcttgtggcgggcagcctttcggcgccggttgcggcaagagcgcagagccatgggccggaatcggtggctgatcttgccgagccgctgctcgatgcggtggtgaatatttccacgtcccagaacgtcaagaccgagggcaagggtccagttccgccgaagctgccggaaggttcgcccttccaggagttcttcaaggattatttcgacagccagaagccggaaggcggcgaaaaggtcaattcgctggggtcgggtttcgtgatcgatccggctggctatgtcgtgaccaacaaccacgtcatcgagggtgctgatgccatcgaggtgattttcccgaatggctcgaagctcaaggcgacgctggtcggtaccgataccaagaccgacctttcggtcctgaaggtggagccgaaaacaccgctgaaggccgtgaagttcggcgattcgcgcagcatgcgcatcggcgactgggtgatggctgtcggcaatccgttcgggcttggcggatcgctgaccgtgggcgtcatttccgcgcgcggccgcaatatcaatgccggcccctatgacaatttcatccagacggatgcggccatcaacaagggtaactccggtggcccgctcttcaacatgaagggtgaggtgatcggcatcaatacggcgatcatttcgccgagcggcggttcgatcggtattggtttcgccgtaccgacggagcttgcccagaatatcgtgcagcagctcatcgaattcggcgagacccgccgcggctggctcggcgttcgcgttcagcctgttactgatgatgtggctgcgagcctcggcatggacagcgccaagggcgcgctgatatcaggcgtggccaagggcggcccggtggagaacggcccgatccaggcgggtgatgtcgtgctgaagttcgacggcaaggatatcaatgaaatgcgcgacctcttgcgtatcgtggcggaaagccctgtcggcaaggaagtcgatgttgtcgtttatcgcgacggcaaggaagagaccgtcaaggtcaagctcgggcaattgcaggatacgaccgacgagaaggcctcgaccgacgacccgcagggtgaagacggtgatggcagcatggtcgcccccgacgataaagacggtggcgacgatcaggcgcaggaccagacacctgaagtgcgcgaagcaccgcagaccgtgctcggcatgaatctcgtggtgctgagcaatgagctgcgcacggaaaagggcattgccgaaagcgtggaaggcgtgcttgtcgcaagcgtcgatcccggttctcccgccgaacagaagggcatgaaggccggcgacgtcatcgtcgaggtcgggcaggatttcatggaagttcctggcgacgtgctggtacgtgtgaacggcctgaagtccgaaggccgcaagaacgcgcatatgatggtggcggatgctcagggcaatctgcgcgtggtggcgttgccgctggaataa

SEQ ID NO: 7104 - protein, 514 aa, Agrobacterium tumefaciens str. C58
MAVTLLSPFRSSIAAVAGIALVAGSLSAPVAARAQSHGPESVADLAEPLLDAVVNISTSQNVKTEGKGPVPPKLPEGSPFQEFFKDYFDSQKPEGGEKVNSLGSGFVIDPAGYVVTNNHVIEGADAIEVIFPNGSKLKATLVGTDTKTDLSVLKVEPKTPLKAVKFGDSRSMRIGDWVMAVGNPFGLGGSLTVGVISARGRNINAGPYDNFIQTDAAINKGNSGGPLFNMKGEVIGINTAIISPSGGSIGIGFAVPTELAQNIVQQLIEFGETRRGWLGVRVQPVTDDVAASLGMDSAKGALISGVAKGGPVENGPIQAGDVVLKFDGKDINEMRDLLRIVAESPVGKEVDVVVYRDGKEETVKVKLGQLQDTTDEKASTDDPQGEDGDGSMVAPDDKDGGDDQAQDQTPEVREAPQTVLGMNLVVLSNELRTEKGIAESVEGVLVASVDPGSPAEQKGMKAGDVIVEVGQDFMEVPGDVLVRVNGLKSEGRKNAHMMVADAQGNLRVVALPLE

SEQ ID NO: 7105 - DNA, 1437 bp, Xanthomonas campestris pv. campestris str. ATCC 33913
  CDS (1)..(1437): transl_table=11
atgcgaccgctgcccaccctgctgtccctttcgctggccgccgcgttcggcggtttcgctgccagcggcatcaatgcctggctggacaaccgcgccgaagcggcgcccactgccggtgcggcgtttacgctgcccaccgccgccacgttgccggcggcggtcgccgggcagccggtgccctcactggcgccgatgctgcagcaggccatgccggcagtggtgagcgtcaacaccaagcaggtggtgcgggtacgcaacccgttcttcaatgatccgatcctgcgccggctgtttccggaaattccgcaggaccgcatcaacgagtcgctgggctcgggggtgatcatcgatgcgcaaaaaggctatgtgctgaccaaccaccacgtcatcgaaaacgccgacgacgtacaggtgacgctcggcgacgggcgcacggtcaaggccgatttcattggctccgatgccgataccgacatcgcgctgatccgcatcaaggccgacaacctcaccgacatcaaactggctgacagcaacgccttgcgcgtcggcgactttgtggtggcgatcggtaacccgttcggcttcacccagacggtcacctcgggcatcgtgtcggcggtgggccgcagcggcatccgtgggctgggctaccagaacttcatccagaccgatgcgtcgatcaaccccggcaattccggcggtgcgctggtcaatctgcagggccagttggtcggcatcaataccgccagcttcaacccgcaaggcagcatggccggcaacatcggcctgggcctggcgatcccgtccaacctggcgcgcaacgtggtcgagcaattggtgaccaagggcgtggtggtgcgcggcacgcttggcctggaaacccagaacctgacccagcaaatgctgcagggcctgggtgtggattcgctgcgcggtgcgctggtgacgcgcgtgctgccgggttcggccgcggcagcggctggcgtgcaacctggtgatgtgatcgtggcagccaacgatcaacgcgtggacagcgcgcaggcgctgcacaactacgaaggcctgcaggcagtaggcagtgcggtcacgctggacatccgccgcgacggcaagccgctcaagctcaaggccaccttgaaggaacaggaccgcacagtcaccggcgacatgctcgacccgcgcctgggcggcgccaccttcgtggatctgcccgaatcgctgcgccagtccggtgtcaccggggtcatggtgagcgaggtcaaacgcggcgggcgcgcggctgccaacgggctggtgagcggcgatgtgatcgtggccagcagcgtgggcgagttcgccgacctggccagctggcgggccaatttccagcgcaagccgcaacagctggtgctacgcatcctgcgcggaaacgcccagtacgacgcgctcatgcgttga

SEQ ID NO: 7106 - protein, 478 aa, Xanthomonas campestris pv. campestris str. ATCC 33913
MRPLPTLLSLSLAAAFGGFAASGINAWLDNRAEAAPTAGAAFTLPTAATLPAAVAGQPVPSLAPMLQQAMPAVVSVNTKQVVRVRNPFFNDPILRRLFPEIPQDRINESLGSGVIIDAQKGYVLTNHHVIENADDVQVTLGDGRTVKADFIGSDADTDIALIRIKADNLTDIKLADSNALRVGDFVVAIGNPFGFTQTVTSGIVSAVGRSGIRGLGYQNFIQTDASINPGNSGGALVNLQGQLVGINTASFNPQGSMAGNIGLGLAIPSNLARNVVEQLVTKGVVVRGTLGLETQNLTQQMLQGLGVDSLRGALVTRVLPGSAAAAAGVQPGDVIVAANDQRVDSAQALHNYEGLQAVGSAVTLDIRRDGKPLKLKATLKEQDRTVTGDMLDPRLGGATFVDLPESLRQSGVTGVMVSEVKRGGRAAANGLVSGDVIVASSVGEFADLASWRANFQRKPQQLVLRILRGNAQYDALMR

SEQ ID NO: 7107 - DNA, 1437 bp, Xanthomonas axonopodis pv. citri str. 306
  CDS (1)..(1437): transl_table=11
atgcgaccgctgcctaccctgctgactctttcgctggccgctgccttcggcggctttgccgccaccggcatcaacgcctggctcgacaatcgcgccgaagccacaccccccagcaacgccgcctttaccctgccgacggccgccgcattgccggcggcggtggccggccaacctgtgccgtcgctggcgccgatgctgcagcaggccatgcccgcggtggtgagcgtgaacaccaaacaggtggtgcgcgtccgcaacccgttcttcaacgacccgatcctgcgccggctgtttccgcaggtgccgcaggaccgcatcaacgagtcgctgggttcgggcgtgatcatcgatgcgcaaaaagggtatgtgctgaccaatcaccacgtcatcgaaaacgccgacgacgtgcaggtgacgctcggcgacggacgcacggtcaaggccgagttcatcggctccgatgccgataccgatattgcgctgatccgcatcaaggccgacaacctcaccgatatcaaactggccgacagcaacgcgctacgcgtgggcgattttgtggtggccatcggcaacccgttcggcttcacccagaccgtcacctccggcatcgtctcggcagtggggcgcagcgggattcgcggcttgggctaccagaacttcatccagaccgatgcctcgatcaaccccggcaactcgggcggcgcgctggtcaacctgcaaggccagttggttggcatcaacaccgccagcttcaatccgcagggcagcatggccggcaatatcggcctggggctggcgattccgtccaacctggcgcgcaatgtcgtcgagcaattggtgaccaagggcgtggtggtgcgcggcacgctcggcctggagacccagaacctcacccaacagatgctgcagggcctgggggtggattcgttgcgcggcgcattggtgacacgggtgttgccgggctccgcagcggcggcggcaggcgtgcaaccgggcgatgtcgtggtggcggccaacgaccagcgcgtggacagcgccgaagcgctgcacaactacgaaggcctgcaggcggttggcagtgcggtgaccctggatatccgtcgcgatggcaagccgctcaaactcaaggccacgctgagagagcaggaccgcgccatcaccggcgacatgctggacccgcgtctgaccggcgcgaccttcgtcgatctccccgaatcgctgcgtcagtcgggcatcaccggggtgatggtgagcgaggtcaaacgcggcggtcgcgctgccgccaacggcctggtcgccggcgatgtgatcgtggccagcagcgtgggcgagttcgccgaccttgccagctggcgggccaatttccaacgtaaaccgcagcagcttgtcgtgcgtatcctgcgtggcaacgcgcagtacgacgcgctgatgcgttga

SEQ ID NO: 7108 - protein, 478 aa, Xanthomonas axonopodis pv. citri str. 306
MRPLPTLLTLSLAAAFGGFAATGINAWLDNRAEATPPSNAAFTLPTAAALPAAVAGQPVPSLAPMLQQAMPAVVSVNTKQVVRVRNPFFNDPILRRLFPQVPQDRINESLGSGVIIDAQKGYVLTNHHVIENADDVQVTLGDGRTVKAEFIGSDADTDIALIRIKADNLTDIKLADSNALRVGDFVVAIGNPFGFTQTVTSGIVSAVGRSGIRGLGYQNFIQTDASINPGNSGGALVNLQGQLVGINTASFNPQGSMAGNIGLGLAIPSNLARNVVEQLVTKGVVVRGTLGLETQNLTQQMLQGLGVDSLRGALVTRVLPGSAAAAAGVQPGDVVVAANDQRVDSAEALHNYEGLQAVGSAVTLDIRRDGKPLKLKATLREQDRAITGDMLDPRLTGATFVDLPESLRQSGITGVMVSEVKRGGRAAANGLVAGDVIVASSVGEFADLASWRANFQRKPQQLVVRILRGNAQYDALMR

SEQ ID NO: 7109 - DNA, 1356 bp, Rhizobium etli
  CDS (1)..(1356): transl_table=11
atgtcgcgttcgttgctcgccttggcggcgctcttcatcgcaggtgagagcctattgtcggctccagccgttgcagacagcctgtcgctcgcgccgatgctccagcgtgtcgtgccgagcgtcgtcagcatctcggtgcagggcagggaactcgacgacgcggatgcaacgcttgctgatcccttctacagaaagttcttcggactacctgacgacgctgcgccggcagagcacagcttccaatcggccggatcgggtgtcgtcatcgacgaggtccacggctacatcgtcaccaaccagcatgtcatagcaagcgcctcaaaaatcgaggtggcgctctccgacggccgacgcttccaagcgaaacttgtcggcgccgatcccgagacggatgtcgctgtcgttcaaattccacctgatcatcttgttcaagccgagtttggaagcgcgtcctcgcttcacgtcggcgacgtcgtcgtggcgatcgggaatcccttcggcctgggccagaccgcgacgatgggcatcgtaagcgcgcttgggcgccgtgccgtgggatcggaggggtacgaaggattcattcagacggacgcgtcgaccaatcccggcaattcgggcggcgcgcttgtaagcgaggacggcgtcgtggtcgggatcaatagcgcgatcatcggccccgccggaggaagcatcggcatcggttttgcggtcccagccgagactgtcggcatcgtgatgcggcagctcatcctgaccggcaagttggtacgcggcgaggtgggaattttaacgcaggacctgacgcccggtctcgcaaaggcgttcggcatcgatgaaggggcgggcgcgctggtcagcgaagtccttccgggttcaccggcggcaaatgcaggaattcagccgggcgacgtcattcggatggtcgacggaaggacggtgcgcggcgcgtccgacgttcgaaggcttgtgggatcgctaccgttgcagtccaagccgtccttccagatcgaccgcgcgagccgaaggatagaagcatttcccgtggtgtccgacgcaccggttgccgaaccggctgctccgcgtaccattcatatcggccgcggccctctcgccgacgccgagatggcgaactctcccgatggtcccggcgcccgcgtcgtcgtcgtcgccgagggttcggtcgcggcacaggccggcctgcagccggacgacgttatcgtcgctctcgaccagcagccggtgacggacgtcgggcaactcctctcaatactcgtgaaggagcatgcccgtgctctcatcaccgtcgtgaggaacggccaccgcctcttcgtggccgctgacgtgcagacccagtag

SEQ ID NO: 7110 - protein, 451 aa, Rhizobium etli
MSRSLLALAALFIAGESLLSAPAVADSLSLAPMLQRVVPSVVSISVQGRELDDADATLADPFYRKFFGLPDDAAPAEHSFQSAGSGVVIDEVHGYIVTNQHVIASASKIEVALSDGRRFQAKLVGADPETDVAVVQIPPDHLVQAEFGSASSLHVGDVVVAIGNPFGLGQTATMGIVSALGRRAVGSEGYEGFIQTDASTNPGNSGGALVSEDGVVVGINSAIIGPAGGSIGIGFAVPAETVGIVMRQLILTGKLVRGEVGILTQDLTPGLAKAFGIDEGAGALVSEVLPGSPAANAGIQPGDVIRMVDGRTVRGASDVRRLVGSLPLQSKPSFQIDRASRRIEAFPVVSDAPVAEPAAPRTIHIGRGPLADAEMANSPDGPGARVVVVAEGSVAAQAGLQPDDVIVALDQQPVTDVGQLLSILVKEHARALITVVRNGHRLFVAADVQTQ

SEQ ID NO: 7111 - DNA, 1446 bp, Yersinia pestis KIM
  CDS (1)..(1446): transl_table=11
atgaaaaaaacaactttagtattaagtgcattggcattgagcattggtttcgccatgggcccggtttcttccgtcgttgcggcagagacggcagcatcgagtagccagcagctccctagcctggcgccaatgctagagaaagtaatgccttcagtggtcagtatcaacgttgaaggtagtgcgcctgtaagcagtgctggtgcacgcggtatgccaccacaattccagcagttttttggtgataactcgccattctgtcaggacggttcaccgttccaaggctcgccaatgtgtcaaggggatctgggcggactagggcagggaatgccaagtaagcgggaattccgttcgcttggttcaggtgtcattattgatgcgggcaaggggtatgtcgttaccaataaccacgtggtcgataatgcgaacaagatcagcgtaaaactgagcgatggccgcagttttgatgccaaggtgatcggtaaagatccacgtaccgatatcgcactgttacaactgaaagacgctaaaaatctgactgcgattaagattgccaattcggatcaactgcgtgtcggtgattataccgtcgctatcgggaacccgtatggcttgggtgaaaccgtgacatccggtattgtctctgctttagggcgcagtggtttgaatgtagaaaactatgaaaactttatccagactgatgcggcgattaaccgtggtaattccggcggcgcattaatcaacctgaacggtgagttgattggtattaacaccgctattctggcaccggatggcggtaacattggtattggctttgctatcccaagcaacatggtgaagaacctgacatcacagatggttgagtttggtcaggtaaaacgcggtgaactgggcattatggggaccgagctaaactctgaactggcaaaagccatgaaggttgatgcgcagaaaggtgcctttatcagccaggtcgtgcctaaatctgctgcggcaaaagcgggtatcaaagcgggcgatatcattgtcagtatgaatgggaaagccatcaatagttttgcagggttccgcgccgagatcggcacgttacctgttggcagcaaaatgaccttgggtctgctgcgtgatggcaaaccgatcaatgtggatgtcgtcctggagcagagcagccacagtcaggtggaatccggcaatctctacaccggtattgagggggctgaactgagtaacagcgacgttagcggcaagaaaggggtgaaagttgatagcgtaaaaccaggcactgctgcggcgcgtatcggcctgaaaaaaggtgatatcatcatggggattaaccagcaaccagtccagaacctaggtgagctgcggaaaatcctcgatgctaaaccaccggtattggcgttgaatattcaacgtggtgatacttcactctatttattgatgcagtaa

SEQ ID NO: 7112 - protein, 481 aa, Yersinia pestis KIM
MKKTTLVLSALALSIGFAMGPVSSVVAAETAASSSQQLPSLAPMLEKVMPSVVSINVEGSAPVSSAGARGMPPQFQQFFGDNSPFCQDGSPFQGSPMCQGDLGGLGQGMPSKREFRSLGSGVIIDAGKGYVVTNNHVVDNANKISVKLSDGRSFDAKVIGKDPRTDIALLQLKDAKNLTAIKIANSDQLRVGDYTVAIGNPYGLGETVTSGIVSALGRSGLNVENYENFIQTDAAINRGNSGGALINLNGELIGINTAILAPDGGNIGIGFAIPSNMVKNLTSQMVEFGQVKRGELGIMGTELNSELAKAMKVDAQKGAFISQVVPKSAAAKAGIKAGDIIVSMNGKAINSFAGFRAEIGTLPVGSKMTLGLLRDGKPINVDVVLEQSSHSQVESGNLYTGIEGAELSNSDVSGKKGVKVDSVKPGTAAARIGLKKGDIIMGINQQPVQNLGELRKILDAKPPVLALNIQRGDTSLYLLMQ

SEQ ID NO: 7113 - DNA, 1425 bp, Brucella suis 1330
  CDS (1)..(1425): transl_table=11
atgaattggcggtgtttgggatttgcaggcgtcgttctggcttttttcagcctggcggcggggcctgtggcggcgcaggatagccccgcaaccgccgtaagacagataccgctcagccggggggatatgcagctttccttcgcgccgctcgtcaaggaaacggcgcccgccgtggtaaatgtttatgcggcgcggcaggtacaggcgcgctcgccttttgagggcgaccccttcttcgagcagttctttggcagccagtttggcgcaagcaagccgcgtatccagcagtcgctcggttccggtgtgatcgttgatcgctccggtattattgtgacgaataatcacgtcatcaaggatgcagacgaaatcaaggtcgcgctttccgacgggcgtgagtttgaaagcaggatactgctgcgcgacgagacgaccgatctcgcggtgctgaagatcgaggcgaagcagcaattccctgtgcttgctctgggaaattccgacgaggttgaggtgggtgatctggtgctcgccatcggcaatccattcggtgtcggccagacggttacgagcggcatcgtatcggcgcaatcacgtacgcaggtcggcatttcagattttgatttcttcatccagacagatgccgccatcaaccccggtaattccggcggcgcacttatcgatatgcgcgggcgtctgatcggcatcaatacggcgatctattcgcggtcgggcggctcggtcggtatcggctttgccattccctccaacatggtgcgcgctgtcgtggatgccgccttgcagggcagcacgcgtttcgagcggccctatatcggtgcaactttccaggggatcacgcccgatctggctgaaagcctcggcatggaaaaaccttatggtgcgctgataacggcggtcgtcaaggatggcccggccgaaactgcgggcctgaaggttggcgacgtggttctgtccgttcaaggtgtgcgtgtcgataatcaggatgtgctcggctaccgtctttcgacggcagggatcggaaagacaatttccgtcgaagtcatgcgcaatggcaagaacctttcgcttccggtgaagcttaccaaggcgcccaaggtcaagcaggccgagccgaaggtcattgaaggtgataacccctttgacggggctgccgtaggggatctgacagcttcgacggcggcgaagctgcggttgaagcgaggccagcaaggggttgcggtgtttgatgtctattccggctcgccggcggcgcgtcttggcttgcgtcccggcgatattatccgcagcatcaacggcaatcagattcgcaccgttgacgatatgaccgccgtgcttgaggccggacgtggtctggcatggcggctggaaattgaacgcaacggcgctttgctgcgccagttcgtgcgctag

SEQ ID NO: 7114 - protein, 474 aa, Brucella suis 1330
MNWRCLGFAGVVLAFFSLAAGPVAAQDSPATAVRQIPLSRGDMQLSFAPLVKETAPAVVNVYAARQVQARSPFEGDPFFEQFFGSQFGASKPRIQQSLGSGVIVDRSGIIVTNNHVIKDADEIKVALSDGREFESRILLRDETTDLAVLKIEAKQQFPVLALGNSDEVEVGDLVLAIGNPFGVGQTVTSGIVSAQSRTQVGISDFDFFIQTDAAINPGNSGGALIDMRGRLIGINTAIYSRSGGSVGIGFAIPSNMVRAVVDAALQGSTRFERPYIGATFQGITPDLAESLGMEKPYGALITAVVKDGPAETAGLKVGDVVLSVQGVRVDNQDVLGYRLSTAGIGKTISVEVMRNGKNLSLPVKLTKAPKVKQAEPKVIEGDNPFDGAAVGDLTASTAAKLRLKRGQQGVAVFDVYSGSPAARLGLRPGDIIRSINGNQIRTVDDMTAVLEAGRGLAWRLEIERNGALLRQFVR

SEQ ID NO: 7115 - DNA, 1425 bp, Shigella flexneri 2a str. 301
  CDS (1)..(1425): transl_table=11
atgaaaaaaaacacattagcactgagtgcactggctctgagtttaggtttggcgttatctccgctctctgcaacggcggctgagacttcttcagcaacgacagcccagcagatgccaagccttgcaccgatgctcgaaaaggtgatgccttcagtggtcagcattaacgtagaaggtagcacaaccgttaatacgccgcgtatgccgcgtaatttccagcagttcttcggtgatgattctccgttctgccaggaaggttctccgttccagagctctccgttctgccaggggggccagggcggtaatggcggcggccagcaacagaaattcatggcgctgggttccggcgtcatcattgatgccgataaaggctatgtcgtcaccaacaaccacgttgttgataacgcgacggtgattaaagtccagctgagcgatggtcgtaagttcgacgcgaagatggttggcaaagatccgcgctctgatatcgcgctgatccaaatccagaacccgaaaaaactgaccgcaattaagatggcggattctgatgcactgcgcgtgggtgattacaccgtagcgattggtaacccgtttggtctgggcgagacggtaacttccgggattgtctctgcgctggggcgtagcggcctgaatgctgaaaactacgaaaacttcatccagaccgatgcagcgatcaaccgtggtaactccggtggtgcgctggttaacctgaacggcgaactgatcggtatcaacaccgcgatcctcgcaccggacggcggcaacatcggtatcggttttgctatcccgagtaacatggtgaaaaacctgacctcgcagatggtggaatacggccaggtgaaacgcggtgagctgggtattatggggactgagctgaattccgaactggcgaaagcgatgaaagttgacgcccagcgcggtgctttcgtaagccaggttctgcctaattcctccgctgcaaaagcgggcattaaagcgggtgatgtgatcacctcactgaacggtaagccgatcagcagctttgccgcactgcgtgctcaggtgggtactatgccggtgggcagcaaactgaccctgggcttactgcgcgacggtaagcaggttaacgtgaacctggaactgcagcagagcagccagaatcaggttgattccagctccatcttcaacggcattgaaggcgctgagatgagcaacaaaggcaaagatcagggcgtggtagtgaacaacgtgaagacgggcactccggctgcgcagatcggcctgaagaaaggtgatgtgattattggtgcgaaccagcaggcagtgaaaaacatcgctgaactgcgtaaagttctcgacagcaaaccgtctgtgctggcactgaacattcagcgcggcgacagcaccatctacctgttaatgcagtaa

SEQ ID NO: 7116 - protein, 474 aa, Shigella flexneri 2a str. 301
MKKNTLALSALALSLGLALSPLSATAAETSSATTAQQMPSLAPMLEKVMPSVVSINVEGSTTVNTPRMPRNFQQFFGDDSPFCQEGSPFQSSPFCQGGQGGNGGGQQQKFMALGSGVIIDADKGYVVTNNHVVDNATVIKVQLSDGRKFDAKMVGKDPRSDIALIQIQNPKKLTAIKMADSDALRVGDYTVAIGNPFGLGETVTSGIVSALGRSGLNAENYENFIQTDAAINRGNSGGALVNLNGELIGINTAILAPDGGNIGIGFAIPSNMVKNLTSQMVEYGQVKRGELGIMGTELNSELAKAMKVDAQRGAFVSQVLPNSSAAKAGIKAGDVITSLNGKPISSFAALRAQVGTMPVGSKLTLGLLRDGKQVNVNLELQQSSQNQVDSSSIFNGIEGAEMSNKGKDQGVVVNNVKTGTPAAQIGLKKGDVIIGANQQAVKNIAELRKVLDSKPSVLALNIQRGDSTIYLLMQ

SEQ ID NO: 7117 - DNA, 1353 bp, Shewanella oneidensis MR-1
  CDS (1)..(1353): transl_table=11
atgaaaacgaaattatctgtactttcagccgcaatgttagccgcaaccctgacaatgatgccagctgtctcacaggccgctattccgcaatctgttgagggacaatccatacccagtcttgcgcccatgttagagcgtacgactcccgccgtggtttctgtggcggtttctggaacccatgtttctaaacaacgcgtgcccgatgtgttccgttatttctttggccctaatgcgccacaagaacaagtgcaagagcgtccatttagaggcttaggctccggcgttattatcgatgccgacaaaggctatattgtcaccaataaccacgtgatcgacggtgccgatgatatccaagtgggtttacacgatggccgtgaagtcaaagccaaattgattggtactgactccgaatccgacattgcgttattgcaaatcgaggctaaaaatctggtcgcgattaaaacctctgattctgatgaactgcgcgtcggtgactttgccgtcgctatcggtaaccccttcggtctaggacaaaccgtaacatcagggattgtcagtgccctaggccgtagcggtttaggcattgaaatgcttgaaaactttatccaaaccgacgcagccatcaacagtggtaactcgggcggcgctctagttaaccttaaaggcgaactgatcggtattaacacggctatcgtcgcgcctaacggcggtaacgtaggtatcggttttgcgattccagcaaacatggtgaaaaacctcatcgcacagattgctgagcatggtgaagttcgccgcggcgtattggggattgctggccgtgatttagatagccaacttgcccaaggctttggcttagacactcaacacggtggctttgtgaatgaagttagcgcgggcagtgccgccgaaaaagctggtattaaggcgggcgatattatcgttagcgtcgatggccgtgcgatcaagtcgttccaagagctgcgtgctaaagtcgcgacgatgggcgctggcgctaaagtcgaactgggccttatccgtgatggcgataagaaaactgtcaacgtcaccttaggtgaagcaaaccaaacgacagaaaaagcagctggtgcagtgcatcctatgctacaaggtgcctcattagaaaatgcctctaaaggggtcgaaattaccgatgttgcacaaggatctccagcggcaatgagcggtctgcaaaaaggcgatttgattgtcggtatcaaccgtactgcggttaaagatcttaaatcgctcaaagagctgctcaaagatcaagaaggtgctgtcgccctgaagattgtccgtggtaagagcatgctttacttagtgcttcgttaa

SEQ ID NO: 7118 - protein, 450 aa, Shewanella oneidensis MR-1
MKTKLSVLSAAMLAATLTMMPAVSQAAIPQSVEGQSIPSLAPMLERTTPAVVSVAVSGTHVSKQRVPDVFRYFFGPNAPQEQVQERPFRGLGSGVIIDADKGYIVTNNHVIDGADDIQVGLHDGREVKAKLIGTDSESDIALLQIEAKNLVAIKTSDSDELRVGDFAVAIGNPFGLGQTVTSGIVSALGRSGLGIEMLENFIQTDAAINSGNSGGALVNLKGELIGINTAIVAPNGGNVGIGFAIPANMVKNLIAQIAEHGEVRRGVLGIAGRDLDSQLAQGFGLDTQHGGFVNEVSAGSAAEKAGIKAGDIIVSVDGRAIKSFQELRAKVATMGAGAKVELGLIRDGDKKTVNVTLGEANQTTEKAAGAVHPMLQGASLENASKGVEITDVAQGSPAAMSGLQKGDLIVGINRTAVKDLKSLKELLKDQEGAVALKIVRGKSMLYLVLR

SEQ ID NO: 7119 - DNA, 1479 bp, Pseudomonas putida KT2440
  CDS (1)..(1479): transl_table=11
gtgcaggggtctttccaaactaccgctcgttgtgacgggagtcgtatgtcaataccacgcttgaaatcctacctaatgatgttcgctgctgtgctgatgctcggccaagtagtcgccgcccaggccgaggaagccctgccggacttcaccaccctggtggagcaggcttcgccggcggtggtcaacatcagtaccaagcagaagctgcctgaccgccggatcgccgcaaaccagatgccggatctggaaggcctgccgccgatgttccgcgagttcttcgagcgcaacatgccccagcagccccgttcgccgcgcggcgaccgccagcgcgaggcgcagtcgctgggctcgggcttcatcatttccagtgatggctacgtgctcaccaataaccatgtggtggccgatgccgacgagatcatcgtccgcctgtcggaccgtagcgagctccaggccaagctggtcggcaccgacccgcgcactgacgtggcgctgctgaaggtcgatggcaagaatttgccaacggtgaaactgggtgactccgagaagctcaaggtgggcgagtgggtactggccatcggttcgccgttcggcttcgaccattcggtgaccaaaggtatcgtcagcgccaagggccggaccctgcccaatgacacctacgtaccgttcatccagaccgacgtggccatcaacccgggtaactccggcggcccgctgttcaacatgaaaggcgaagtggtggggatcaactcgcagatcttcacccgttctggcggtttcatgggcctgtcgttcgccatcccgattgatgtggcgatcgatgtctccaaccagctgaagaaagacggcaaggtcagccgcggctggctgggcgtggtgattcaggaggtcaacaaggacctggctgaatcgttcggcctggacaagccggcgggcgccctggtggcccaggtgctggaaaacggcccggcagccaaaggcggcctgcaggtgggcgacgtgatcctcagcatgaacggccagccaatcgtcatgtcggccgatctgccgcacctggtaggcggcctcaaggatggcgagaaggccaagctggaaatcatccgcaatggcaagcgccagaacctggacatcagcgtcggcgcgctgccggatgacgacgttgacattggcgctggcaccgaaggcagcgccgagcgcagcagcaaccgcctgggtgtatcggtcgccgacctgaccgccgagcagaaaaaatccctggagctcaaaggtggcgtggtcatcaaggaagtgcaggatggcccggcagccatgatcggcttgcgccctggtgatgtcatcagccatctgaacaaccaggccatcggttcggccaaggaattcaccgaaatcgccaaggaactgccgaagaatcgttccgtgtcgatgcgcgtactgcgtcagggccgtgccagcttcatcactttcaagcttgctgaataa

SEQ ID NO: 7120 - protein, 492 aa, Pseudomonas putida KT2440
MQGSFQTTARCDGSRMSIPRLKSYLMMFAAVLMLGQVVAAQAEEALPDFTTLVEQASPAVVNISTKQKLPDRRIAANQMPDLEGLPPMFREFFERNMPQQPRSPRGDRQREAQSLGSGFIISSDGYVLTNNHVVADADEIIVRLSDRSELQAKLVGTDPRTDVALLKVDGKNLPTVKLGDSEKLKVGEWVLAIGSPFGFDHSVTKGIVSAKGRTLPNDTYVPFIQTDVAINPGNSGGPLFNMKGEVVGINSQIFTRSGGFMGLSFAIPIDVAIDVSNQLKKDGKVSRGWLGVVIQEVNKDLAESFGLDKPAGALVAQVLENGPAAKGGLQVGDVILSMNGQPIVMSADLPHLVGGLKDGEKAKLEIIRNGKRQNLDISVGALPDDDVDIGAGTEGSAERSSNRLGVSVADLTAEQKKSLELKGGVVIKEVQDGPAAMIGLRPGDVISHLNNQAIGSAKEFTEIAKELPKNRSVSMRVLRQGRASFITFKLAE

SEQ ID NO: 7121 - DNA, 1425 bp, Escherichia coli CFT073
  CDS (1)..(1425): transl_table=11
atgaaaaaaaccacattagcactgagtgcactggctctgagtttaggtttggcgttatctccgctctctgcaacggcggctgagacttcttcagcaacgacagcccagcagatgccaagccttgcaccgatgctcgaaaaggtgatgccttcagtggtcagcattaacgtagaaggtagcacaaccgttaatacgccgcgtatgccgcgtaatttccagcagttcttcggtgatgattctccgttctgccaggagggttctccgttccagagctctccgttctgccaggggggcctgggcggtaatggcggcggccagcaacagaaattcatggcgctgggttccggcgttatcattgatgccgataaaggctatgtcgtcaccaacaaccacgttgttgataacgcgacggtgattaaagtccaactgagcgatggtcgtaagttcgacgcgaagatggttggcaaagatccgcgctctgatatcgcgctgatccagatccagaacccgaaaaacctgaccgcaattaagatggcggattctgatgcgctgcgcgtgggtgattacaccgtagcaattggtaacccgttcggcctgggcgagacagtaacttccgggattgtctctgcgctgggacgtagcggcctgaacgctgaaaactacgaaaacttcatccagaccgatgcagcgatcaaccggggtaactcaggtggtgcgttggttaacctgaacggcgaactgatcggtatcaacaccgcgatcctcgcaccggacggcggaaacatcggtatcggttttgctatcccgagcaacatggtgaaaaacctgacctcgcagatggtggaatacggccaggtgaaacgtggtgagttgggtattatgggcactgagctgaactccgatctggcgaaagcgatgaaagttgacgcccagcgcggtgctttcgtaagccaggttctgccgaattcttccgccgcgaaagcgggcattaaagcgggtgatgtgatcacctcactgaacggtaagccaatcagcagctttgccgcactgcgtgctcaggtgggcactatgccggtaggtagcaaactgaccctgggcttactgcgcgacgggaagcaggttaacgtgaacctggaacttcagcagagcagccagaatcaggttgattccagcaccatcttcaacggcattgaaggcgctgagatgagcaacaaaggtaaagatcagggcgtggtggtgaacaacgtgaaaacgggcactccggctgcgcagatcggcctgaagaaaggtgatgtgattattggcgcgaaccagcaggcagtgaaaaacatcgctgaactgcgtaaagttctcgacagcaaaccgtctgtgctggcactgaacattcagcgcggcgacagcaccatctacctgttaatgcagtaa

SEQ ID NO: 7122 - protein, 474 aa, Escherichia coli CFT073
MKKTTLALSALALSLGLALSPLSATAAETSSATTAQQMPSLAPMLEKVMPSVVSINVEGSTTVNTPRMPRNFQQFFGDDSPFCQEGSPFQSSPFCQGGLGGNGGGQQQKFMALGSGVIIDADKGYVVTNNHVVDNATVIKVQLSDGRKFDAKMVGKDPRSDIALIQIQNPKNLTAIKMADSDALRVGDYTVAIGNPFGLGETVTSGIVSALGRSGLNAENYENFIQTDAAINRGNSGGALVNLNGELIGINTAILAPDGGNIGIGFAIPSNMVKNLTSQMVEYGQVKRGELGIMGTELNSDLAKAMKVDAQRGAFVSQVLPNSSAAKAGIKAGDVITSLNGKPISSFAALRAQVGTMPVGSKLTLGLLRDGKQVNVNLELQQSSQNQVDSSTIFNGIEGAEMSNKGKDQGVVVNNVKTGTPAAQIGLKKGDVIIGANQQAVKNIAELRKVLDSKPSVLALNIQRGDSTIYLLMQ

SEQ ID NO: 7123 - DNA, 1338 bp, Vibrio vulnificus CMCP6
  CDS (1)..(1338): transl_table=11
ttgtctttgagcttaagctcagcccttgcccctcttccagcaaccgccgcactgccttttagcgtcagtggacaggagttgccgagcttagcgccaatgctcgaacgtgttacccctgcggtcgtcagtatcgcggttgaaggtaaacaggtagaacgctcgcgtattcccgatcaatttcaattcttttttggtcctgatttcccaacagaacaagttcgtgaacgtccattccgtggtttaggttctggtgtcatcattaatgccaataaaggctatatcgtgacgaactaccacgtcatcaaaggcgctgatgagatacgaattcagcttcacgatggtcgtgaatacgatgccgagttaattggtggcgatgagatgtccgatgttgctctgcttaaagtcgatggcgctaaagacttaaccgagattaagctcgccgattccgacaagttacgtgtgggtgatttcagcgtcgccattggtaacccatttggtttgggacagacagtgacgtccggcattgtttcagccttaggtcgtagtggtttgaacattgaaaacttcgaaaactttattcaaaccgacgcggcaattaacagcggcaactccggtggtgcgctcgtcaacctcaatggtgaactgatcggcatcaatacggcgattctcggccccaatggcggcaacgttggtattggcttcgccattccatcgaatatgatgaagaacttaactgaccaaatcttggaatttggtgaagtcaaacgtggcatgttaggcgttcaaggtggcgaaatcacctctgagctggctgaggcgctgggctataactcgagcaaaggtgcatttgtcagccaagtggttcctgactccgccgcagataaagccggcatcaaggcgggcgacatcattgtgtctctcaatggtaagaaaatcgataccttctctgagctaagagccaaaattgcaacactcggggctggcaaagaaatcgagcttggcgtggtgcgtgatggtaaggataagcgctttgatgtcactttgggtgagtcgcaacaaaccaaggccaaagccgataaaatgcacgaaggccttgctggtgctgagttggctaataccacgtcagacgatcgcattgctggcgttaaagtgatcaacgtggcagataactcgccagcggcacaataccagttacaaaaagacgacatcattatcggtgtcaaccgtcagcgagtgaaaaatctcgccgatttccgtgccattgttgaaaaacaaactggtgtgcttgcgctcaatatccaacgtggtgagcgcactatctatttagtcattcgctaa

SEQ ID NO: 7124 - protein, 445 aa, Vibrio vulnificus CMCP6
MSLSLSSALAPLPATAALPFSVSGQELPSLAPMLERVTPAVVSIAVEGKQVERSRIPDQFQFFFGPDFPTEQVRERPFRGLGSGVIINANKGYIVTNYHVIKGADEIRIQLHDGREYDAELIGGDEMSDVALLKVDGAKDLTEIKLADSDKLRVGDFSVAIGNPFGLGQTVTSGIVSALGRSGLNIENFENFIQTDAAINSGNSGGALVNLNGELIGINTAILGPNGGNVGIGFAIPSNMMKNLTDQILEFGEVKRGMLGVQGGEITSELAEALGYNSSKGAFVSQVVPDSAADKAGIKAGDIIVSLNGKKIDTFSELRAKIATLGAGKEIELGVVRDGKDKRFDVTLGESQQTKAKADKMHEGLAGAELANTTSDDRIAGVKVINVADNSPAAQYQLQKDDIIIGVNRQRVKNLADFRAIVEKQTGVLALNIQRGERTIYLVIR

SEQ ID NO: 7125 - DNA, 1368 bp, Vibrio parahaemolyticus RIMD 2210633
  CDS (1)..(1368): transl_table=11
atgaaaaagccattgcttgcgctaaccgttctatctttaagtttgagttccattatcacgccgataacggccacggcagcactgcctctaagtgttgatggccagcaattaccaagcctagccccgatgctagaaaaagtgaccccagcagtcgtgagtattgcggttgagggtaaacaagttcaaaccagtcgtattccggaacaatttcagttcttcttcggccctgacttcccgatggagcaaactcgagagcgtccattccgcggattgggctctggcgtcattattgatgcccaaaaagggcacatcgtcactaactatcatgtgatcaaaggcgcggatgaaattcgagtgcgcctctatgacggccgcgagtacgatgcagaactcgttggcggtgatgagatggcagacgtcgcattgctgaaattagaaaaagcgaaaaatctaactcagattaagattgccgactctgacaagttacgcgtcggcgactttactgttgctatcggcaacccatttggtctcggccaaaccgtcacctcgggtatcgtttctgctctgggtcgtagtggtttaaacgtggagaacttcgaaaacttcatccaaaccgatgccgcaatcaatagtggtaactctggcggtgcactggtaaaccttaacggtgagctgatcggtattaacaccgccattttgggaccaaatggcggcaacgtcgggattggttttgcgatcccatcgaacatgatgagaaacctcactgagcagattttagaatttggtgaagtaaaacgtggcatgttgggcgttcaaggtggtgaagtgacctctgagctggcagaagcactgggttacgagtcaagtaaaggggcattcatcagccaagtcgtgcccgatagcgcagcggacaaagcgggtctaaaagccggtgatgtggttgtatcagttaacggtaagtcaatcgacactttctctgagttgcgcgctaaagtcgccacattaggagcgggtaagaagatcacgctaggcgttattcgtgatggtaagagcaagtcgtttgacgtgactcttggcgagtccaccaacatgaaagccaaagcggaaacgttgcatgaaggcctaaaaggagcagagttaagtaacactacaccgagtgatgccatccaaggggtaaaagtctccagtgttgcagagaattcacctgccgcgcaataccagctaaaacaaggtgacatcattattggcgtcaatcgtcaacgagtgaaaaaccttgcggagcttcgctctattgttgataaacacaaaggtgtgcttgcactaaatattcaacgaggggaacgcactatctacttggtgattcgatag

SEQ ID NO: 7126 - protein, 455 aa, Vibrio parahaemolyticus RIMD 2210633
MKKPLLALTVLSLSLSSIITPITATAALPLSVDGQQLPSLAPMLEKVTPAVVSIAVEGKQVQTSRIPEQFQFFFGPDFPMEQTRERPFRGLGSGVIIDAQKGHIVTNYHVIKGADEIRVRLYDGREYDAELVGGDEMADVALLKLEKAKNLTQIKIADSDKLRVGDFTVAIGNPFGLGQTVTSGIVSALGRSGLNVENFENFIQTDAAINSGNSGGALVNLNGELIGINTAILGPNGGNVGIGFAIPSNMMRNLTEQILEFGEVKRGMLGVQGGEVTSELAEALGYESSKGAFISQVVPDSAADKAGLKAGDVVVSVNGKSIDTFSELRAKVATLGAGKKITLGVIRDGKSKSFDVTLGESTNMKAKAETLHEGLKGAELSNTTPSDAIQGVKVSSVAENSPAAQYQLKQGDIIIGVNRQRVKNLAELRSIVDKHKGVLALNIQRGERTIYLVIR

SEQ ID NO: 7127 - DNA, 1428 bp, Salmonella enterica subsp. enterica serovar Typhi Ty2
  CDS (1)..(1428): transl_table=11
atgaaaaaaaccacattagcaatgagtgcactggctctgagtttaggtttggcattgtcgcctctgtctgccacggcggctgaaacgtcctcttcagcaatgactgcccagcagatgccaagcctggcaccgatgctcgaaaaagtgatgccatcggtggtcagtattaatgtagaaggtagcaccacggtgaatacgccgcgtatgccgcgtaatttccagcaattctttggcgatgactccccgttctgccaggacggttctccgttccagaattctccgttctgccagggcggcggtaacggcggcaacggcggtcaacaacagaaattcatggcgctgggctccggcgtaattattgacgccgcgaagggctacgtcgtcaccaacaaccacgtggttgataacgccagcgtgattaaagtacagcttagcgatgggcgtaaattcgatgctaaagtggtgggcaaagatccgcgttctgatatcgcgctgattcaaattcagaatccgaagaacctgacggcgattaagctggcggactccgacgcgctgcgcgtgggggattataccgtcgctattggtaacccgtttggtctgggcgaaacggtgacgtcaggtatcgtttcggcgctggggcgtagcggcctgaacgtagaaaattacgagaactttattcagaccgacgccgcgattaaccgcggtaactccggcggcgcgctggtgaacctgaacggtgagctgatcggtattaacaccgcgattctggcgccggacggcggcaacatcggtatcggcttcgctatccccagtaacatggtgaaaaacctgacgtcgcagatggtggaatacggccaggtgaaacgcggcgaactggggatcatggggactgagctgagctctgagctggcgaaagcgatgaaagtcgacgcccagcgtggcgcgttcgtcagccaggtgatgccgaattcgtccgcagcgaaagcgggtatcaaagccggggatgtcattacctcgctgaacggtaaaccgatcagcagctttgcggcgctgcgcgctcaggtcggcactatgccggtcggcagcaaaatcagcctcggtctgctgcgtgaaggtaaagcgattacggttaatctggaactgcagcagagcagccagagtcaggttgattccagcaccatcttcagcgggattgagggcgctgaaatgagtaataaaggccaggataaaggcgttgtggtgagcagcgtgaaagcgaactcacccgccgcgcaaattggcctcaaaaaaggcgatgtgattatcggcgctaaccagcagccggtgaaaaatatcgccgagctgcgtaagattctcgacagcaagccgtcggtgctggcgctgaatattcagcgtggtgatagttctatttatttgctgatgcagtaa

SEQ ID NO: 7128 - protein, 475 aa, Salmonella enterica subsp. enterica serovar Typhi Ty2
MKKTTLAMSALALSLGLALSPLSATAAETSSSAMTAQQMPSLAPMLEKVMPSVVSINVEGSTTVNTPRMPRNFQQFFGDDSPFCQDGSPFQNSPFCQGGGNGGNGGQQQKFMALGSGVIIDAAKGYVVTNNHVVDNASVIKVQLSDGRKFDAKVVGKDPRSDIALIQIQNPKNLTAIKLADSDALRVGDYTVAIGNPFGLGETVTSGIVSALGRSGLNVENYENFIQTDAAINRGNSGGALVNLNGELIGINTAILAPDGGNIGIGFAIPSNMVKNLTSQMVEYGQVKRGELGIMGTELSSELAKAMKVDAQRGAFVSQVMPNSSAAKAGIKAGDVITSLNGKPISSFAALRAQVGTMPVGSKISLGLLREGKAITVNLELQQSSQSQVDSSTIFSGIEGAEMSNKGQDKGVVVSSVKANSPAAQIGLKKGDVIIGANQQPVKNIAELRKILDSKPSVLALNIQRGDSSIYLLMQ

SEQ ID NO: 7129 - DNA, 1356 bp, Coxiella burnetii RSA 493
  CDS (1)..(1356): transl_table=11
atgaaaaaattatccaaaattattctcagcagtatttttgcggggctcccattactcctgcccgtcagtagttacgctcacttaccctccgctgtcgaaggaaaaacaatacccagccttgcaccaatgttgaataagaccacaccgagcgtcgtcaacattgccgtggaaaagctgattcctcaaacgccaaaccccttacaacccgaaatggatcaaaacacagcaccaacgaaagtcttaggcgtaggctcgggtgtaatcatagacgccaaaaaaggctatatcgtaacaaatgctcatgtcgtcaaagaccaaaaaatcatggtggtgacgcttaaagatggtcgccgttatcgagcgaaagtcatcggaaaagatgaagggtttgatctggctgtgattcaaattcacgcgaaccatttgaccgcacttcccatcggaaattcagatcaattaaaagtgggtgatttcgtcgtcgccgtgggaagcccttttggcttaactcaaacagtcacttccggcgtcattagcgccttgaatcgccaagaaccgcgtatcgataattttcaaagctttattcaaaccgacgcgccgattaatcccggcaattccggcggggctttaatcgatttagagggcaaattaattggtattaatacagcgattgtcaccccgtccgcgggaaatatcggcatcggctttgccattcccagcgacatggtcaaaagcgtggccgaacaattaattaaatatggaaaagtcgaacgcggcatgctcggcgtaacggctcaaaatattaccccggaattagcggacgccctaaatttaaaacataacaaaggagcgctggtaaccaaagtggttgctgaaagtccagcggctaaagccggggttgaggtgcaggatattattgaatctgtcaacggtattcggattcatagttcagcacaactccacaacatgctcgggctggtgcgtccaggaactaagattgaactaaccgtattgcgcgaccataaggttctgcctataaaaacggaagtagccgatcctaaaaaagtgctattgcaacgcgaactgcccttcctcggcggcatgcgtatgcagaaattcaacgacctagagcccgatggcactattttgcaaggtgttttagttaccggcgtggacgatagcagcgatggagcgctcggcgggttagagcccggcgatatcattatcagtgctaatggccaattaacgcccacggtcgatgagctaatgaaaatcgctgaaggcaagccaaaggagttgttactgaaagtggcgcggggcgcgggacaattatttttagttatccaacaatcacaataa

SEQ ID NO: 7130 - protein, 451 aa, Coxiella burnetii RSA 493
MKKLSKIILSSIFAGLPLLLPVSSYAHLPSAVEGKTIPSLAPMLNKTTPSVVNIAVEKLIPQTPNPLQPEMDQNTAPTKVLGVGSGVIIDAKKGYIVTNAHVVKDQKIMVVTLKDGRRYRAKVIGKDEGFDLAVIQIHANHLTALPIGNSDQLKVGDFVVAVGSPFGLTQTVTSGVISALNRQEPRIDNFQSFIQTDAPINPGNSGGALIDLEGKLIGINTAIVTPSAGNIGIGFAIPSDMVKSVAEQLIKYGKVERGMLGVTAQNITPELADALNLKHNKGALVTKVVAESPAAKAGVEVQDIIESVNGIRIHSSAQLHNMLGLVRPGTKIELTVLRDHKVLPIKTEVADPKKVLLQRELPFLGGMRMQKFNDLEPDGTILQGVLVTGVDDSSDGALGGLEPGDIIISANGQLTPTVDELMKIAEGKPKELLLKVARGAGQLFLVIQQSQ

SEQ ID NO: 7131 - DNA, 1374 bp, Wigglesworthia glossinidia endosymbiont of Glossina brevipalpis
  CDS (1)..(1374): transl_table=11
atgaaaaaaatttttttatttaaaatattaataatattaatattgactttaaactttatttttaacaaagacgcaaaagcatttttttatggagaaaacaaagagcaaataatgccaagtttggctcctatgttaactaaagttcttcctgcagtagtgagcgttcatgttgaaggtagtcagccaatcaaaagatttgttttaccaaaagagtttaaatatttttttgggccagacctaccatttggtagtaatggaataaaaccatttgaaggattagggtctggagtaataatagatgctataaatggatatgtcattacaaacaatcatgttataaatggagctgataaaataaaaattcaattaaatgataatagagaatttgttgcaaaattaattggaaaggatgatcaaacagatttagctttattgcaaattcctatcaacaaaaatctaatagcaattcaaattgctgattcagataatttaaaagtaggagattttgcaattgcaataggtaatccatttggattaggacagactgtaacttctggaatagtatctgccttaggcagaagtggattaaatctagaaggtttagaaaattttatacaaacagatgcttctataaatagaggaaattcaggaggagctttagttaatttaaatggagaattaataggaattaatactgctattttagctcctggaggaggaaacattggaattggatttgccattccaagcaatatagtaaaaaatttatgtcaacaaataatagaacatggaaaagtaaaaagaggacaactaggaataaaaggaacagagcttacatatgatatagctaaagcatttaatatagatgcacaaaggggtgcttttgtaagtgaagttataccaaattctgcagcttccaaagctggaatgaaagctggagatataattttatcagtaaatggaaaatctataaaaagttttgcagaattaagagtaaaagttggaattactgctcctggcaaaacaatttctcttggcatattgagaaatggaaaaccaaaaaatatatctgtaacattggatgataaatctaatatttatacgttagaagatatatcaataccttcattgcagggagtatcattatctaatggatcattaaaagatgggactttaggtgtaaaagtagaagatgtaataaaagattctcctgcttatgttataggtttgaaaaaaaacgatataattataggaattaacagagaaagagtacaaaatttagatcaattaaaaaaagcattaaattctaaaccatcagtaatagctttaaatatagtaagaggagaagcaaaaatttttcttttattaagataa

SEQ ID NO: 7132 - protein, 457 aa, Wigglesworthia glossinidia endosymbiont of Glossina brevipalpis
MKKIFLFKILIILILTLNFIFNKDAKAFFYGENKEQIMPSLAPMLTKVLPAVVSVHVEGSQPIKRFVLPKEFKYFFGPDLPFGSNGIKPFEGLGSGVIIDAINGYVITNNHVINGADKIKIQLNDNREFVAKLIGKDDQTDLALLQIPINKNLIAIQIADSDNLKVGDFAIAIGNPFGLGQTVTSGIVSALGRSGLNLEGLENFIQTDASINRGNSGGALVNLNGELIGINTAILAPGGGNIGIGFAIPSNIVKNLCQQIIEHGKVKRGQLGIKGTELTYDIAKAFNIDAQRGAFVSEVIPNSAASKAGMKAGDIILSVNGKSIKSFAELRVKVGITAPGKTISLGILRNGKPKNISVTLDDKSNIYTLEDISIPSLQGVSLSNGSLKDGTLGVKVEDVIKDSPAYVIGLKKNDIIIGINRERVQNLDQLKKALNSKPSVIALNIVRGEAKIFLLLR

SEQ ID NO: 7133 - DNA, 1419 bp, Haemophilus ducreyi 35000HP
  CDS (1)..(1419): transl_table=11
atgaaaaaatcaattttatcttcattagtcttaggtttaagtgtactttcagtacctgctatgagccaagcggtattaccaacaatattaggcggtcaagcattaccaagtttagcatctatgattgaaaaggttcgcccggcagtagtcagtattgctattgaaggtaaaactaaagttgaaaatgcacaatataaacgtgaacttccggaagaacttcaatttttctttggcccagatatttttggtgagcgttttgctgaacgctttggctttggttttggtgaacaacgtaatgtgccacgtaatttccgaggtcaaggatcaggcgcaattattaatgctgaaaaaggctatgtgattactaataatcacgttattaaagatgcagaaaagatcaccattaaattagaagatgggcgagagtttaaagcgaaattaatcggttcagatgcgttatcggatgttgcgctagtgcaaattgagaatcctaaaaatttaacggaacttaaatttgcggattctgataaattacgtgtaggtgattatagtgttgcaattggtaatccttttggtttagggcaaacggtgacatctggtattatttccgcattaggccgttcgaccggcaattctgatgaaagttatgaaaatttcattcaaacagatgctgcggttaaccaaggtaattcaggtggtccattacttgatctaaatggtgaattaatcggtattaatacggctattatttcaccaagtggtggtaatgcagggatcgcttttgctattccatcaaatatggcaaatagtttagtacaacaaattattgaacatggcgaagtgcaacgtggtatgttgggcattaaaggcggtgagttaaattctgatttagccaaagaatttaaaattgatgctcaacaaggtgcctttgtgagtgaagtgttaactgattctgcggcagcaaaagcgggcttaaaagcaggtgatgtgattatcggcttgaatggtaaacgtattaatggctttggtgaattacgcgcaaaagttgctacttcaggtgtaggcaaagagattgaattgacttacttacgcgatggtaaagaacaaaaagccaaagtaatgttagaagcagacaacagtggtaaaaatggcaaaaataaagatttaattgccggtttaaaaggtgctgagtttgctaatatcaataaaaatggcgtcaaaggtgttgaaatcgtcaaaattcaaaaaggatcaatggcagaataccgtggcttggcagaaggtgacgtgattgttggcgttaaccgagtattgattgaaaacattaaacaattgcgtgaagtgttggataagaaacctgcagttattgcattaaatattatgcgtggtggttctaatttctaccttatcatacaataa

SEQ ID NO: 7134 - protein, 472 aa, Haemophilus ducreyi 35000HP
MKKSILSSLVLGLSVLSVPAMSQAVLPTILGGQALPSLASMIEKVRPAVVSIAIEGKTKVENAQYKRELPEELQFFFGPDIFGERFAERFGFGFGEQRNVPRNFRGQGSGAIINAEKGYVITNNHVIKDAEKITIKLEDGREFKAKLIGSDALSDVALVQIENPKNLTELKFADSDKLRVGDYSVAIGNPFGLGQTVTSGIISALGRSTGNSDESYENFIQTDAAVNQGNSGGPLLDLNGELIGINTAIISPSGGNAGIAFAIPSNMANSLVQQIIEHGEVQRGMLGIKGGELNSDLAKEFKIDAQQGAFVSEVLTDSAAAKAGLKAGDVIIGLNGKRINGFGELRAKVATSGVGKEIELTYLRDGKEQKAKVMLEADNSGKNGKNKDLIAGLKGAEFANINKNGVKGVEIVKIQKGSMAEYRGLAEGDVIVGVNRVLIENIKQLREVLDKKPAVIALNIMRGGSNFYLIIQ

SEQ ID NO: 7135 - DNA, 1386 bp, Candidatus Blochmannia floridanus
  CDS (1)..(1386): transl_table=11
atgaaaatagtaaatccaattattacaatcagcataatatttgcattaatatgcataaataacctacaaacttctaataattattatactgcattaggatcagaaactccatatttatcaatgcctaccagtttagcgccaatgctagataacgttctaccaacagtagtgagtatacacgtagagggaacacaaccttccaaaagacttactttacctaaagaatttagatatttttttggaccagaccttcccaatggaaattttggcaatagaccatttgaaggtttaggatctggagttattatcaattccaataaaggatatattattaccaataatcatgttgttcatggggcagataaaatcaccatacaactaaatgatggtcgcgaatataatgctaaaattattggtcatgatgaacaaactgatttagctttacttcaaatattaaaatttaaaaatctttctgaaattaaaattgcagattccgataccttaaaagttggagattttgccgtcgctataggtaatccatttggattgggccaaactgcaacatcaggtatcatttcagctttaggaaggagcggattaaatcttgaaggattagaaaattttatacaaactgacgcatcaataaatcgaggtaattcagggggagcattagtcaatttaaatggagaactaatcggaataaatactgccattttagctccaggaggaggtaatattggaattgggtttgccattcctagcaatatcgttaaaaatctaagtcaacaattaatcgattttggtgaagtaaaaagaggacaattaggtataaaaggtacagaattaactgctgatattgccaaagcatttaacattgatatacaacgaggtgcatttgtcagtgaagttttaccaggatctgcagctgcaaaagctcgaattaaagctggagatgttattatatctgtagaaggaaaaccaataaaaaactttgctgaattacgagtaaaagttggcaccactgccccaggtaaaatcatcaagataggtttattaagagatggaaaaacacatatagtttccgttctactagatgatagcacttgtgttagtaccagcgaagaaaatttaatcccggcactacaaggtgcaacattaagtaacaattatctaaaagatggcacaccaggagtacaagtagaagaaataaacaaagattctcctgctgcttctataggattacaaaaaggagatatgatcataggtttaaaccgtaccagaataagtaacctatcgcaactacgaaaaatactcaaagaaaatccaacagttatggctctcaatattatacgaggaggtactaatatttttatattgctacgttaa

SEQ ID NO: 7136 - protein, 461 aa, Candidatus Blochmannia floridanus
MKIVNPIITISIIFALICINNLQTSNNYYTALGSETPYLSMPTSLAPMLDNVLPTVVSIHVEGTQPSKRLTLPKEFRYFFGPDLPNGNFGNRPFEGLGSGVIINSNKGYIITNNHVVHGADKITIQLNDGREYNAKIIGHDEQTDLALLQILKFKNLSEIKIADSDTLKVGDFAVAIGNPFGLGQTATSGIISALGRSGLNLEGLENFIQTDASINRGNSGGALVNLNGELIGINTAILAPGGGNIGIGFAIPSNIVKNLSQQLIDFGEVKRGQLGIKGTELTADIAKAFNIDIQRGAFVSEVLPGSAAAKARIKAGDVIISVEGKPIKNFAELRVKVGTTAPGKIIKIGLLRDGKTHIVSVLLDDSTCVSTSEENLIPALQGATLSNNYLKDGTPGVQVEEINKDSPAASIGLQKGDMIIGLNRTRISNLSQLRKILKENPTVMALNIIRGGTNIFILLR

SEQ ID NO: 7137 - DNA, 1467 bp, Chromobacterium violaceum ATCC 12472
  CDS (1)..(1467): transl_table=11
atggccggcgccctgctcgcggcgtcgttactgtccggctgcgacaggatcgagcagtttgtcaaaggcagcaaccagccagcccccgtcgccattcctgcccagcaggacggccgcgtagccatgctgctgcccgacttcactcagctggtcagccgggacggcccggccgtggtcaatatccaggccacccgcgaaggcggcggagccgcgccgcagcaaagcggcaacatgcccttcccggtgccggaagacgacccgctgtacgacttcttccgccgcttcatgcccaaccagccgccgcaacaggagcagggcccggaggaaagcgtgtcctacggttccggcttcatcatcagcagcgacggcttcatcctgaccaacgcccacgtggtggccgacggcggccagatccgcgtcacgctgaccgacaagcgcgaactgcgcgccaagctggtgggcctggacaagcgcagcgacgtggccttgctcaaggtggccgcggccgacctgccggtggccaagatcggcaatccggccgacctgaaggtcggcgaatgggtggccgccatcggcgcgccgttcggcttcgacaacaccgtcaccgccggcatcgtatcggccaagggccgcagcctgcccgacgagaccctggtgcccttcatccagaccgacgtggcgatcaacccaggcaactccggcggcccgctgttcaacctgcgcggcgaggtggtcggcatcaactcgcagatctacagccgttcaggcggcttcatgggcatctccttcgccatcccgatcgacctggcgatgcaagtggccgaccagctgaagaccaagggcaaggtcagccgcggccagctgggcgtcaacatccaggaagtgacccaggagctggcgcaatcgttcggcctgcagcggccctccggcgcgctggtggtgcgcgtcgaccccaagggccccgccgccagggcgggcctgcaggctggcgacatcatcctgaagctcaacaaccagtccatcgacagctccaaggatctgccgatgctggtgggctcgctgggccccggcaccaagatcaagctggtggtgtggcgcaagggtttcgagaagacgatggaagccacactggtggaacaggcacaggaacccggcagcaacacgaaaccggccagcgacaactcgccgcaaggctaccagttcggcaagctgggcctgacgctgtccgagctgacggcggagcagcgcggcgacctcggcatccgcggcggcctgctgatccagaagtcgcaaggcccggccgcgcgctccggcctgatgccgggcgacatcatcctgggactgaaccagaacgacatcaccagcatcagcgccttcgagaaagcgctggccagcgccggcggccacgccgcgctgctggtgcgccgcggcgaggcggtgctctacatcgcgctgcgcaccgactga

SEQ ID NO: 7138 - protein, 488 aa, Chromobacterium violaceum ATCC 12472
MAGALLAASLLSGCDRIEQFVKGSNQPAPVAIPAQQDGRVAMLLPDFTQLVSRDGPAVVNIQATREGGGAAPQQSGNMPFPVPEDDPLYDFFRRFMPNQPPQQEQGPEESVSYGSGFIISSDGFILTNAHVVADGGQIRVTLTDKRELRAKLVGLDKRSDVALLKVAAADLPVAKIGNPADLKVGEWVAAIGAPFGFDNTVTAGIVSAKGRSLPDETLVPFIQTDVAINPGNSGGPLFNLRGEVVGINSQIYSRSGGFMGISFAIPIDLAMQVADQLKTKGKVSRGQLGVNIQEVTQELAQSFGLQRPSGALVVRVDPKGPAARAGLQAGDIILKLNNQSIDSSKDLPMLVGSLGPGTKIKLVVWRKGFEKTMEATLVEQAQEPGSNTKPASDNSPQGYQFGKLGLTLSELTAEQRGDLGIRGGLLIQKSQGPAARSGLMPGDIILGLNQNDITSISAFEKALASAGGHAALLVRRGEAVLYIALRTD

SEQ ID NO: 7139 - DNA, 1425 bp, Wolinella succinogenes DSM 1740
  CDS (1)..(1425): transl_table=11
atgaatctcagactcttctgtttaggctccctcttcatgacctatgctctagcctttagcgtgagcgaagcccctgcaatcgagcggcgtgtagctcccgatgtatcgagcggcgtggtctactcctactatgattccatcaaagacgctaaacgcggtgttgtgaatatctccactcaaaaaaaagtcaaaggcgcctcaggaatcgacccctcacaccccctcttcaatgaccccttcttcaaacagttttttggtgatatgtttgggcaggtcatccccaaagatcgaatcgaacgctccttgggtagtggggtcatcatctccaaggatggctacatcctcaccaacaaccatgtgatcgatggggcggataaagtgatcgtctccctgcctgataacagtaaagagtatgaggccaaagtgattggcaaagacccaaggagcgatctagcggtcattaaaatcgaaggcaaagatttcccctttgtcatttttggctctagcaatgatttgcgcgtgggcgatgtggtatttgcgattggaaatccctttggcgtgggcgaaacggtgacacagggaatcgtttcagccctcaataagagcggaattggaatcaacgactatgaaaacttcatccaaaccgatgcctccatcaaccccggaaactctggaggggcactggtggatagccgaggggcactggtgggaatcaacacggccatcctttctcgcacgggagggaatcatggcgtaggctttgctatcccctcggacatggccaaaaaaatcgccatcaccctcattgacaaaggagtgattgagcgaggctatatgggagtctctatccaagatgtcacccaagatttgcgcgatctctatggggacaaagagggggcagtcatcatctccaccgaatcaagctctccagccgccaaagcgggtctaaaggtgtgggatttaatcactaaaatcgatgaaaagcccgtgaaaaatgccgccgatttaaaaaatatcatcggatcttactctcccaatgataaggtcaaggtgacctacatccgggacaaaaaagaatccaccgccactctcaagctcatcgaagccccaagcaatgccaaaacaagtggtgctggggtgagcaacagtgcgattgatgggctgatgctaagcgcgattgatgatcgtatacgacagcgctatagacttgccattgatacgagtggcgtgctagtcattggcgtgcaggcaggaagttatgccgaggagatcggctttagcgagggagatatcatccttcagattgagaactatcccatcaaagacattgcctctttcaacgaagcgatgaaacaacacaaaggtaaagccaagcgactccttgtgagccgtggcggaaccatcttcagcgtggttgtaaaataa

SEQ ID NO: 7140 - protein, 474 aa, Wolinella succinogenes DSM 1740
MNLRLFCLGSLFMTYALAFSVSEAPAIERRVAPDVSSGVVYSYYDSIKDAKRGVVNISTQKKVKGASGIDPSHPLFNDPFFKQFFGDMFGQVIPKDRIERSLGSGVIISKDGYILTNNHVIDGADKVIVSLPDNSKEYEAKVIGKDPRSDLAVIKIEGKDFPFVIFGSSNDLRVGDVVFAIGNPFGVGETVTQGIVSALNKSGIGINDYENFIQTDASINPGNSGGALVDSRGALVGINTAILSRTGGNHGVGFAIPSDMAKKIAITLIDKGVIERGYMGVSIQDVTQDLRDLYGDKEGAVIISTESSSPAAKAGLKVWDLITKIDEKPVKNAADLKNIIGSYSPNDKVKVTYIRDKKESTATLKLIEAPSNAKTSGAGVSNSAIDGLMLSAIDDRIRQRYRLAIDTSGVLVIGVQAGSYAEEIGFSEGDIILQIENYPIKDIASFNEAMKQHKGKAKRLLVSRGGTIFSVVVK

SEQ ID NO: 7141 - DNA, 1377 bp, Photorhabdus luminescens subsp. laumondii TTO1
  CDS (1)..(1377): transl_table=11
atgaaaagaaaacacttattccttagtgcattagcaatcagtatcgggttgtctgcaatttctgtccctacgattagcaatgctgctttacctgctgctatcgccggtcagacattaccaagcctcgcaccgatgcttgaaaaagtcctgccagccgttgtcagcgtgcatgtctctggtacgcaagtacaacaggaacagagtatacctgaagaattcagattcttctttggcccaaatctacccatgggccgtgaaagtacccgcccattccaagggcttggttcaggtgtcatcattgacgctgccaaaggttatatattaaccaacaatcacgttattgagaatgcagataaaatccgtgtgcaattgaatgatggacgtgaatatgaagccaaattattaggccgcgatcctcagacagatattgccttgctgcaactgaaagatgctaagaatttaactgcaattactatggccgattccgataagctccgagttggtgattttgctgttgcggttggtaatccattcggccttggtcaaactgcaacctccggcattatctctgcgttaggacgtagcggtctgaatctggaaggattagaaaattttatccaaacggatgcctctattaaccgtggcaactccggtggtgcactggtcaatttgaatggtgaattaatcggtatcaataccgctattctagccccgggtggtggtaacatcggtatcggctttgctatcccaagtaatatggcaaaaaccctgagcgagcagcttatcgcgcatggtgaagtaaaacgcggtatcctcggtattaaaggtactgaaatgaattccgatatcgctaaggcattcaatattgacgcccaacgcggagcatttgtcagtgaagtcttaccaaaatccgccgcagcgaaagcaggtattaaatccggcgatattcttatttccgttgatggtaagaagattagtagctttgctgaactgaaagccaaaatcggcacaacgataccaggtaaagaaattaaaattggcttattacgcaaaggtaagccaatggaggtttctgttacgctagaaaacagtgaaggtcaaacaaccaaagccggaaatctaacccttgccctgcaaggtgcaaccctaagcaatggtgaagtgaaagggacttacggtgtgaaaatcgatagtgttgctcaaaactcaccggcggcgttatctggcttacagaaaaatgacctgattgttgggatcaataatgaacggatacagaatattaatgaactgcgcaaagttattgattctaaaccgccagttatagcgctgaacattcttcgcggagaagagagtatttatctgttgctaagaaattaa

SEQ ID NO: 7142 - protein, 458 aa, Photorhabdus luminescens subsp. laumondii TTO1
MKRKHLFLSALAISIGLSAISVPTISNAALPAAIAGQTLPSLAPMLEKVLPAVVSVHVSGTQVQQEQSIPEEFRFFFGPNLPMGRESTRPFQGLGSGVIIDAAKGYILTNNHVIENADKIRVQLNDGREYEAKLLGRDPQTDIALLQLKDAKNLTAITMADSDKLRVGDFAVAVGNPFGLGQTATSGIISALGRSGLNLEGLENFIQTDASINRGNSGGALVNLNGELIGINTAILAPGGGNIGIGFAIPSNMAKTLSEQLIAHGEVKRGILGIKGTEMNSDIAKAFNIDAQRGAFVSEVLPKSAAAKAGIKSGDILISVDGKKISSFAELKAKIGTTIPGKEIKIGLLRKGKPMEVSVTLENSEGQTTKAGNLTLALQGATLSNGEVKGTYGVKIDSVAQNSPAALSGLQKNDLIVGINNERIQNINELRKVIDSKPPVIALNILRGEESIYLLLRN

SEQ ID NO: 7143 - DNA, 1368 bp, Vibrio vulnificus YJ016
  CDS (1)..(1368): transl_table=11
atgaaaaaacctttgcttgttttgactgcattgtctttgagcttaagctcagcccttgcccctcttccagcaaccgccgcactgccttttagcgtcagtggacaggagttgccgagcttagcgccaatgctcgaacgtgttactccagcggtcgtcagtatcgcggttgaaggtaaacaggtagaacgctcgcgtattcccgatcaatttcagttcttttttggccctgatttcccaacagaacaagttcgtgaacgtccattccgtggtttaggttctggtgtcatcattaatgccaataaaggctatatcgtgacgaactaccacgtcatcaaaggggcagatgagatacgaattcagcttcacgatggtcgtgaatacgatgccgagttaattggtggcgatgagatgtccgatgtcgctctgctcaaagtcgatggcgctaaagacttaaccgagattaagctcgccgattccgacaagttacgtgtgggtgatttcagcgtcgccattggtaacccatttggtttaggacagacagtgacgtccggcattgtttcagccttaggtcgcagtggtttgaacattgaaaacttcgaaaactttattcaaaccgacgcggcaattaacagcggcaactccggtggtgcactcgtcaacctcaatggtgagctcatcggcatcaatacggcgattctcggccctaatggcggcaacgtcggtattggcttcgccattccatcgaatatgatgaagaacttaactgaccaaatcttggaatttggtgaagtaaaacgtggcatgttaggcgttcaaggtggcgaaatcacctctgaactggctgaagcgctgggctataactcgagcaaaggcgcatttgtcagccaagtggttcctgactcagcagcagataaagccggcatcaaggcgggcgacatcattgtgtctctcaatggaaagaaaatcgataccttctctgagctaagagccaaaattgcaacactcggggctggcaaagaaatcgagcttggcgtggtgcgtgatggtaaggataagcgctttgatgtcactttgggtgaatcacagcagaccaaagcgaaagccgataagatgcacgaaggccttgccggtgctgagttggcgaatactacgtcagacgatcgcattgctggggttaaagtgatcaacgtggcagataactcgccagcggcacaataccagttacaaaaagacgacatcattatcggcgttaaccgtcagcgagtgaagaatctcgccgatttccgtgccattgttgaaaaacaaactggtgtgcttgcgctcaatatccaacgtggtgagcgcactatctacttagtcattcgctaa

SEQ ID NO: 7144 - protein, 455 aa, Vibrio vulnificus YJ016
MKKPLLVLTALSLSLSSALAPLPATAALPFSVSGQELPSLAPMLERVTPAVVSIAVEGKQVERSRIPDQFQFFFGPDFPTEQVRERPFRGLGSGVIINANKGYIVTNYHVIKGADEIRIQLHDGREYDAELIGGDEMSDVALLKVDGAKDLTEIKLADSDKLRVGDFSVAIGNPFGLGQTVTSGIVSALGRSGLNIENFENFIQTDAAINSGNSGGALVNLNGELIGINTAILGPNGGNVGIGFAIPSNMMKNLTDQILEFGEVKRGMLGVQGGEITSELAEALGYNSSKGAFVSQVVPDSAADKAGIKAGDIIVSLNGKKIDTFSELRAKIATLGAGKEIELGVVRDGKDKRFDVTLGESQQTKAKADKMHEGLAGAELANTTSDDRIAGVKVINVADNSPAAQYQLQKDDIIIGVNRQRVKNLADFRAIVEKQTGVLALNIQRGERTIYLVIR

SEQ ID NO: 7145 - DNA, 1392 bp, Rhodopseudomonas palustris CGA009
  CDS (1)..(1392): transl_table=11
atgaacccgatccgcacgttcgccgtcctctgtgtgtcactcgccctcaccacgccgctcgcggcgcaggaccggcgggtgccgtcgtcgccggcggagctgaagctgtcttacgcgccgatcgtgcagcatgtgcagccggcggtcgtgaacgtctatgccgccaaggtggtgcagaaccgaaatccgctgctggaagatccgatcttccgccggttcttcggcgtgcccggccagccggagcagatccagcgctcgctcggctcgggcgtgatggtcgatgcctcgggcctcgtcgtcaccaacaatcacgtcatcgagggcgccgatcaggtcaaggttgcgctcgccgacaagcgcgagttcgaagccgagatcgtgctgaaggacagccgcaccgatctggcggtgctgcggctcaaggacaccagcgagaaattccccacgctcgacttcgccaactccgacgacctgctggtcggcgacgtggtgctggcgatcggcaatccgttcggcgtcggccagaccgtcactcacggcatcgtctcggcgctggcgcgcactcaggtcggcatcaccgactatcagttcttcattcagaccgacgcggcgatcaacccgggcaattccggcggcgcgctggtcgacgtctcgggcaagctggttggtatcaacaccgcgatcttctcgcgctcgggcggctcgcaggggatcggcttcgcgatccccgccaacatggtgcgcgtcgtggtcgcctcggccaagagcggcggcaaggccgtgaagcggccgtggctcggcgcgcggctgcaggcggtgagcccggagattgccgagaccctcgggctgaagcggccgggcggtgcgctggtcgccagcgtcaccaagggcagcccggcggagcgggcagggctgaagctgtccgacctgatcgtgtcgatcgacggctttgcgatcgatgatcccaacgcgttcgattatcggtttgcgacccgtccgctcggcggtgccgcgcagctcgaagtgcagcgcagcggcaaggcggtgaagctgtcgatcccgctcgaaaccgcgccggactccggccgcgacgagctggtgatcacctcgcgctcgccgttccagggcgccaagatcgccaacatctcgccggcgatcgccgacgaaatgcggctcgatccgagcgtcgaaggcgtcgtggtcactgatcttcccgacgacagcaccgccgcgaatgtcggcttccagaagggtgacatcatcgtcgcggtcaacaacacccggatcggcaagacaagcgacctcgaacgcgtcgccggccagacggcgcggctgtggcgcatcatgctggtccgcggcggccagcagatccaagtcacgctcggcggatga

SEQ ID NO: 7146 - protein, 463 aa, Rhodopseudomonas palustris CGA009
MNPIRTFAVLCVSLALTTPLAAQDRRVPSSPAELKLSYAPIVQHVQPAVVNVYAAKVVQNRNPLLEDPIFRRFFGVPGQPEQIQRSLGSGVMVDASGLVVTNNHVIEGADQVKVALADKREFEAEIVLKDSRTDLAVLRLKDTSEKFPTLDFANSDDLLVGDVVLAIGNPFGVGQTVTHGIVSALARTQVGITDYQFFIQTDAAINPGNSGGALVDVSGKLVGINTAIFSRSGGSQGIGFAIPANMVRVVVASAKSGGKAVKRPWLGARLQAVSPEIAETLGLKRPGGALVASVTKGSPAERAGLKLSDLIVSIDGFAIDDPNAFDYRFATRPLGGAAQLEVQRSGKAVKLSIPLETAPDSGRDELVITSRSPFQGAKIANISPAIADEMRLDPSVEGVVVTDLPDDSTAANVGFQKGDIIVAVNNTRIGKTSDLERVAGQTARLWRIMLVRGGQQIQVTLGG

SEQ ID NO: 7147 - DNA, 1395 bp, Bradyrhizobium sp. ORS278
  CDS (1)..(1395): transl_table=11
atgacgctgattcgctcctccatggtcctgctgcttgcgctgctggccgccactccgctcgcggcgcaggagcggcgggtgccgcaatcccaggccgagctgcggctgtcctatgcgccgatcgtgcagcgcgtgcagccggcggtcgtcaacgtctatgccgccaaggtggtgcagaaccgcaatccgttcctcgatgatccgatcttccgccgcttcttcggtctgcagggcggtccgcaggagcaaatgcagcgctcgctcggctcgggcgtgatgatcgattcctccggtctggttgtcaccaatgtgcacgtcatcgagggcgccgacgaggtgaaggtgtcgctcgccgacaagcgcgagtacgaggccgagatcgtgctcaaggacagccgcaccgaccttgcggtgctcaggctgaagggcaccaaggagcagtttccgaccctcgacctcgccaattccgacgatctgcaagtcggcgacgtcgtgctcgcgatcggcaatccgttcggcgtcggccagaccgtgacccacggcatcgtttcggcgctggcgcgcacccaggtcggcatcaccgactatcagttcttcatccagaccgatgcggccatcaatcccggcaactcgggcggcgcgctggtcgacatgaccgggaagctcgccggcatcaacaccgcgatctattcgaagtcaggcggctcacagggcatcggcttcgcgatcccggcgaacatggtgcgcgtcgtggtcgcctcggccaagagcggcggcaaggcggtcaagcgtccctggctgggcgcgcgcttgcaggcggtgacgcctgacatcgccgagagcctcggcctgcgctcgccgaccggcgcgctggtcgcgagcgtcacgccgaacagcccggcggcgcgtgccggcatcaaatcgtccgacctgatcgtgtcgatcgacgggcagaccgtcgatgatcccaacgccttcgactatcgcttcgcgacccgcccgctcggtggcagcgcacagatcgaggtgcagcgcggcggcaagccggtgaaggtcgcggtcgcgctggagaccgcgccagacaccgggcgcaacgagatcgtcatcagcggccgctcgccgttccagggagccaaggtcgccaacatctcgccggcggtggccgacgagctgcatctcgacgccgacaccgagggcgtcgtcgtgctcgagcccggcgacggcacaacggccgccaatgtcggcttccagaagggcgacgtgatcatggccgtcaacaaccagaagatcgccaagaccaccgatctcgacaaggcctcgcgcgagtccgctcgcctctggcgtattaccgtgctgcgcggcggccagcagatcaacgtcacgctcggcggatga

SEQ ID NO: 7148 - protein, 464 aa, Bradyrhizobium sp. ORS278
MTLIRSSMVLLLALLAATPLAAQERRVPQSQAELRLSYAPIVQRVQPAVVNVYAAKVVQNRNPFLDDPIFRRFFGLQGGPQEQMQRSLGSGVMIDSSGLVVTNVHVIEGADEVKVSLADKREYEAEIVLKDSRTDLAVLRLKGTKEQFPTLDLANSDDLQVGDVVLAIGNPFGVGQTVTHGIVSALARTQVGITDYQFFIQTDAAINPGNSGGALVDMTGKLAGINTAIYSKSGGSQGIGFAIPANMVRVVVASAKSGGKAVKRPWLGARLQAVTPDIAESLGLRSPTGALVASVTPNSPAARAGIKSSDLIVSIDGQTVDDPNAFDYRFATRPLGGSAQIEVQRGGKPVKVAVALETAPDTGRNEIVISGRSPFQGAKVANISPAVADELHLDADTEGVVVLEPGDGTTAANVGFQKGDVIMAVNNQKIAKTTDLDKASRESARLWRITVLRGGQQINVTLGG

SEQ ID NO: 7149 - DNA, 1455 bp, Candidatus Protochlamydia amoebophila UWE25
  CDS (1)..(1455): transl_table=11
atgaaacaactatcaatatttaccaaattgtgtttacttgccacaggagctgccttaataggctcttcttttacgaacccaaatttaatagaggcggcaactcaggaacagaatcgaactgaagatatcaaacgtttgcccggaaaggagaccgtcgttgattttagaggcgtcgcaaagaaagcgattcctgccgtcgtctctattaaggttaaaggacaaaaaaaaggacctttgtttggggatgaaaattctttagaagattattttggagaaaatggggatttttggaacttttttggattgccaaagagagattctcgtcaacaattgttatcgggtcaagcaacgggtgtgattgtgagtccagaagggtatattttaacaaatagccatgtcgttcatgacatgacaacaattgctgtgcagcttcatgatggaagagaacttgcagcgaaactgttaggagaagatcctagtagtgatttagcgctcattaaaattgacgcaaaagatcttccatatttgacacttggtaattcagacgatttagaagttggacaatgggttgccgcagttggaaatccttttggcttgcaagcgaccttaactgttggtgtcgtgagtgcaaaaagtcgcaataatttagatattgctcgctatgaagactttattcaaacggatgcttctatcaatcgaggaaattcaggcggtcctttgctcacattaaatggagaaattgtagggattaatacagcaattgcgactaatgcatcagcaggttacatcggaattggttttgcaatcccaagtaatatggctaaacatgtgatggatgaaattttatctcaaggaaaagtctctagaggatttttgggcgtttctttacagtcaattgattataatctggctcaatcttttggtttagataaagtagaaggagcattagtcacaaatattgttaaaaattctcctgctgaaaaagctggaattcaggtagaggatattattttaaaactaaatggtcgttcgattgagagcgcggctagtttacgtaacgcgatttatcggatgaaacctggtacaaaagtgaatttgacaattttgagaaaagaaaaacagattgacctttctcttactattggtgattttactgaagaaactgtcgcagcagcatcttctcacaaaagtcagctcggaattgaagtcgcaaatatcccttccgaaatgaaatcagatgaacaaggggtgatgattacaaaggtgtatccaggctcagttgctaactttgctgggttaaaaaaaggagccattattcttggcattaatcatcaaaaaatcgaaaatgtagagcaatttaataacgctttaaaaaatagttctgcagataagccaattcttttgcaagtaaaacaaggaaatgcttatctattcgtttcgcttcgctctgaatag

SEQ ID NO: 7150 - protein, 484 aa, Candidatus Protochlamydia amoebophila UWE25
MKQLSIFTKLCLLATGAALIGSSFTNPNLIEAATQEQNRTEDIKRLPGKETVVDFRGVAKKAIPAVVSIKVKGQKKGPLFGDENSLEDYFGENGDFWNFFGLPKRDSRQQLLSGQATGVIVSPEGYILTNSHVVHDMTTIAVQLHDGRELAAKLLGEDPSSDLALIKIDAKDLPYLTLGNSDDLEVGQWVAAVGNPFGLQATLTVGVVSAKSRNNLDIARYEDFIQTDASINRGNSGGPLLTLNGEIVGINTAIATNASAGYIGIGFAIPSNMAKHVMDEILSQGKVSRGFLGVSLQSIDYNLAQSFGLDKVEGALVTNIVKNSPAEKAGIQVEDIILKLNGRSIESAASLRNAIYRMKPGTKVNLTILRKEKQIDLSLTIGDFTEETVAAASSHKSQLGIEVANIPSEMKSDEQGVMITKVYPGSVANFAGLKKGAIILGINHQKIENVEQFNNALKNSSADKPILLQVKQGNAYLFVSLRSE

SEQ ID NO: 7151 - DNA, 1371 bp, Erwinia carotovora subsp. atroseptica SCRI1043
  CDS (1)..(1371): transl_table=11
atgaaaaaaacgtcattattatttagtgcactggcaatgagtataggtttgaccctgtccacgcttcccgcagcgaatgctgcgctaccttccgtggttcaagggcaacaaacgccaagcctggccccaatgctggaaaaagtcttaccagctgtcgtcagcgtgcatgttgaaggtacacaggtacagcgccagcgcgtaccggaagagttcaagttcttctttgggccaaatttcccgacggacaaacaaaattctcgtccgtttgaagggctgggttccggcgtgattattgatgcagcaaaagggtatgtgctcaccaacaatcacgttatcaataatgccgacaaaattcgcgtccagcttaatgacgggcgtgaatatgatgcgaaactgattggtcgcgacgagcagaccgatattgccctgctacagctgaatgacgccaaaaacctagtatccgtaaaaatggcggattccgatcagttgcgcgtcggtgattttgccgttgccgtgggtaacccattcggcctcggccagaccgcgacatccggcattatctctgcactgggacgtagcggcctgaaccttgaagggctggaaaacttcatccagaccgatgcttctatcaaccgcggtaactccggcggtgcgctggttaacctcaacggcgaactgatcggtatcaacaccgcgattctggctccgggcggaggaaacatcggtatcggtttcgccatccccagcaacatggctcagaatctggcgcagcagttggttgaatttggtgaagttaaacgcgggctgctgggtattaaaggcagcgagatgacgtctgagatggcgaaagccttcaacgtcgatgcacagcgcggcgctttcgtcagcgaagtcttaccgaaatctgccgcgtccaaagcgggtatcaaggctggcgacgtgttgactactctggatggtaaaccgatcagcagctttgcagaactgagagccaaagtcggcaccaccgcgccgggcaagaccgtgaaaatcggcctgctgcgtgatggtaaaccacaggaggtttcggtggtgttggataacagcacatcggcatcgaccagcgccgaaacgctttcaccgtcattgcagggtgcatcgctgatcaatggtcaattgaaagatggcagcaaaggcgtgcagattgataacgtcgctaaggacacgcctgctgcgcaggttggtctgcaaaaaggcgatatcatcattggcgtaaaccgcgagcgcattgaaaacatcacgcaactgcgcaagctgctggaagcgaagccttccgttctggcactgaacatcgtccgtggcgaagaaacgatctatctgctgctacgttaa

SEQ ID NO: 7152 - protein, 456 aa, Erwinia carotovora subsp. atroseptica SCRI1043
MKKTSLLFSALAMSIGLTLSTLPAANAALPSVVQGQQTPSLAPMLEKVLPAVVSVHVEGTQVQRQRVPEEFKFFFGPNFPTDKQNSRPFEGLGSGVIIDAAKGYVLTNNHVINNADKIRVQLNDGREYDAKLIGRDEQTDIALLQLNDAKNLVSVKMADSDQLRVGDFAVAVGNPFGLGQTATSGIISALGRSGLNLEGLENFIQTDASINRGNSGGALVNLNGELIGINTAILAPGGGNIGIGFAIPSNMAQNLAQQLVEFGEVKRGLLGIKGSEMTSEMAKAFNVDAQRGAFVSEVLPKSAASKAGIKAGDVLTTLDGKPISSFAELRAKVGTTAPGKTVKIGLLRDGKPQEVSVVLDNSTSASTSAETLSPSLQGASLINGQLKDGSKGVQIDNVAKDTPAAQVGLQKGDIIIGVNRERIENITQLRKLLEAKPSVLALNIVRGEETIYLLLR

SEQ ID NO: 7153 - DNA, 1467 bp, Erwinia carotovora subsp. atroseptica SCRI1043
  CDS (1)..(1467): transl_table=11
atgaaaagaaaatcactggttctgagtgcgctggcgttaagtctggcgatggcgatgggctccactacggcaaatgcggctgagtcagcggcatctgctgcgtcatcaggtcaattacctagtctggcccctatgctggaaaatgttatgccttccgtggtgagcatctatgtggaagggcataccaccaatgcgggtaaagaaagcaatgcaggcaaagaaggtataccgccgcagcttcagccgttttttggtgaaaactcgccgttctgccaagagggatcgccgttccagtcgtcgccgatgtgtcagggcgatagtgacgacgatgacagcggccaaccgcaaccaaaacaggaaaacttccaggcgctgggcgcgggcgtagtgattaatgcggaaaaaggctacgtggtgaccaatagtcacgtggtggataacgccgataaaattcagattcgactcagtgatggccgcaagtatgacggtaaagtgctaggcaaagacccgcgttcagatatcgcgctggtgcagttgaaggactttaaaaatctgacggccattaaggttgcggattccgaccaactgcgggtcggtgattacaccgtagcgattggtaacccatatggcctgggggaaaccgcgacatcgggcattgtgtccgcgctgggacgcagcggcttgaatattgaaaactacgagaactttattcagaccgatgcggcgattaatcggggtaattccggcggggcgctggtgaacctgaatggggaattgattgggctgaataccgcgattcttgcgccagacggcggcaatatcgggatcggtttcgctatccccagcaatatggtgaaaagtgtcgtcgcacagattatcgaatttggcgaagtgaagcgtggcgaactgggcatcacgggtacggagttgaattccgaactggcgcaggcgatgaaggttgatgcacagcgcggcgcgtttgtgagtcaggtgcggccgaaatcggcggcagatgcggcgggtatcaaagcgggcgatgtgatcgtcacgctgaatggcaaagcggttagcagtttctccgcgctgcgtgcgcaggtcggttcgctgccggtgggcagcaaagtcgcactggggctgctgcgtgatggcaaaccgctgacggttgatgtgacgctgcaacagagcaatcaggctcaggtggcttccggtaatctctactccggcattgaaggtgctgaactgagtaatactcagattgacgataaaaaaggcgttaaggtggataacgttaaacccggttccgcggcggctaaagtggggctgaagaaggacgacattattctcggcgttaaccaacaggtggttcagaatatcggcgaattgcgtaaaattctggacagcaaaccggcagtcttggcgttgaacgttcgtcgaggtgacagcacgatttatctgctggctcagtaa

SEQ ID NO: 7154 - protein, 488 aa, Erwinia carotovora subsp. atroseptica SCRI1043
MKRKSLVLSALALSLAMAMGSTTANAAESAASAASSGQLPSLAPMLENVMPSVVSIYVEGHTTNAGKESNAGKEGIPPQLQPFFGENSPFCQEGSPFQSSPMCQGDSDDDDSGQPQPKQENFQALGAGVVINAEKGYVVTNSHVVDNADKIQIRLSDGRKYDGKVLGKDPRSDIALVQLKDFKNLTAIKVADSDQLRVGDYTVAIGNPYGLGETATSGIVSALGRSGLNIENYENFIQTDAAINRGNSGGALVNLNGELIGLNTAILAPDGGNIGIGFAIPSNMVKSVVAQIIEFGEVKRGELGITGTELNSELAQAMKVDAQRGAFVSQVRPKSAADAAGIKAGDVIVTLNGKAVSSFSALRAQVGSLPVGSKVALGLLRDGKPLTVDVTLQQSNQAQVASGNLYSGIEGAELSNTQIDDKKGVKVDNVKPGSAAAKVGLKKDDIILGVNQQVVQNIGELRKILDSKPAVLALNVRRGDSTIYLLAQ

SEQ ID NO: 7155 - DNA, 1455 bp, Desulfotalea psychrophila LSv54
  CDS (1)..(1455): transl_table=11
atgaatagttggtccccagcccttacaaggggtatttgtctgcatcttctctgttcttttttctttgttaccagtcttgcctatgcctcggaaaatgatctggaaattttggaaaaatcgtccaaggcctttgcctctgttgcccggcaggcaaaacctgctgtcgttaatattcgagtggagaagacgattaagggtgggcagatggatggctggcaaatacccgatgagatgctagaacatccgttttttaagcaattttttggtccccagttacgtaaaaggcaaaatgtgcctccacgtctccaacaaggccaaggttccggctttatcgttagtgacgatggctatatcctcaccaataatcatgtggttgatggtgctgactctattacagtacgtcttaatgatgacagcagttatcaggcaaagcttattggtaccgatcccctctccgatgtcgcccttataaaaatagagagttcgaaaaaattaccaagtctggccatgggcagttctgctgctctggaggtgggtgagtgggtaattgccattggtaatccctttggcttgagccagactgtaacggtgggtattgtgagcgccaagggccggagtcaggtggggcttaatgagtatgaaaattttatccaaaccgatgcggctattaatccaggtaacagtggtggacccctccttaatataagaggtcaggtgattggtataaactcagccctcttctcccagacgggtggttatatgggcatcggttttgccattcccattgatatggtaaagtccattgaaagacagttgcaggcaacggggaaggtaagtcgcggctggcttggggtgatgattcaggatatagatgaaaacctggcccaatcctttggcctgaagagcagctctggtgtattgctgacaggtgttcagcctgattctcctgctgaaaaaggtggtttacttggtggtgatgttattatcgcaattgatggcagtgctgtgaaaaacgcctcggccctgcgtaacagggtggcactggtactgcccgggagcaaggtcgtcctgcaggtcattcgtaagggcaaaaaaagagatataggggtgctgattggtgagcggcccgtcggagccaatggactctcaattgaggaccatacggtccttaataataactttggtctctcctttgaaaaacttaccccggaaattgcgaaaaaattcggttatgcccagaaaaagggggttgtcatcagggaggtagccccccagagccctgccagcagggcaggacttaaggccggaatgctcattgaggaggtgaaccgaatggctataggtcaggttgccgatatcaaaaaggctttagctctgggaaaggatgccaggcatgtactcctgcgagtaggatttggccagggcagtcgctatatcgccttggttgcaaaataa

SEQ ID NO: 7156 - protein, 484 aa, Desulfotalea psychrophila LSv54
MNSWSPALTRGICLHLLCSFFFVTSLAYASENDLEILEKSSKAFASVARQAKPAVVNIRVEKTIKGGQMDGWQIPDEMLEHPFFKQFFGPQLRKRQNVPPRLQQGQGSGFIVSDDGYILTNNHVVDGADSITVRLNDDSSYQAKLIGTDPLSDVALIKIESSKKLPSLAMGSSAALEVGEWVIAIGNPFGLSQTVTVGIVSAKGRSQVGLNEYENFIQTDAAINPGNSGGPLLNIRGQVIGINSALFSQTGGYMGIGFAIPIDMVKSIERQLQATGKVSRGWLGVMIQDIDENLAQSFGLKSSSGVLLTGVQPDSPAEKGGLLGGDVIIAIDGSAVKNASALRNRVALVLPGSKVVLQVIRKGKKRDIGVLIGERPVGANGLSIEDHTVLNNNFGLSFEKLTPEIAKKFGYAQKKGVVIREVAPQSPASRAGLKAGMLIEEVNRMAIGQVADIKKALALGKDARHVLLRVGFGQGSRYIALVAK

SEQ ID NO: 7157 - DNA, 1446 bp, Yersinia pseudotuberculosis IP 32953
  CDS (1)..(1446): transl_table=11
atgaaaaaaacaactttagtattaagtgcattggcattgagcattggtttcgccatgggcccggtttcttccgtcgttgcggcagagacggcagcatcgagtagccagcagctccctagcctggcgccaatgctagagaaagtaatgccttcagtggtcagtatcaacgttgaaggtagtgcgcctgtaagcagtgctggtgcacgcggtatgccaccacaattccagcagttttttggtgataactcgccattctgtcaggacggttcaccgttccaaggctcgccaatgtgtcaaggggatctgggcggactagggcagggaatgccaagtaagcgggaattccgttcgcttggttcaggtgtcattattgatgcgggcaaggggtatgtcgttaccaataaccacgtggtcgataatgcgaacaagatcagcgtaaaactgagcgatggccgcagttttgatgccaaggtgatcggtaaagatccacgtaccgatatcgcactgttacaactgaaagacgctaaaaatctgactgcgattaagattgccaattcggatcaactgcgtgtcggtgattataccgtcgctatcgggaacccgtatggcttgggtgaaaccgtgacatccggtattgtctctgctttagggcgcagtggtttgaatgtagaaaactatgaaaactttatccagactgatgcggcgattaaccgcggtaattccggcggcgcattaatcaacctgaacggtgagttgattggtattaacaccgctattctggcaccggatggcggtaacattggtattggctttgctatcccaagcaacatggtgaagaacctgacatcacagatggttgagtttggtcaggtaaaacgcggtgaactgggcattatggggaccgagctaaactctgaactggcaaaagccatgaaggttgatgcgcagaaaggtgcctttatcagccaggtcgtgcctaaatctgctgcggcaaaagcgggtatcaaagcgggcgatatcattgtcagtatgaatgggaaagccatcaatagttttgcagggttccgcgccgagatcggcacgttacctgttggcagcaaaatgaccttgggtctgctgcgtgatggcaaaccgatcaatgtgaatgtcgtcctggagcagagcagccacagtcaggtggaatccggtaatctctacaccggtattgagggggctgaactgagtaacagcaacgttagcggcaagaaaggggtgaaagttgatagcgtaaaaccaggcactgctgcggcgcgtatcggcctgaaaaaaggtgatatcataatggggattaaccagcaaccagtccagaacctaggtgagctgcggaaaatcctcgatgctaaaccaccggtattggcgttgaatattcaacgtggtgatacttcactctatttattgatgcagtaa

SEQ ID NO: 7158 - protein, 481 aa, Yersinia pseudotuberculosis IP 32953
MKKTTLVLSALALSIGFAMGPVSSVVAAETAASSSQQLPSLAPMLEKVMPSVVSINVEGSAPVSSAGARGMPPQFQQFFGDNSPFCQDGSPFQGSPMCQGDLGGLGQGMPSKREFRSLGSGVIIDAGKGYVVTNNHVVDNANKISVKLSDGRSFDAKVIGKDPRTDIALLQLKDAKNLTAIKIANSDQLRVGDYTVAIGNPYGLGETVTSGIVSALGRSGLNVENYENFIQTDAAINRGNSGGALINLNGELIGINTAILAPDGGNIGIGFAIPSNMVKNLTSQMVEFGQVKRGELGIMGTELNSELAKAMKVDAQKGAFISQVVPKSAAAKAGIKAGDIIVSMNGKAINSFAGFRAEIGTLPVGSKMTLGLLRDGKPINVNVVLEQSSHSQVESGNLYTGIEGAELSNSNVSGKKGVKVDSVKPGTAAARIGLKKGDIIMGINQQPVQNLGELRKILDAKPPVLALNIQRGDTSLYLLMQ

SEQ ID NO: 7159 - DNA, 1470 bp, Mannheimia succiniciproducens MBEL55E
  CDS (1)..(1470): transl_table=11
atgaaaaaaacaagttttacattgactgcaatcgcattaggattaagcgttcttgctgcgccaaccgtaagtgtcgcggatttcagttcgttttttggcggcgataaatccgaatccgcagagcaaacctccgcaaacaaagcggcatcaaacgtagcacaatctgccgtaaacagcccgtttatcaccaattcattagcgccaatgcttgaaaaagtgttgccggcggtggtttccattgctgtggaaggtaatcaaaaaatcgctaagcgttcatttgatattccggaagaatttaaatttttcttcggtgaggatttctttggtgataattcttcaaaatcatcctcaagaaaattccgcggtttaggttccggcgtgattattaatgcggaaaaaggctatgtattaacaaacaaccacgttatcgataacgcggataaaatcaccgtattattgcaggacggccgtgaatttaaaggaaaaatcttaggcaaagacagtcaatccgatattgccttagtacaattggaaaaccctaaaaacttaaccgaaattaaatttgccgacagcgataaactacgcgtgggtgatttcaccgtagcgatcggcaacccattcggtttagggcaaaccgtcacctccggtatcatttctgccttagggcgctccaccggttccgacagcggcgcttatgaaaactatattcaaacggatgccgccgtaaaccaaggtaactcgggcggaccgttaattaatttaaacggcgaacttatcggtattaataccgctattctttcacctagcggcgctaatgccgggattgcctttgcaattccttctaacatggcaaataacttagcgcagcaaatcggtgagttcggcgaagtgcgtcgcggtatgttgggaattaaaggcggcgaactaaatgcggatctggcgaaagccttccacgttgatgcgcaacaaggcgcttttgtcagcgaagtcttaccgggatccgccgccgataaagcgggcattaaagcgggcgatgtgattattgccatgaacggacaaaaagtgtcgagtttcgccgaaatgcgcgcgaaaatcgctacttccggcgcaggtaaagaaattgaattaacttatctgcgtgataacaaaaaagaaaatgtaaaagttactctgcaagccgacgaccaggcgcaatctaccgctaatgcggaagccgttattccggcattggaaggtgcggaattgacaaacttcaatgaaaacggcaaaaaaggcgtgaaactcagtaaagtagctgaaaattccccggcagctcaacgaggtttgaaaaccggcgatttaattatcggcgttaaccgtatcgccattgaagatttaacacagttacgcaaagccatggaaaacaaagattccgttatagcgttaaatattgaacgcggaaataataatttctatcttctgattcaataa

SEQ ID NO: 7160 - protein, 489 aa, Mannheimia succiniciproducens MBEL55E
MKKTSFTLTAIALGLSVLAAPTVSVADFSSFFGGDKSESAEQTSANKAASNVAQSAVNSPFITNSLAPMLEKVLPAVVSIAVEGNQKIAKRSFDIPEEFKFFFGEDFFGDNSSKSSSRKFRGLGSGVIINAEKGYVLTNNHVIDNADKITVLLQDGREFKGKILGKDSQSDIALVQLENPKNLTEIKFADSDKLRVGDFTVAIGNPFGLGQTVTSGIISALGRSTGSDSGAYENYIQTDAAVNQGNSGGPLINLNGELIGINTAILSPSGANAGIAFAIPSNMANNLAQQIGEFGEVRRGMLGIKGGELNADLAKAFHVDAQQGAFVSEVLPGSAADKAGIKAGDVIIAMNGQKVSSFAEMRAKIATSGAGKEIELTYLRDNKKENVKVTLQADDQAQSTANAEAVIPALEGAELTNFNENGKKGVKLSKVAENSPAAQRGLKTGDLIIGVNRIAIEDLTQLRKAMENKDSVIALNIERGNNNFYLLIQ

SEQ ID NO: 7161 - DNA, 1401 bp, Legionella pneumophila subsp. pneumophila str. Philadelphia 1
  CDS (1)..(1401): transl_table=11
atgagtaaaatcaggattaataatatgattacacgtataaaattattcatagcaagtctgcttgtatttttcatcccggtagccgatgcagcacaagatcttacaaacatgcccagcttggctcctgttctgaaaaatgctatgccggctattgttaacgtggctgttcaagggtacttgcctaataatatggcatccggaaatgcagacgatgatgacggggaaaacagtaaacagccttccagaatacctgaaaaaggcagaaaatttgaaagtatagggtctggagttatcattgaccctaaaaatggcattattataacgaatgaccatgttattcgtaacgccaatttaattactgtaactcttcaagatggcaggagattaaaagctcgcctgattggaggtgatagcgaaacggacttggctgttttaaaaattgatgctaaaaatttgaaatccctggtaattggtgattccgataagctggaagtcggagattatgttgttgctattggaaacccctttggattaaacagctttggaaatagtcaatctgctacgtttggaatagtgagtgccttaaaacgcagcgatttaaatattgaaggtgttgaaaactttattcaaactgacgcagctatcaatcctggtaattcaggaggggctttggtcaatgcaaaaggcgaattaattggcattaatacagccattatttcaccctatggaggaaatgtaggtatcggctttgcgatcccaattaatatggcaaaagatgtagcgcaacaaatcattaaatttggctctattcatcgtggtttaatgggtatatttgttcaacatttaacaccagaacttgcccaatcaatgggatatgccgaagattttcaaggggctttagtatcacaggtcaatcaaaattcacctgctcaattggctggcctaaaatcaggcgatgtcattgtacaaattaatgacaccaaaataacgcaggcaacacaggtaaaaacaacgattagtctgttgcgagctggctctactgctaaaattaaaatcttgcgagataataagccgcttacattagatgtagaagtcacagacatcaaaaaacatgaacaaaaattacaatccaataatccatttctctacggattagccttgcgtaattttgaacaagagtcaccacctcatggtaatgttgttggagttcaggtagtaggtgcttcggaaaccagtgcgggctggcgagctggcttaaggccaggagatattatcatttctgctaataaaacaccggtcaaagacattaaatctttacaagctgttgcacacgagaaagggaaacagctattagtccaggtgctgagaggagcaggagcactctacctgttgatcatttaa

SEQ ID NO: 7162 - protein, 466 aa, Legionella pneumophila subsp. pneumophila str. Philadelphia 1
MSKIRINNMITRIKLFIASLLVFFIPVADAAQDLTNMPSLAPVLKNAMPAIVNVAVQGYLPNNMASGNADDDDGENSKQPSRIPEKGRKFESIGSGVIIDPKNGIIITNDHVIRNANLITVTLQDGRRLKARLIGGDSETDLAVLKIDAKNLKSLVIGDSDKLEVGDYVVAIGNPFGLNSFGNSQSATFGIVSALKRSDLNIEGVENFIQTDAAINPGNSGGALVNAKGELIGINTAIISPYGGNVGIGFAIPINMAKDVAQQIIKFGSIHRGLMGIFVQHLTPELAQSMGYAEDFQGALVSQVNQNSPAQLAGLKSGDVIVQINDTKITQATQVKTTISLLRAGSTAKIKILRDNKPLTLDVEVTDIKKHEQKLQSNNPFLYGLALRNFEQESPPHGNVVGVQVVGASETSAGWRAGLRPGDIIISANKTPVKDIKSLQAVAHEKGKQLLVQVLRGAGALYLLII

SEQ ID NO: 7163 - DNA, 1398 bp, Methylococcus capsulatus str. Bath
  CDS (1)..(1398): transl_table=11
ttggaccctcttgctatgcggtttagaaagataatcgatagaggtaattccatgcgcatgaaatccatcggcgcgctgttgctactgaccgccagcggcctgtccctctgccccccggtgtgggccgatttgcccgccagcgtcaacggtctgccactgcccagcctcgcgcccgtcttgaagaaggccatgcccgcggtggtcaacatctcgacgaagacccagatcgaaatcgccgagaatcccctgatgcaagaccccttcttccgacatttcttcggtattccgaatcagccgcggcgccgtgagagctccagcctcggctccggggtgatcgtcgacgcccgccgaggctacatcctcaccaacaaccatgtgatcgacaaggcggacgagataagcgtgaccttgagagacggacgccagttgagcgcaaaactggtcggcgccgatccggagtcggatttggccgtcatcaaggtcgaacccaagaatctgacggaactgcccatcggtgattcgagtcagctcgaagtcggcgacttcgtggtagccatcggcaatccctttggcctggggcagacagtgacctccggcatcgtcagtgccctggggcgatccggactcggcattgaggggtacgaggatttcatccagaccgacgcctcgatcaaccccggcaactcgggaggcgccttgatcaatctccgtggcgagctggtcggcgtgaatacggccatcatcgctcccaccggcggaaacgtgggcatcggtttcgccatcccgtccaacatggccgccagcatcatgacccaactggtcgaaaagggcgaaatccgccgcggccagatcggcatcaccatccaagacctgacgccggatctcgctcaggcctttggcctgaagcagagccagggcgcggtgatcaccggcgtccaaaaggattccccggccgcatcttcgggcctggaagccggcgacgtcgtcgtcagcgtcaatgaccgcccggtcaaaaacagcgcggacgtccgcaacaccatcggcctcctgcccataggcgaagaagtccgggtcgaagtgatgcacaagggggagagagtggtacgcgaggtggtgatccgcgcccccaaactggtccaggaagagggcaataaaatccatcccagactgtccggtgtcatacttaagaacaacgaggagggcggtgtccaggtggaaaaaatccacacgagttcttacgccttccaggccggcctgcgccccggcgacgtgatcgtgatggcgaaccgcgaggaaatcgaaacgctcgatgacctgaagcgcgccaccaagggccgctcggagctgctcctcagcgtccagcggggcagcggctcgttcttcttgatgctgaagtag

SEQ ID NO: 7164 - protein, 465 aa, Methylococcus capsulatus str. Bath
MDPLAMRFRKIIDRGNSMRMKSIGALLLLTASGLSLCPPVWADLPASVNGLPLPSLAPVLKKAMPAVVNISTKTQIEIAENPLMQDPFFRHFFGIPNQPRRRESSSLGSGVIVDARRGYILTNNHVIDKADEISVTLRDGRQLSAKLVGADPESDLAVIKVEPKNLTELPIGDSSQLEVGDFVVAIGNPFGLGQTVTSGIVSALGRSGLGIEGYEDFIQTDASINPGNSGGALINLRGELVGVNTAIIAPTGGNVGIGFAIPSNMAASIMTQLVEKGEIRRGQIGITIQDLTPDLAQAFGLKQSQGAVITGVQKDSPAASSGLEAGDVVVSVNDRPVKNSADVRNTIGLLPIGEEVRVEVMHKGERVVREVVIRAPKLVQEEGNKIHPRLSGVILKNNEEGGVQVEKIHTSSYAFQAGLRPGDVIVMANREEIETLDDLKRATKGRSELLLSVQRGSGSFFLMLK

SEQ ID NO: 7165 - DNA, 1383 bp, Silicibacter pomeroyi DSS-3
  CDS (1)..(1383): transl_table=11
atgatccgtgccatcctgctttgtctgccgcttgtcctggccgcgccggttcaggcggaaacccgggtgccgacctcgcgggccgagatcgggctgggttttgccccggtggtgaaaaaggccgcccccgccgtggtcaatatctatgcccggatcatcaccgcgggccggcaaagcccgatctttgacgatcccttctttcgcgatttctttcgcggcttcggggcgccgcagccgcgggtgcagaactcgctcggttcaggcgtgatcctgtcggatgacggctatgtcgtgtccaattatcacgtggtcggcatggcctcggaaatccgggtggtgaccaccgaccggcgcgagttcaccgcacaggtggtgctgggagatgaggagagcgatatcgccatcctgcgcctggacgcggcgcgcgacctgcctttcttggcgctgcgtgacagtgaccatgtcgaggtgggcgagctggcgctggccatcggcaacccgtttggcgtggggcagaccgtcagcagcggcatcgtctcggggttggcgcgctcgggcgcggccaccggcaatgggcggggctatttcattcagaccgatgcgccgatcaatccgggcaattcgggcggtgcgctgatcgacgtgaatggcgacctgatcggcatcaatacctcgatcctcagccggtcgggcggctcgaacgggatcggctttgccattcctgccaatctggtggccgagttcctgcgccaggcccggcagggcaacagcagctttgcccagccttgggcggggatcgcggggcagccgatgaccgccgatatcgccgactcgctggggctggtcctgcccgaaggggtggtgatctcggacctgcatcccgagagcccgctggcgcaggctggctttgccgtgggcgatgtggtgaccgaggtcgatgggcagacggtcaactctccggccgagatgaagttccgcatgtcggtggccgggatcgggggcgaggcgcggatgacccggctgcggcagggtcagcgcgagaccctgagtgtagccctgatcgaggcgcccgatgcccctcccgcgcaggaaaccacgctgggagagcgcacgatcctgcccggtctgaccgtggcccggctgaacccggccgtgatcgcgcgcctgggcctgccgctgtcggcgcgcggggtcgtcgtgctcgaccccggcccctatggggcgcgggcgggtctgcaaccgggcgacgtgctgggcgcgatcaatggcgatcaggtggacagcccgcgcgatgtggaacgggcgctgagcgaggccgggcgccgggtacagatcgacctgcaacggcgcggccagcgggtctcgctgcggttccggctctga

SEQ ID NO: 7166 - protein, 460 aa, Silicibacter pomeroyi DSS-3
MIRAILLCLPLVLAAPVQAETRVPTSRAEIGLGFAPVVKKAAPAVVNIYARIITAGRQSPIFDDPFFRDFFRGFGAPQPRVQNSLGSGVILSDDGYVVSNYHVVGMASEIRVVTTDRREFTAQVVLGDEESDIAILRLDAARDLPFLALRDSDHVEVGELALAIGNPFGVGQTVSSGIVSGLARSGAATGNGRGYFIQTDAPINPGNSGGALIDVNGDLIGINTSILSRSGGSNGIGFAIPANLVAEFLRQARQGNSSFAQPWAGIAGQPMTADIADSLGLVLPEGVVISDLHPESPLAQAGFAVGDVVTEVDGQTVNSPAEMKFRMSVAGIGGEARMTRLRQGQRETLSVALIEAPDAPPAQETTLGERTILPGLTVARLNPAVIARLGLPLSARGVVVLDPGPYGARAGLQPGDVLGAINGDQVDSPRDVERALSEAGRRVQIDLQRRGQRVSLRFRL

SEQ ID NO: 7167 - DNA, 1437 bp, Silicibacter pomeroyi DSS-3
  CDS (1)..(1437): transl_table=11
atgagcattcgcatgtcccgcaaactgaccccctcgctgcccgcctgggccgccgcccccgccctgggtgcgctgctgctgagcagcgcggccctgccggtcagcgccgacgaggcgctggccgatctggtcgaacaggtcgcccccagcgtggtcaccgtgctggccagccagaacgcggcgccgcgcccgaccggcgcccagccctctcccttcgagggcaccccgttcgaggagttctttcaccagttcggcggcccgcgcggcatgccgatgcccgatagcggcccgcgtcaggggctcggctcgggcttcatcctcgattccgagggctatatcgtcaccaacaatcatgtggtggacggcgccgaccgggtgaccgtacgcctcagcgatgaccgcgaattcaccgcccaggtggtcggcaccgacccgctgaccgatctggcgctgctgcggatcgaggcgggcgaggcgctgcccgccgtctcgctgggcgacagcgacgccatccgcgtgggcgaggatgtagtggccgtgggcaacccgttcgggctcagctcgaccgtgaccaccggcatcgtctcggccaaggggcgcaatatctcggacggaccctatgccgagttcatccagaccgacgccgccatcaacaagggcaattcgggcggacctctgttcaacatggccggtcaggtcgttggcgtgaactcggtgatctattcaccctcgggcggctcggtgggactgggctttgccgtcacctcgaacatcgtcgatcacgtaatctcggacctgcgcgaggacggtcaggtcgatcgcggctggctgggcgtttcgatccagaaccttggcgccgatatcgccgccgcactcgggcttgatcagaccaccggcgcgctggtgtccgaggtcgtggccgacggcccctcggacgggaccctgcgccccggtgacgtgatcgtcgccttcgagggcaagccggtgcgcaccagcgccgacctgccccggctggtgggcgcgaccgaggcaggaacccgcgccagtatccgggtgatgcgcgatggcaaggcgcaggatatcgcggtcaccatcggcacccatcaggccagcgccgaggtgatcccggccagcgccgacagccccgccgacgcgcccggcctgggcctgacggtcgccccgctgagcgccgaggcccgcaagggcgccgggctggacagcgacacgggtggtgtgctgatcaccgatatcgcgcccgatggccccgccgcccgcgccggcctgcgcccgggcgacgtgatcctgcggctgggcggcagcgataccatcagcccggcagcactggccaaggcgctggagagcgaaaagaccgatccggcgctgatgctgatcaaccggggcggcaaccagatcttcctcgcggtcaagatcacctga

SEQ ID NO: 7168 - protein, 478 aa, Silicibacter pomeroyi DSS-3
MSIRMSRKLTPSLPAWAAAPALGALLLSSAALPVSADEALADLVEQVAPSVVTVLASQNAAPRPTGAQPSPFEGTPFEEFFHQFGGPRGMPMPDSGPRQGLGSGFILDSEGYIVTNNHVVDGADRVTVRLSDDREFTAQVVGTDPLTDLALLRIEAGEALPAVSLGDSDAIRVGEDVVAVGNPFGLSSTVTTGIVSAKGRNISDGPYAEFIQTDAAINKGNSGGPLFNMAGQVVGVNSVIYSPSGGSVGLGFAVTSNIVDHVISDLREDGQVDRGWLGVSIQNLGADIAAALGLDQTTGALVSEVVADGPSDGTLRPGDVIVAFEGKPVRTSADLPRLVGATEAGTRASIRVMRDGKAQDIAVTIGTHQASAEVIPASADSPADAPGLGLTVAPLSAEARKGAGLDSDTGGVLITDIAPDGPAARAGLRPGDVILRLGGSDTISPAALAKALESEKTDPALMLINRGGNQIFLAVKIT

SEQ ID NO: 7169 - DNA, 1419 bp, Campylobacter jejuni RM1221
  CDS (1)..(1419): transl_table=11
atgaaaaagatttttttatcattaagtttagcaagtgctttatttgctgcaagtattaattttaacgaatcgactgcaacggctaatcgtgtgaatcctgctgctggaaatgcagtgctttcttatcatgattctattaaagatgcaaaaaaatcagtggttaatatttccacctcaaaaactattacaagagcaaatcgtccaagccctttggatgatttttttaatgatccttattttaaacaattttttgattttgattttcctcaaagaaaaggaaaaaatgataaagaagtggtgagttctttgggatcaggggtgattatttcaaaagatggttatatagtaacaaataatcacgttgtagatgatgctgatacgattacagtgaatttaccaggaagcgacatagaatataaagcaaaacttataggtaaagatccaaaaacagatttggctgttataaaaatagaggctaataatctttcagctattacttttacaaattctgatgatttaatggaaggagatgttgtttttgcacttggaaatccttttggagttggttttagtgttacaagtgggataatatctgctttaaataaagacaatataggtttaaatcaatatgaaaattttatacaaacagatgcttctatcaatccaggaaattcaggtggagctttggtggatagtcgcggatatttagtaggtattaattcagctattctttctcgtggtggtggaaataacggcataggttttgccataccttcaaatatggttaaagatatagctaaaaaacttattgaaaaaggcaagattgatagaggatttttaggtgtgactattttagctttgcaaggtgatactaaaaaagcttacaaaaatcaagaaggagctttaatcactgatgttcaaaaaggttcaagtgctgatgaagcagggcttaagcgtggagatttagttactaaagttaatgataaggttataaaaagtcctattgatcttaaaaattatataggaactttagagattggtcaaaaaatttcattaagttacgaaagagatggagaaaataagcaagcaagttttattcttaaaggtgaaaaagaaaatcctaaaggcgtacaaagcgatttgattgatggtttgagtttgagaaatttagatccaagacttaaggatcgtttgcaaattccaaaagatgttaatggtgttttggttgatagtgttaaagaaaagagcaaaggaaaaaattctggtttccaagagggtgatattatcataggtgttggacaaagtgaaattaaaaatttaaaagatttagaacaagctttaaaacaagttaataaaaaagaatttaccaaagtttgggtatatcgcaatggttttgcgactttgcttgtgcttaaataa

SEQ ID NO: 7170 - protein, 472 aa, Campylobacter jejuni RM1221
MKKIFLSLSLASALFAASINFNESTATANRVNPAAGNAVLSYHDSIKDAKKSVVNISTSKTITRANRPSPLDDFFNDPYFKQFFDFDFPQRKGKNDKEVVSSLGSGVIISKDGYIVTNNHVVDDADTITVNLPGSDIEYKAKLIGKDPKTDLAVIKIEANNLSAITFTNSDDLMEGDVVFALGNPFGVGFSVTSGIISALNKDNIGLNQYENFIQTDASINPGNSGGALVDSRGYLVGINSAILSRGGGNNGIGFAIPSNMVKDIAKKLIEKGKIDRGFLGVTILALQGDTKKAYKNQEGALITDVQKGSSADEAGLKRGDLVTKVNDKVIKSPIDLKNYIGTLEIGQKISLSYERDGENKQASFILKGEKENPKGVQSDLIDGLSLRNLDPRLKDRLQIPKDVNGVLVDSVKEKSKGKNSGFQEGDIIIGVGQSEIKNLKDLEQALKQVNKKEFTKVWVYRNGFATLLVLK

SEQ ID NO: 7171 - DNA, 1431 bp, Ehrlichia ruminantium str. Welgevonden
  CDS (1)..(1431): transl_table=11
atgaggaaatttttattagttatatcagtactattactaacaaccgtaccattagttagttcatcttctgaagatattgagcaatatgatccaagatcagggttttctcggctaattcaagattcaagcccagcaatagtaaacgttagtataattcaggattcatcatccgaacaactttctatgttattaaattttgaagagctattaaaaagtttagttgaaggaaaatcaattaaaaaagctgtacctgaagagatattaagttcaggctcaggttttgtaattgataaatcaggcattattgtaactaattatcatgttgtacaaaatgcaaaagaaatttttgttacatttagtgataataagtctgtaccagcaaaacttttaggtatagatccacaaactgatcttgcagtattaaaagttgaagttaaccaaaaccttccatacttaagtttcggtgattctaactctgctaaagtaggagattgggtagttgcaataggtaatccattcggcctcggaggatctgcaagtattggtattatatctgcacgagcaagagatttaaaaatcggagcaacagaatttctacaaactgatgcagcaataaatagcggtaattctggcggtccattgttcaatatacatggagaagtaatcggaattaacacagcaatgatgtcaacacaacgtggaggaggtagtataggagttggttttgcaattccatctaatagtgctattcctataattaaagtcctctctcaaggtaaaaaggtagaacatggttggcttggtatagtaatgcagcccgtaacagaagagctaatagaaccttttaagttaaaagaagtaacaggaattttagtaacaactgtagttaaggatagtccagcaaataaagcaactatattgccaggagacgtaatacttgagtttaatcataataaggtcactactggatcacagctatatcaatctgtactaagatctaagccaggtagtgatgcaaatatcttgatatcacgtcatggtaaattaataaatttaaatgttaaaatgggaaaatttgaggaccctaatttacaggatcagagtaatgagatctaccagaatataaaaaacgttttccaatcacctgaattaggtttaacagtaggtaacatagaacctaatatgctacctaaatgtacagaagatactatcacaggagtaatagtattaaaagcagaacatggaaatgatgccccaagtaaaaatttaaggaaaggagacgtaatatcacaaataaaccaactagcagtagctaacatatcagattttaagaatgccataaaaaaaacaaatagaaataagtctgtagcattgcttgtccacagaaataactttccatcaatatttattcctgttaagttaaagaagtaa

SEQ ID NO: 7172 - protein, 476 aa, Ehrlichia ruminantium str. Welgevonden
MRKFLLVISVLLLTTVPLVSSSSEDIEQYDPRSGFSRLIQDSSPAIVNVSIIQDSSSEQLSMLLNFEELLKSLVEGKSIKKAVPEEILSSGSGFVIDKSGIIVTNYHVVQNAKEIFVTFSDNKSVPAKLLGIDPQTDLAVLKVEVNQNLPYLSFGDSNSAKVGDWVVAIGNPFGLGGSASIGIISARARDLKIGATEFLQTDAAINSGNSGGPLFNIHGEVIGINTAMMSTQRGGGSIGVGFAIPSNSAIPIIKVLSQGKKVEHGWLGIVMQPVTEELIEPFKLKEVTGILVTTVVKDSPANKATILPGDVILEFNHNKVTTGSQLYQSVLRSKPGSDANILISRHGKLINLNVKMGKFEDPNLQDQSNEIYQNIKNVFQSPELGLTVGNIEPNMLPKCTEDTITGVIVLKAEHGNDAPSKNLRKGDVISQINQLAVANISDFKNAIKKTNRNKSVALLVHRNNFPSIFIPVKLKK

SEQ ID NO: 7173 - DNA, 1431 bp, Pseudomonas fluorescens Pf-5
  CDS (1)..(1431): transl_table=11
atgtcgataccacgcttgaagtcctacttcaccattcttgccaccgtgctggtgcttgggcaggccgtttctgcccaggcggccgagctgcctgatttcacccaactggtcgagcaggcctcgcctgcggtggtgaacatcagtaccacgcagaaactgccggaccgccgggtttccaattcggcgcagatgcccgacctcgaaggcctgccgccaatgctgcgcgagttcttcgaacggggcatgccccagccacgctctccgcgcggggatcgtcagcgcgaagcgcagtcgctgggttccgggttcatcatctccgcggacggttacatcctcaccaacaaccacgtgatcgccgatgcggacgaaattcttgtgcgtctggccgatcgcagtgagctgaaagccaagctgatcggtaccgacccacgctccgacgtagcactgctgaaaatcgatggcaaagacctgccggtgctgaaactgggtaaatcccaggacctcaaggccggccagtgggtggtggccatcggctcgccgttcggcttcgaccataccgtgacccagggtatcgtcagtgccatcggtcgcagcctgccgaacgaaaactacgtgccgttcatccagaccgacgtgccgatcaacccgggcaactccggtggcccgctgttcaacctggccggtgaagtggtggggatcaactcgcagatctacacccgctccggtggtttcatgggcgtgtctttcgccatcccgatcgatgtggcgatggacgtttccaaccagctgaaaaccggtggcaaagtcagccgtggctggcttggcgtggtaatccaggaggtcaacaaggacctggctgaatccttcggcctggagaaaccggccggcgcgctggttgcacagatccaggatgatggcccggcggccaagggcggcctgcaagtgggtgacgtgatcctcagcctcaatggccagcccatcgtcatgtcggccgacctgccgcacctggtaggcgcgctgaaggccggggccaaggccaacctggaagtgatccgcgacggcaagcgcaagaatgtcgagctgaccgtcggcgcgattcctgaagaagacaaagacctgagcatgctgcccaagtcgggtgtcgagcgcagcagcaatcgtctgggtgtagcggtggtcgagctcaacgatgagcagaagaaagccttcgacctcaagggcggggtagtcatcaaggaagtccaggacggtcctgcggcgctgatcggcttgcagccgggcgacgtgatcactcacctgaacaatcaggcgatcacttcggcgaaggagttcactgaaatcgccaaggcattgccgaagaaccgctcggtgtccatgcgggtactgcgtcaggggcgagccagcttcatcaccttcaagctggccgagtaa

SEQ ID NO: 7174 - protein, 476 aa, Pseudomonas fluorescens Pf-5
MSIPRLKSYFTILATVLVLGQAVSAQAAELPDFTQLVEQASPAVVNISTTQKLPDRRVSNSAQMPDLEGLPPMLREFFERGMPQPRSPRGDRQREAQSLGSGFIISADGYILTNNHVIADADEILVRLADRSELKAKLIGTDPRSDVALLKIDGKDLPVLKLGKSQDLKAGQWVVAIGSPFGFDHTVTQGIVSAIGRSLPNENYVPFIQTDVPINPGNSGGPLFNLAGEVVGINSQIYTRSGGFMGVSFAIPIDVAMDVSNQLKTGGKVSRGWLGVVIQEVNKDLAESFGLEKPAGALVAQIQDDGPAAKGGLQVGDVILSLNGQPIVMSADLPHLVGALKAGAKANLEVIRDGKRKNVELTVGAIPEEDKDLSMLPKSGVERSSNRLGVAVVELNDEQKKAFDLKGGVVIKEVQDGPAALIGLQPGDVITHLNNQAITSAKEFTEIAKALPKNRSVSMRVLRQGRASFITFKLAE

SEQ ID NO: 7175 - DNA, 1380 bp, Colwellia psychrerythraea 34H
  CDS (1)..(1380): transl_table=11
atgaaaaaatcatttacatcatctaaattatcaattgtcatcagtgccgcattattatcatcgaccttagcacttactagcgctcctgcattagcaaacttacctgcccaagtagatggccatgtaatgcccagcttagctccaatgcttgaacatgcgactccagctgttgttagtatctctgtaataggcacccataatgtgccacaacaaaatgtacctgacgcattcaaatttttctttggtaataaagaaaaaaatcaaggacaacctcaacaaagaccatttcgcggcttgggctcaggtgtaattattgatagtgatgaaggttatgttgttaccaataaccatgtcatagaaaatgctgacaaaattatgatcaccttaaaagacggtcgtcagttagaagcgaagaaaatcggtagcgatgcaaaaagtgacattgctttattacagattgattctgaaaacttaagtgaaatcaaattagccgattccgataatttgcgtgttggagatttcactgtcgcgattggtagtccgtttggtctaggacaaaccgttacttctggcattgttagtgcgctaggacgtagtaatctaaatatcgaacattatgaagactttattcaaaccgatgctgccataaatagtggtaactccggtggcgctttagttaacttgcgcggtgagttgattggtatcaacacagcgatattagggcctagtggtggtaatgtcggtattggctttgctatcccgagtaatatgatgcataacctaattacgcagataattgaatttggtgaagtacaccgcggtattctgggtgtatctggacgaagtgttaacagcgaaattgccaaagcaatggagctagaaacaagtcaaggtggctttattgagcaagtgatgcctgactctgctgcagacgaagcgggtattaaggcaggtgacgtgatcattgccgtgaatggtaaagccattaaaagcttctttgaactacgcgctaaaattggttcaattggtgcgaataaaaaagttaagttaacggtgataagagatggagacaacaaagtatttaccgttaagttaaagcaagatcaaagtgcagatattactgccgccagtattcacactatgttagatggtactaaattagaaaatgacaccaagaaacaggcgattatcatagaacaagttgccgaaggctctccggcacaaagggcaggatttcaagcaggtgatattatcacgggcgttaaccgtagtcgtatcaaagatattgctcaattacgtgattaccttaaagataaaagtggtgtactagcgctaaatattgttcgggataatcattcccagtacataatgatccgttaa

SEQ ID NO: 7176 - protein, 459 aa, Colwellia psychrerythraea 34H
MKKSFTSSKLSIVISAALLSSTLALTSAPALANLPAQVDGHVMPSLAPMLEHATPAVVSISVIGTHNVPQQNVPDAFKFFFGNKEKNQGQPQQRPFRGLGSGVIIDSDEGYVVTNNHVIENADKIMITLKDGRQLEAKKIGSDAKSDIALLQIDSENLSEIKLADSDNLRVGDFTVAIGSPFGLGQTVTSGIVSALGRSNLNIEHYEDFIQTDAAINSGNSGGALVNLRGELIGINTAILGPSGGNVGIGFAIPSNMMHNLITQIIEFGEVHRGILGVSGRSVNSEIAKAMELETSQGGFIEQVMPDSAADEAGIKAGDVIIAVNGKAIKSFFELRAKIGSIGANKKVKLTVIRDGDNKVFTVKLKQDQSADITAASIHTMLDGTKLENDTKKQAIIIEQVAEGSPAQRAGFQAGDIITGVNRSRIKDIAQLRDYLKDKSGVLALNIVRDNHSQYIMIR

SEQ ID NO: 7177 - DNA, 1470 bp, Dechloromonas aromatica RCB
  CDS (1)..(1470): transl_table=11
atgaaactgaaacccctgaaaatgacagttgccgccattgctgtcgctgctgcgctgggcggcgcctattcgctgggtcaatacgcgccctttgccagtgccaacgcgacaacccagcctgccgctagcagcgtcgcccctgccgccgctccggtcagcacgcctaacggcctgccggacatgcgcagcattgtcgccaacaatgcccaggccgtggtcaacatcagcgtgaccggaacgcgcaagacgggcgccaaccttcccggcatgccgcaactcgaccccgatgacccgctttaccagttcttccgccgcttcggtggacagatgccgcaggacaatgaacccacgcacggccttggctccggtttcatcgtgacgcctgacggcacggtgttgaccaatgcccatgtcgtcgacggcgccgaggaagtgaccgtcaagcttaacgacaagcgcgaattcaaggccaaggtgcttggcctggacaaggcaagcgatgtggccgtcctgagaatcgacgccaaaaacctgcctacggtgaagatcggttcatcgacgcagactgccgtcggcgaatgggtgctggccatcggctcgccgttcggattcgaaagcagcgccagtgccggcattgtctcggccaagtcgcgcaacctgccggatggcagctacgtgcccttcatccagaccgatgtggcagtgaatcccggcaactccggcggtccgctgttcaacatgaacggcgaggtaatcggcatcaattcgcagatctactcacgcagcggcggttaccaggggctgtcttttgccattccgatcgaggtcgcgatgaatgtcgaaaagcagatcgtcacgcacggcaaggtgcaacgcggcaagctcggcgtcaccatccaggaggtcaaccagtcgctggcagacagcttcggcctgcccaaaccggccggcgcgctggtcgctgcagtcgagaaaggcagcccggcggccaaggcgggtctggagcctggcgatgtcattctcggcatcgacggcaaaaccgtcgagacgcccggcgaactccctgccgccatcgccaccaagctgcccggcgaatcggcccgcctgcaaatctggcgcaagggtggaacgcagaacattgatgtcaaggttggcagtttcggagacgagaaagtggccgcgaacgacacacagcccgccaccaaaggtcgcctcggcgtcgccgtgcgcccactgacgccggaagaacgacgccaggccgagatcaagggtggcgtgctcgtcgagcaagccgacggcgccgccggtcgtgccggcatccggccgggcgacatcattgtgtcggtcaacggacagccgattggcgacgtcgaacaactgcgcagcctgatcgccaaatccggtaagaaggcagccatcctgatcgaacgcggcgattctcgactattcgttccggtcgacctcggttaa

SEQ ID NO: 7178 - protein, 489 aa, Dechloromonas aromatica RCB
MKLKPLKMTVAAIAVAAALGGAYSLGQYAPFASANATTQPAASSVAPAAAPVSTPNGLPDMRSIVANNAQAVVNISVTGTRKTGANLPGMPQLDPDDPLYQFFRRFGGQMPQDNEPTHGLGSGFIVTPDGTVLTNAHVVDGAEEVTVKLNDKREFKAKVLGLDKASDVAVLRIDAKNLPTVKIGSSTQTAVGEWVLAIGSPFGFESSASAGIVSAKSRNLPDGSYVPFIQTDVAVNPGNSGGPLFNMNGEVIGINSQIYSRSGGYQGLSFAIPIEVAMNVEKQIVTHGKVQRGKLGVTIQEVNQSLADSFGLPKPAGALVAAVEKGSPAAKAGLEPGDVILGIDGKTVETPGELPAAIATKLPGESARLQIWRKGGTQNIDVKVGSFGDEKVAANDTQPATKGRLGVAVRPLTPEERRQAEIKGGVLVEQADGAAGRAGIRPGDIIVSVNGQPIGDVEQLRSLIAKSGKKAAILIERGDSRLFVPVDLG

SEQ ID NO: 7179 - DNA, 1395 bp, Thiobacillus denitrificans ATCC 25259
  CDS (1)..(1395): transl_table=11
atgttgagagcggctctggccatgacgagcttcgtgtttgtgctggcggcgccggtcgcggaagcggtcgacgtcgccgatctggtcgaaaagcagggtccggcggtggtcaacatcagcaccaccaagctggtcaagcgcggcgccgagggctttccgttcgcggtcccggaagaccccgagatgcaggaattctttcgccgcttctttccgggcgtgccgggtcgggcgcccggggcaccggcgcaggagtttccggcgcatggcgccggctccggcttcatcgttagtagcgacggctacatcctgaccaacgcccacgtcgtgaaaggtgcggacgaagtcgtcgtcaagctgaccgacaaacgcaagttcatcgccaaggtcgtgggttcggacccgcgcaccgacgtggccgtgatccgcatcacggcgcgcaacctgccggcggtgcgcctcggcgacccggaaaaacttcgcgtcggtgaggcagtggctgcgatcggctcgcctttcggcttcgagaactcggtcaccgcgggcatcgtgtcggccaagggccgctcgctgccgtccgaaagctacgtgcccttcatccagaccgacgtcgcggttaacccgggtaattcgggggggccgctgttcaacatgcgcggcgaagtcgtcggcatcaactcgcagatctacagccagagcggcggctaccagggggtggcgttcgcgatcccgatcgacatcgcgatggaggtcgtcgaccagttgaaggctggcggcaaggtctcgcgcggctggcttggcgtcatgatccaggaggtcagcgcggacctcgccgaatccttcggcctcgaccggccgcgcggcgcgctcgtgtcgcaggtacaggatggaagccccgcggcccgtgcgggcgtccagaccgccgacgtgatcctcagcttcaacggcaagccggtcgagaattctggcgacctgccgcgcatcgtcggcagcaccaagcccgggtcgaagatcccgatgcaggtctggcggcgcggcaaaatgcagaccctgcaggtcgtcctggccgagctgccgagcgaagagcaggtcgccggcgcgggcaagagcggcaagagctactcgcgcggcggcctcgcgctgtccgaactcaaccccgaacagcggcgcgagctcaagatcgaccacggcctgctcgtcgaggaagtcaccggcgacgccgctcgggccggcatccgggtgggggacatcgtcctcgccgtcaacaatgcaaggatcgcgaccgtcgacgcgttccgccaggcgatcgcggcgatcccgaaaggcaagagcgctgcgctcctggtgcggcgcggcgaaggatcgctgtacatcccgctgaagatttcgggtgagtaa

SEQ ID NO: 7180 - protein, 464 aa, Thiobacillus denitrificans ATCC 25259
MLRAALAMTSFVFVLAAPVAEAVDVADLVEKQGPAVVNISTTKLVKRGAEGFPFAVPEDPEMQEFFRRFFPGVPGRAPGAPAQEFPAHGAGSGFIVSSDGYILTNAHVVKGADEVVVKLTDKRKFIAKVVGSDPRTDVAVIRITARNLPAVRLGDPEKLRVGEAVAAIGSPFGFENSVTAGIVSAKGRSLPSESYVPFIQTDVAVNPGNSGGPLFNMRGEVVGINSQIYSQSGGYQGVAFAIPIDIAMEVVDQLKAGGKVSRGWLGVMIQEVSADLAESFGLDRPRGALVSQVQDGSPAARAGVQTADVILSFNGKPVENSGDLPRIVGSTKPGSKIPMQVWRRGKMQTLQVVLAELPSEEQVAGAGKSGKSYSRGGLALSELNPEQRRELKIDHGLLVEEVTGDAARAGIRVGDIVLAVNNARIATVDAFRQAIAAIPKGKSAALLVRRGEGSLYIPLKISGE

SEQ ID NO: 7181 - DNA, 1449 bp, Pseudomonas fluorescens PfO-1
  CDS (1)..(1449): transl_table=11
atgtcgataccaagcttgaagtcttatctctccattttcgccacggtgctggtgctcggtcaggctgttcctgcagtccatgcggctgaggcggccagcccggccaacctgccggatttcacccagctggtcgaacaggcctcgcctgcggtggtgaacatcagtaccacgcaaaagctgccggatcgcaaagtgaaccagcaaatgcccgacctggaaggcttgccgccgatgctgcgcgagttcttcgagcgcggcatgccgccgcaacagcgttctccgcgtggtgatcgccagcgtgaagcgcagtcgctggggtcgggctttatcatttcgccggatggctacatcctgaccaataaccatgtgatcgccgatgccgacgaaatcctcgtccgtctggctgatcgcagtgaaatgaaagccaagctgatcggcaccgacccacgctccgacgtggcgctgctgaaaatcgaaggcaaggatctgccagtgctgaaactcggcaaatcccaggacctgaaagccggtcaatgggtggtggcaatcggttcgccattcggctttgatcacaccgtgactcaaggcatcgtcagtgccgtcggtcgcagcctgccgaatgaaaactacgtgccgttcatccagaccgacgtaccgatcaacccgggtaactccggtggcccgctgttcaatctgaacggtgaagtggtcgggatcaactcgcagatctacacccgttccggtggcttcatgggcgtgtcgttcgccattccgatcgacgtggcaatggacgtttccaatcagctgaaaagcggcggcaaagtcagccgtggctggttgggcgttgtcatccaggaagtgaacaaggatctggccgagtcgttcggtctggataaaccggccggtgcactggtcgcacagattcaggatgacggcccggctgcaaagggcggcctgcaagtgggtgacgtgatcctgagcatgaacggtcaaccgatcgtcatgtctgctgacctgccacatctggtgggtgcgttgaaggctggcgccaaggccaacctcgaagtgattcgtgacggcaagcgcaagaatgtcgagctgactgtcggcgccattccagatgaagacaaggaactggatgctctgccgaaatctggtgctgaaaccaacagcaatcgtctgggggtatcggttgccgagctgagcgccgagcagaagaaaacctacgacctcaaaggtggtgtggtgatcaaggaagtgcaggacggtcctgcagccctgatcggtctgcaaccgggcgacatcatcacccacctgaacaatcaggccatcggttcttccaaggagttcgccgagatcgccaaggcgctgccgaagaaccgttcggtgtcgatgcgcgttctgcgtcaggggcgtgccagcttcatcacgttcaaactggctgaatga

SEQ ID NO: 7182 - protein, 482 aa, Pseudomonas fluorescens PfO-1
MSIPSLKSYLSIFATVLVLGQAVPAVHAAEAASPANLPDFTQLVEQASPAVVNISTTQKLPDRKVNQQMPDLEGLPPMLREFFERGMPPQQRSPRGDRQREAQSLGSGFIISPDGYILTNNHVIADADEILVRLADRSEMKAKLIGTDPRSDVALLKIEGKDLPVLKLGKSQDLKAGQWVVAIGSPFGFDHTVTQGIVSAVGRSLPNENYVPFIQTDVPINPGNSGGPLFNLNGEVVGINSQIYTRSGGFMGVSFAIPIDVAMDVSNQLKSGGKVSRGWLGVVIQEVNKDLAESFGLDKPAGALVAQIQDDGPAAKGGLQVGDVILSMNGQPIVMSADLPHLVGALKAGAKANLEVIRDGKRKNVELTVGAIPDEDKELDALPKSGAETNSNRLGVSVAELSAEQKKTYDLKGGVVIKEVQDGPAALIGLQPGDIITHLNNQAIGSSKEFAEIAKALPKNRSVSMRVLRQGRASFITFKLAE

SEQ ID NO: 7183 - DNA, 1386 bp, Rhodobacter sphaeroides 2.4.1
  CDS (1)..(1386): transl_table=11
atgcgtcacgctctgcttgccttttccctgatcgctctcctgtcgccgcttgccgcgcctgccgagacgcgcctgcccgagagcgccgccgagatttcgctctccttcgcgccggtggtgcgctcggcggcacctgcggtcgtgaacatctatgccacgcgggtggtcgagcagcgcgtgagcccctttgccgccgatccgttcttcgaccagctcttccgggatttcggtcgccgccagccgcgggtgcagaactcgctgggctccggcgtgatcgtctccggggacgggatcgtggtgtcgaactatcatgtggtgggacaggccgacgccatccgggtcgtgctgaacgaccggcgcgaatatgaggccgaggtgatgctcgccgatcaggacagcgaccttgcggtgctgaagctgaaggaggccagggatctgccgcatctggggctgcgcgattccgacggcgtcgaggtgggggagctggtgctggccatcggcaacccgttcggggtgggccagaccgtgtcgcagggcatcgtctcggggctcgcgcgctcgggtctctcgatcgacggcgggcgcggctatttcatccagaccgatgccgccatcaaccccggcaactcgggcggcgcgctggtcgatacggcggggcggctcgtagggatcaacaccgcgatcctcacccagtcgggcggctcgaacgggatcggcttcgccattcccgccaatctggtgcgcagcttccttgcacaggcggaggcgggcgaggcgcacttccagcgtccctgggcaggggtgaacgggcaggcggtcgatgcaagcatggccgaggcgatggggctcgaacgcccggaaggggtggtgctgaccgagctcgatcccgagagcccgttccgcgccgcgggcctgcgcgcgggcgatgtggtggtggcgctggaggggcagcgcaccgacagcccgcaggaggtgatcttccggctctcctccttgggcatcggcgcgcgcgccacggtgagctatctgcgcgacggcgagacgcgcgaggccgagatcgcgctggtcgtggcgcccgacaagccgccccgcgagacggtggcgctgcgcgagacggtccttgccgggctcacggtcgagcggctcaatcccgcggtgcgggccgagctgaacctgcccctgaccctcgaaggggtggtggtgcgcgcctccgaggcgacggcggcgcagacgggcctccggccgggcgacatcctgctcgagatcaacggccgccggatcgagcgcccgcgcgatgtggagcgcgccgcgcaggagcgggtgcgctggtggcagatcgacgttctccgcgacggcaagccgctgcgactgcgcttccgtctctga

SEQ ID NO: 7184 - protein, 461 aa, Rhodobacter sphaeroides 2.4.1
MRHALLAFSLIALLSPLAAPAETRLPESAAEISLSFAPVVRSAAPAVVNIYATRVVEQRVSPFAADPFFDQLFRDFGRRQPRVQNSLGSGVIVSGDGIVVSNYHVVGQADAIRVVLNDRREYEAEVMLADQDSDLAVLKLKEARDLPHLGLRDSDGVEVGELVLAIGNPFGVGQTVSQGIVSGLARSGLSIDGGRGYFIQTDAAINPGNSGGALVDTAGRLVGINTAILTQSGGSNGIGFAIPANLVRSFLAQAEAGEAHFQRPWAGVNGQAVDASMAEAMGLERPEGVVLTELDPESPFRAAGLRAGDVVVALEGQRTDSPQEVIFRLSSLGIGARATVSYLRDGETREAEIALVVAPDKPPRETVALRETVLAGLTVERLNPAVRAELNLPLTLEGVVVRASEATAAQTGLRPGDILLEINGRRIERPRDVERAAQERVRWWQIDVLRDGKPLRLRFRL

SEQ ID NO: 7185 - DNA, 1431 bp, Geobacter metallireducens GS-15
  CDS (1)..(1431): transl_table=11
atgaagcattggacgctgaaatctgctggcaaaatatcccttctgacagcttttctcctgatttcgctaattttcctggggggatgcgacgggaggagcaagaccgaattcgtgggattcccccaatcattcgccgatctcgccgaaaaaatcagacccgccgtggtgaacatcagcaccacatcaaccgtcaaagtacccggcaatcccttcaggcactttttcggccccgaggaagaagggccgtttggtgatttcttcaagcattttttcggcgacatgcccgaccgtgagctgaaacagcagagtctcggctccgggatcatcaccgacaaggacgggtacatcgtcaccaacaaccacgtggtggataatgccgaggagataaaggtcaagatctctgacggcagagaattcaaggccaaggttatcggaagggatcccaaaaccgatcttgcgctgatcaagatatcttcccccttcagaaatctccccgtcctccccctcggcgactccgacaaaatgagagttggtgattgggtgcttgcagtggggaacccgttcggtctcgaacacaccgtgacccaggggatcatcagcgccaccgggagggtgatcggttccgggccctatgacaatttcctccagaccgacgcccccatcaaccctggcaacagcggcggccccctggtcaacctcaaaggggaggtgatcgggatcaataccgccatcgtccccggcgggcaggggctcggctttgccatcccgagcagcatggccaaaatggtgctcaagcagttgcaggagaaggggaaagtggtgcggggatggctcggtgttacgatccagaccgtaacccccgacctggccgcctcctttggcctcaaggaggcgaagggggccctcgtctccgacatcgcggaaggaggaccggccgccaaagggggaatcaggcggggagatatcatcctttcctttgacgggaaaaatgtgaaggactccatggaactgccccgaatcgtagcggaaaccccggtcggcaaagaggtggatgtcacggtgctcagggaagggaaagaggtgcattgcagggtgagggtcgaggaactcacggaacagaggattgccgcccagaccgaggcgccgacggacagcttcggaatgacgtttgtcgacattacccccaaggtgcggcaacaactcgggatcaaagagaaaacgggagttgtcgttgccggagtggagcccgggagcatcgccgaagatgcgggtatccgggcgggggatgtgatcaaggaagttaatcgcaaaccggtcagaaacctggcggacttgagcagtgccttggagaagtccgcaaaggggcaaccggtcctcttgctgctcaatcggggaagtcagactttctatgtgacgctggaaacttcgtag

SEQ ID NO: 7186 - protein, 476 aa, Geobacter metallireducens GS-15
MKHWTLKSAGKISLLTAFLLISLIFLGGCDGRSKTEFVGFPQSFADLAEKIRPAVVNISTTSTVKVPGNPFRHFFGPEEEGPFGDFFKHFFGDMPDRELKQQSLGSGIITDKDGYIVTNNHVVDNAEEIKVKISDGREFKAKVIGRDPKTDLALIKISSPFRNLPVLPLGDSDKMRVGDWVLAVGNPFGLEHTVTQGIISATGRVIGSGPYDNFLQTDAPINPGNSGGPLVNLKGEVIGINTAIVPGGQGLGFAIPSSMAKMVLKQLQEKGKVVRGWLGVTIQTVTPDLAASFGLKEAKGALVSDIAEGGPAAKGGIRRGDIILSFDGKNVKDSMELPRIVAETPVGKEVDVTVLREGKEVHCRVRVEELTEQRIAAQTEAPTDSFGMTFVDITPKVRQQLGIKEKTGVVVAGVEPGSIAEDAGIRAGDVIKEVNRKPVRNLADLSSALEKSAKGQPVLLLLNRGSQTFYVTLETS

SEQ ID NO: 7187 - DNA, 1419 bp, Geobacter metallireducens GS-15
  CDS (1)..(1419): transl_table=11
atgcgtatctgtcgcctgttcattgtcatcattgcgctctttaccgttgtgcccgcctgctcgaagaaggaagataagctcttctacgagacggggcgggccgaagcgccggtaaaggacgttcccaaggacatcatggctacccagcaggccttcgtggagttggtgaagaaggtgacgccgtcggtggtcaacatctccaccatcagcaggaagaaggtcgagcagccctttttcgaattttctcccttattcggcgacttgttcggcgacggcaggccccgctaccgccgcgacaagagcctcggctccggattcatcatcaacaagagcggctacatcgtcaccaatgaccacgtggtgcgggacgccgagaccatcaaggtcaggctctccaacgaaaatgtctatgacggcagggttgtcggcagtgatcccaagaccgacatcgccgtcatcaagatcgacgccaaggaggatctccccgtggcggtcctggccgattccgacaagctccaggtggggcagtgggccatcgccatcggcaatcctttcggcctcgaccggaccgtgaccgtgggggtagtgtcggccaccggccgctccaacatggggatcgagacctacgaggacttcatccagaccgacgcctccatcaaccccggcaactcgggggggccgctcctgaacgtccacggggaggtgatcggcatcaacaccgccatcgtggccgccggccaggggatcggctttgccatccccgtcaacatggccaagcagatcgtcacccagctcgtcaccaaggggagtgtgagccgtgggtggctcggcgtatcaatccagccggtgaccgacgagattgcccgggagttcggcctcaagaaggcccggggggtgctggtggccgacgtcgtggaggggagccccgctgccaagggggggatcaagcagggagacattatcctcgacttcgccggcaccgagatcaaggacgcccagcacctccagcgggtcgtggccgcaacggcaccggggaagaccgtccaggtcacggtgttccgtggggggcgcgaggtgaagctttccctcacctcggccagcgccgacagcgccggggcccggcaggcccgaccccagggggaggagcccgacctcctcggtctgatggtcgaggaaattccttccgacctgcgccgccgtggcgtatccggcgtggtcgtggccgaggttgacgaggaggggattgccgccgaggcggggatccagcgtggcgacatcatcgtttcggtgaaccgcaagggggtcgcgacccgggccgaatatgaacgcgccatggcggaagccggacgccggggcacggcgatcctgctagtgcgccggggcaacgccagcattttcttctcgctcaggctgcgctaa

SEQ ID NO: 7188 - protein, 472 aa, Geobacter metallireducens GS-15
MRICRLFIVIIALFTVVPACSKKEDKLFYETGRAEAPVKDVPKDIMATQQAFVELVKKVTPSVVNISTISRKKVEQPFFEFSPLFGDLFGDGRPRYRRDKSLGSGFIINKSGYIVTNDHVVRDAETIKVRLSNENVYDGRVVGSDPKTDIAVIKIDAKEDLPVAVLADSDKLQVGQWAIAIGNPFGLDRTVTVGVVSATGRSNMGIETYEDFIQTDASINPGNSGGPLLNVHGEVIGINTAIVAAGQGIGFAIPVNMAKQIVTQLVTKGSVSRGWLGVSIQPVTDEIAREFGLKKARGVLVADVVEGSPAAKGGIKQGDIILDFAGTEIKDAQHLQRVVAATAPGKTVQVTVFRGGREVKLSLTSASADSAGARQARPQGEEPDLLGLMVEEIPSDLRRRGVSGVVVAEVDEEGIAAEAGIQRGDIIVSVNRKGVATRAEYERAMAEAGRRGTAILLVRRGNASIFFSLRLR

SEQ ID NO: 7189 - DNA, 1434 bp, Methylobacillus flagellatus KT
  CDS (1)..(1434): transl_table=11
atgtttaaaaagctaattgccatgtcagcaatttgtttatttgttggtatggcgggggcaacgccggttttagccaaggaattgcccgattttaccgagctggcggaaaagcagggagcggcagtggtcaatatcagcgtgacccaggtcgtacagtctggaataggtggatctccttttcccggattccccgaagatgaggcattgaatgaattctttcgccgttttggcattccagggtttccgggtgtgccgcgcggacaaggtggtccacagcaacctgaatttaaatcccagtccctcgggtcaggattcatcattagcagcgatggttatatcctgacgaatgcccatgtagttcgcgaagccgatgaagtgatcgtcaagctgaatgataaacgtgaatttcaggccaagattgtgggggttgaccgccgcacggatgtcgcgctgcttaaaattgatgcgacagggctgccgaaggtcaccattggcaatcctgagcaactgaaggtaggggagtgggtggtggcaattggctccccgtttggactggaaagtacgttgaccgccggtgtggtcagtgcaaaaggccgtgccttgccacaggaaaattttgtgcctttcatccagaccgatgttgccattaaccctggcaattctggcggaccgttattcaacctcaagggtgaggtggtaggcattaactcccagatatacagccgaactggcggttatatggggttatcgttcgccattccgattgatgtggccatggatgttgccaatcagctcaagatttccggtcgcgtagcgcgtggctggcttgggatcggtattcaggaaatgaccaaggagctggctgagtcgtttggtatgaagaataccaaaggggctttggtcgccggcgtggaaaaaggcagtcctgctgaaaagggcggcctggagccaggtgatgtcgtaatcaagttcgatggcaaggatgtcaatgtttcttccgatttgccgcgtatcgttggttccaccaagcctggcaagaaggtgcaggtcgaagtcttgcgcaggggggctagcaagaccttgaatattacactgggtgaaatgccggccgacaaggatgaggttgtgccaactgcgcagcccgatgccaagccagagtccaatcgcctggggttgaccctacgcgagttgacgccacagcagcgtcgtagcctcaatggtcgcaatgcgctggtcgtggttgatgcgcaaggtgctgctgcacaggcaggcatccgcaggggagatctgatcctagccctgaacaatacggaggtgcaaagcctggagcagttcaccaagcaggtaaatgcggtgcctgcgggtaagacagtggcgttgctcgtgcagcgggaaaacaataccctgtacgtaccagtcaaggttggcaagtaa

SEQ ID NO: 7190 - protein, 477 aa, Methylobacillus flagellatus KT
MFKKLIAMSAICLFVGMAGATPVLAKELPDFTELAEKQGAAVVNISVTQVVQSGIGGSPFPGFPEDEALNEFFRRFGIPGFPGVPRGQGGPQQPEFKSQSLGSGFIISSDGYILTNAHVVREADEVIVKLNDKREFQAKIVGVDRRTDVALLKIDATGLPKVTIGNPEQLKVGEWVVAIGSPFGLESTLTAGVVSAKGRALPQENFVPFIQTDVAINPGNSGGPLFNLKGEVVGINSQIYSRTGGYMGLSFAIPIDVAMDVANQLKISGRVARGWLGIGIQEMTKELAESFGMKNTKGALVAGVEKGSPAEKGGLEPGDVVIKFDGKDVNVSSDLPRIVGSTKPGKKVQVEVLRRGASKTLNITLGEMPADKDEVVPTAQPDAKPESNRLGLTLRELTPQQRRSLNGRNALVVVDAQGAAAQAGIRRGDLILALNNTEVQSLEQFTKQVNAVPAGKTVALLVQRENNTLYVPVKVGK

SEQ ID NO: 7191 - DNA, 1398 bp, Silicibacter sp. TM1040
  CDS (1)..(1398): transl_table=11
atgatccgcagtctcgcccttcccctgacgattgccctcgcaactgctctgccgcttgcgtcaccagcagagaccaagatcccgcagagccagaccgagatctcgctgggctttgcccccttggtcaaagaggccgcgcccgctgtggtgaatatctatgccaagatcatccgtcaggaccgtgcgcgcagcccctttgccgatgatcctttctttgatgatttctttcgccagtttgcccagccgcgcccaagggtgcagaactcgctcggctctggtgtaatcctctccgaagatggcatcgtggtctccaactatcacgtcgtgggcgaggcgtcggatattcgcgtggtgaccaacgaccgccgtgaatatcaggccgaggtgatccttgcggatcaggcgtccgatctggcgatcctgcaactgcaagatgccgaagggctgccgcatctgggattgcgcaacagtgatgaggtcgaggtgggcgagctgaccctggccatcggcaacccgttcggggtcggtcagacggtgtcctccggcattatttccgggcttgcgcgcaccggtaccggcggcgggcagggctttggctattacatccagaccgatgcgccgatcaatcctggcaactctggtggggcgctgattgatgtgaatggcgatctcatcgggatcaacacgcggatcctcagccgttcgggtggctccaacgggattggctttgccattccggccaatctggtgcgtgaatttgtgcgacaggcgcgggccggtgcagaggagtttcaacgcccctgggcggggatgactggccagccggtggattccgatctggcagaagcgctgggccttggtcaggtggatgggatgttgatttcagagctccacccccagagcccctttgtcgaggcgggatttgaggttggcgatgtggtgctggccgtggatggcgagccggtgaactcgccctcggagatggcctttcgcttgtcggtggcggaactgggcggcaccagcgcggtgacgcgggtgcgtcagggcaagacggacactgttgaggtcgccttgatcgaagcgcctgacacccccgccgccgatccgatcacgctgagcgagcgcaccccgatgccgggtctggtggtgggacgggtgaacccgcaggtcatcaccaagatgcagctaccgctatcgaccgagggtgttgtggtgatggaccccggcccctatgccggacgcggcggcgtgcgcgcgggggatttgatttttgcgatcaacggcgaggcggttgaggcccccgaagatgtagcaaatctcctgatgagcagtgaccgctggatgcggatggacctgatgcgtcagggccagcgcgtgtctctgcggttccggctctga

SEQ ID NO: 7192 - protein, 465 aa, Silicibacter sp. TM1040
MIRSLALPLTIALATALPLASPAETKIPQSQTEISLGFAPLVKEAAPAVVNIYAKIIRQDRARSPFADDPFFDDFFRQFAQPRPRVQNSLGSGVILSEDGIVVSNYHVVGEASDIRVVTNDRREYQAEVILADQASDLAILQLQDAEGLPHLGLRNSDEVEVGELTLAIGNPFGVGQTVSSGIISGLARTGTGGGQGFGYYIQTDAPINPGNSGGALIDVNGDLIGINTRILSRSGGSNGIGFAIPANLVREFVRQARAGAEEFQRPWAGMTGQPVDSDLAEALGLGQVDGMLISELHPQSPFVEAGFEVGDVVLAVDGEPVNSPSEMAFRLSVAELGGTSAVTRVRQGKTDTVEVALIEAPDTPAADPITLSERTPMPGLVVGRVNPQVITKMQLPLSTEGVVVMDPGPYAGRGGVRAGDLIFAINGEAVEAPEDVANLLMSSDRWMRMDLMRQGQRVSLRFRL

SEQ ID NO: 7193 - DNA, 1503 bp, Myxococcus xanthus DK 1622
  CDS (1)..(1503): transl_table=11
atggcctgctcgctcccctcccgccgcttcctcagtgcgctggtccttcttcccgccgccacgcttggcgcttgtggccaagccattggcaccgcgtccgcggcatcgcccgctcccaccgcccaggtcgccgccgctgttccggcgcaggcggcgccgcccatccagaaggcgctcttcaatccggccgtggccggaagccagggcggcatcacctcgctggcgccgctggtggacgcggtgaagggcgcggtggtcaacgtggaggtgcgcgcacggccccgcaggtcagccgccatgcagcgcctgccacccggcatggcggagcgcttcggcctgccgcccgggttcggcggtgaaggcaacggcccggcgcgacagggcgcgggctccggcttcatcatcgacgcctcgggcatcgtcctcaccaacaaccacgtggtggaggacgccgaccaggtgcgcgtgaagctggatgacggacgtgccttcgacgcggaggtgatgggccgcgacccgctcaccgacgtggccctgctgaagctgaagggggcgccgggcaacctgccggcggtgccgctgggggactcggacgcgctgcgcgtgggcgacgccgtcatggccattggcaatcccttcggcctggcgtccagcgtgagcgcgggcatcctctccgcgcgggcccgcgacatccaggcgggcccctatgacgaattcctccagacggacgccgccatcaaccccggcaactccggcgggccgctcttcaacatgcagggcgaggtggtgggcatgaacaccgccatcgtcggcggcgccacgggcatcggcttcgcggtgcccagcaagctcatccaggcgctgctgccgcagctcaaggagacgggcgtggtgcgtcgcggctggctgggcctggccgtacaggacctcacgccggacctggcgcgggcgctgggcctggaagcgatgaagggcgcggtggtggcgggcgtcaaccgcggcagcccgggtgagcgcgccggcctgcgcgaggaggacgtcatcacctccgtcaacggcaagccggtggagtccgcgggcggactgacgcgcgccgtggccctgctccagcccgacagccgcgtgaaggtgaacctgctgcgcggtggcaaggcgcagtcgctggacgtcaccctgggcacgcggcccgcgcagaatggcgagcaagaggtacttccgcgcaacgcttccgcttccgcgccgaggcggctgggcgtgcaactgtcggacgcgcgggacggcggcgcgcaggtagtcgccgtggagccgggcagccccgccgagcgcgggggactggtgccaggcatggtgctggtccaggtgggcgaccagaaaatcgccagcgtgtcggacgccgcccaggcgctgacggccgcgaagcccggcgccgcactgctcctgcgcgtgcgcatgccggggtcggagtccacgctgctgcgcgcggtggaagtcccggagcgctga

SEQ ID NO: 7194 - protein, 500 aa, Myxococcus xanthus DK 1622
MACSLPSRRFLSALVLLPAATLGACGQAIGTASAASPAPTAQVAAAVPAQAAPPIQKALFNPAVAGSQGGITSLAPLVDAVKGAVVNVEVRARPRRSAAMQRLPPGMAERFGLPPGFGGEGNGPARQGAGSGFIIDASGIVLTNNHVVEDADQVRVKLDDGRAFDAEVMGRDPLTDVALLKLKGAPGNLPAVPLGDSDALRVGDAVMAIGNPFGLASSVSAGILSARARDIQAGPYDEFLQTDAAINPGNSGGPLFNMQGEVVGMNTAIVGGATGIGFAVPSKLIQALLPQLKETGVVRRGWLGLAVQDLTPDLARALGLEAMKGAVVAGVNRGSPGERAGLREEDVITSVNGKPVESAGGLTRAVALLQPDSRVKVNLLRGGKAQSLDVTLGTRPAQNGEQEVLPRNASASAPRRLGVQLSDARDGGAQVVAVEPGSPAERGGLVPGMVLVQVGDQKIASVSDAAQALTAAKPGAALLLRVRMPGSESTLLRAVEVPER

SEQ ID NO: 7195 - DNA, 1482 bp, Myxococcus xanthus DK 1622
  CDS (1)..(1482): transl_table=11
atgaaccgttcgaccgtctcgttccggaaggcgctcgtcgccgcgctcctggtcgcgttgccccccgctgctgctgtctcgcaggcgccaaagtcgccgcccgcggccacccagccgggcgccgggaacgtcctccagcccgcgacacgggaggcccaggcgcttccgtcgctggcgccgctggtggagtcggtgaagtcggcggtggtcaacgtggacgtgcaggctcgagggggcggcgttccgcgtgggatggaggacaacccgctcttcgagcgcttcttcggtggaggccgcgagggcggcaggccgcgccgcgagccgctgcgccaaggggcagggtccggcttcatcatcgacccgaagggcgtcgtcctcaccaacaaccacgtggtggaggatgccgtcagcatcaccatccgcctggatgacggacgcagcttcagcggcgaagtggtggggcgtgatccgctcacggacgtggcgctcgtgcggctcaaggagaaggtggagaacctgcccaccgtgaagctgggcgactcggatgcattgcgcgtgggggactgggtggtggccattggcaaccccttcggtctggcctccagcgtcagcctgggcatcgtctccgcgagggcgcgtgagattggcgccagccagtacgacgagttccttcagacggacgcggccatcaacccgggcaactcgggcggcccgctcttcaacatgaagggcgaagtggtgggcatcaacaccgccatcgtcggcggtggctccggcatcggcttcgcggtgcccagcaatctcatcggttcactgctgccgcagttggagaaggaaggctccgtcacgcgcgcatggctgggcgtgggcatccaggacttgacgcgggacctggccagcgcgctcaagctccccgtgaatcaaggcgccatcctcacgcaggtgatgccgtcgtctcccgcggcgaaggcgggcctgaagcaggatgacgtcgtcatcgccatcgacggccggaccgtcacctccagcggcgagctgacgcgcaccgtggcgctcaagcgtcccggaagcacctccacgttgacgctctaccgcgacggcaagaagcaggacgtgaaggtgacgctcggtacgcggccagacctggagggcgtggcctcggggaagcagcggccggaggaccagcaggagagctcccggcgcgtgggcgtcagcctccagaacctggatgcgcgcaccgcgcagcaggccggcttcacggacagcagcggcgcgctcatcaccgacgtggtgcccggctcgccagcggaccgcgcgcagttggagcccggcatggtcgtcatcgaggccaaccgcaagaaggtggagaacgcggacgccctggcccgcatcatcaagggcgccgagtccgggagcaccttgctgctgcgcgtgacggcgccgggcggggctcgcaacctgcgcgccctgcgggtgccgtga

SEQ ID NO: 7196 - protein, 493 aa, Myxococcus xanthus DK 1622
MNRSTVSFRKALVAALLVALPPAAAVSQAPKSPPAATQPGAGNVLQPATREAQALPSLAPLVESVKSAVVNVDVQARGGGVPRGMEDNPLFERFFGGGREGGRPRREPLRQGAGSGFIIDPKGVVLTNNHVVEDAVSITIRLDDGRSFSGEVVGRDPLTDVALVRLKEKVENLPTVKLGDSDALRVGDWVVAIGNPFGLASSVSLGIVSARAREIGASQYDEFLQTDAAINPGNSGGPLFNMKGEVVGINTAIVGGGSGIGFAVPSNLIGSLLPQLEKEGSVTRAWLGVGIQDLTRDLASALKLPVNQGAILTQVMPSSPAAKAGLKQDDVVIAIDGRTVTSSGELTRTVALKRPGSTSTLTLYRDGKKQDVKVTLGTRPDLEGVASGKQRPEDQQESSRRVGVSLQNLDARTAQQAGFTDSSGALITDVVPGSPADRAQLEPGMVVIEANRKKVENADALARIIKGAESGSTLLLRVTAPGGARNLRALRVP

SEQ ID NO: 7197 - DNA, 1452 bp, Cytophaga hutchinsonii ATCC 33406
  CDS (1)..(1452): transl_table=11
atgttagcggtagtgtcttctatctttggaggcattgtagctttagtcggctaccagtattttgtcaaaaagaatgaatttacgtccattgaatcgatgcagcgcgcatcctttgcaaatttttcagatacatctgctatcgcagtgcctgcgggtctcaattttattcatgccgcagaattgactacaccggcagtagtgcatataaaaacaacgtatatgcctgaaactacacgccctaaaacgcgtgatgaagaattgttccggtacttctatggtgatccgtatgaaaattacaaccagccgcgcgaagcttccggctccggcgttattgttaccggcggcggatatatcgtaacaaataatcacgtggttgataaagcatctaagattcaggttgtattaaatgacaaaagaacctacgatgcaaaactgatcggaacagatccgacaacggatctggcattgattaaaattgaaggtgaaaatcttccgtttgtagtgtatggcaactcggatcaggtgcgtatcggtgagtgggtactggctgtaggaaatccgtttaacttaacgtctacggttaccgcaggtattatcagcgctaaaacaagaagcatcaatatcctgagagataaagataacatggcgattgaatcttttctgcagacagatgcggtagtaaacccgggcaatagcggtggtgcattggtaaacttaagaggagaactgattggtatcaatacggctattgcaagtcctacgggagcatatgcaggttattcgtttgctgtaccggtatctcttgttaaaaaagtgattgatgacatcatgaactatggccaggtgcaacgtggtttattaggtgtggtgattcaggatatgacgcctgctttagcaaaggaaaaaacaatcgattttatttcaggagtttatgtgagtgccgttaatcagggaagtgcagcagacctgggaggtattaaagaaggcgatattgtaacaaagatcaatgacatcaacatcggcgcaacaacacaattgcaggaagtagtggcgcgctacagacccggcgacaaattgaaagttaagtatgtgcgcaaaggaaaagaacttgaaacttcggttaccttaaaaaataaattaggcgatatggccattgttgctaaagacgacaactctgttaaaacgaagcttggcgcagacttacagccggtatcgggtggtgaaatgagtgtgctggaaatttccggcggtgcaaaggttgcaaaattatttagcggtaaattaaaagaagcaggcgtaagagaaggatttattattacttccatcgataaaaaacctgtcagctcgccggaagatgttgtccgcattcttgaatctactaccaatggcggtatcttgatggaaggtatttatccgaatggaaaaaaagaattctacggcattggttggtaa

SEQ ID NO: 7198 - protein, 483 aa, Cytophaga hutchinsonii ATCC 33406
MLAVVSSIFGGIVALVGYQYFVKKNEFTSIESMQRASFANFSDTSAIAVPAGLNFIHAAELTTPAVVHIKTTYMPETTRPKTRDEELFRYFYGDPYENYNQPREASGSGVIVTGGGYIVTNNHVVDKASKIQVVLNDKRTYDAKLIGTDPTTDLALIKIEGENLPFVVYGNSDQVRIGEWVLAVGNPFNLTSTVTAGIISAKTRSINILRDKDNMAIESFLQTDAVVNPGNSGGALVNLRGELIGINTAIASPTGAYAGYSFAVPVSLVKKVIDDIMNYGQVQRGLLGVVIQDMTPALAKEKTIDFISGVYVSAVNQGSAADLGGIKEGDIVTKINDINIGATTQLQEVVARYRPGDKLKVKYVRKGKELETSVTLKNKLGDMAIVAKDDNSVKTKLGADLQPVSGGEMSVLEISGGAKVAKLFSGKLKEAGVREGFIITSIDKKPVSSPEDVVRILESTTNGGILMEGIYPNGKKEFYGIGW

SEQ ID NO: 7199 - DNA, 1389 bp, Haemophilus somnus 129PT
  CDS (1)..(1389): transl_table=11
gtgaaaaaatctagctttgttttaaccggtattgctttagggttaagtgttctaacaacatcaattaatgttcaagcaagtttgcctatggcagttgatggacaatctcttccaagcttagcaccaatgttacaaaaagttttacccgcagtagtttctattgcggtagaagggaaacaaaaaaatgatttttctttcaataatgaaattcccgaagagtttcgccgtttttttggtgacagctttggttttgaaggatttagcagtcgtgcaccgcgtagttttcgtggtattggatccggagtgattattgatgcagaaaaaggttatgtattgacaaataatcacgtgattgatcaggctgataaaatcacggtcaaattagaagatgggcgtgaatttaaggcaaaggttcttggcaaggatgatatgtcggatattgcacttattcaattagaaaatcctaaaaatctgaccgcagttaagatcgctgattctgataaattaagagtcggggattttacagttgctatcggtaatccattcggtttggggcaaaccgcaacatcgggaattgtttcggcattagggcgttcaacaggatttgatagcggagcttatgagaactatattcaaactgatgctgccgtaaatagaggtaattccggaggaccattagtaaatttaaatggtgagcttatagggattaatactgctattatttctccaagtggcggaaatgcgggaattgcatttgcgattccaagtaatatggcaatcagtttagttaagcaaattattgaatttggcgaagttcgtcgaggattactcggtattaaaggaggtgaattgaatgccaacttagcaaaagaattcaatattgatgtacaacaaggtgcgtttgtgagtgaagtattgccaaattcagcggcagaaaaagccggacttcaagcgggtgatgtgattacggcaattgatggacaaaaactggcaagttttgcggagttgcgtgcaaaaattgcaacaagtggtgccggtaaagaaattaaattgacctatttacgtgacggtaaatcgaaaactgcgaaagtgaaattgcaatctgatgatggagatacaatttctgcagttggcaacatttctatattagaaggtgcggaattaagtaattataatcaaaaaggcacaaaaggcgttgaaattaaagaagttaaatcaagatctcttgctgctcaatatggtttagaaaaaggcgatattattattggagtgaaccgccataaagtagaaaatttatctgatttacgtaaaattttaggcaaaaaaccttcagctattgccttgaacattttacgagataacagtcgtttttatttattaatccaataa

SEQ ID NO: 7200 - protein, 462 aa, Haemophilus somnus 129PT
MKKSSFVLTGIALGLSVLTTSINVQASLPMAVDGQSLPSLAPMLQKVLPAVVSIAVEGKQKNDFSFNNEIPEEFRRFFGDSFGFEGFSSRAPRSFRGIGSGVIIDAEKGYVLTNNHVIDQADKITVKLEDGREFKAKVLGKDDMSDIALIQLENPKNLTAVKIADSDKLRVGDFTVAIGNPFGLGQTATSGIVSALGRSTGFDSGAYENYIQTDAAVNRGNSGGPLVNLNGELIGINTAIISPSGGNAGIAFAIPSNMAISLVKQIIEFGEVRRGLLGIKGGELNANLAKEFNIDVQQGAFVSEVLPNSAAEKAGLQAGDVITAIDGQKLASFAELRAKIATSGAGKEIKLTYLRDGKSKTAKVKLQSDDGDTISAVGNISILEGAELSNYNQKGTKGVEIKEVKSRSLAAQYGLEKGDIIIGVNRHKVENLSDLRKILGKKPSAIALNILRDNSRFYLLIQ

SEQ ID NO: 7201 - DNA, 1353 bp, Shewanella sp. MR-7
  CDS (1)..(1353): transl_table=11
atgaaaacgaaactatctgtactttcagccgcaatgttagccgcaactctgacaatgatgcccgctgcctcacaggccgctattccgcaatctgttgagggtcaatccattccaagtcttgcgcctatgttagagcgcacgacgcccgccgtggtttcagtggcggtatctggcacgcacgtatccaaacaacgtgtacccgatgtgttccgttatttcttcggccccaatgcaccacaggaacaagtgcaagagcgtccttttagaggtttaggctcaggcgtgattatcgacgcggataaaggctatatcgtcaccaacaaccatgtgatcgacggtgccgatgatatccaggtcggtctgcacgatggccgtgaagtcaaagccaagctgattggtaccgactcagagtccgacattgccttgctgcaaatcgaagcgaaaaatctagtcgcaatcaaaacctcagattctgatgaactgcgcgtgggtgactttgccgtcgccattggtaacccctttggtttaggtcaaaccgtcacatcagggatcgtcagcgccctaggccgtagcggtttaggcattgaaatgcttgaaaactttatccaaaccgacgcagcgattaacagcggcaactcgggtggtgcgctagtaaacctgaaaggtgagctgatcggtattaacaccgccatcgtagcgcctggcggtggtaacgtgggtatcggttttgcgatccccgccaatatggtgaaaaacctcgtggcacaaattgccgagcacggtgaagttcgccgtggcgtactggggatttcgggccgcgacctagatagccaactcgcccaaggttttggtttagatacccagcacggtgggtttgtgaatgaagttaccgcgggcagcgcagctgaaaaagccggcatcaaggcgggtgatattatcgtcagtgtcgatggccgtgcgattaaatcgttccaagagctgcgtgcgaaagtcgcgactatgggcgctggtgctaaggttgaactgggacttatccgcgatggcgataagaaaaccgtgaatgtcaccttaggtgaagcaagccaaaccactgaaaaagctgcaggtgctgtgcaccccatgttacaaggtgcctcgctagaaaacgcttcgaaaggggtggaaattactgaggtggcccaaggctcgcctgcggcaatgagtggcttacaaaaaggcgatgtgattgtcggtattaaccgttcggcggtgaaagatctgaaatcactcaaggagcagctcaaagatcaagaaggcgctgtcgccctgaagatcctccgtggtaagagcttgttgtacttagtgctgcgttaa

SEQ ID NO: 7202 - protein, 450 aa, Shewanella sp. MR-7
MKTKLSVLSAAMLAATLTMMPAASQAAIPQSVEGQSIPSLAPMLERTTPAVVSVAVSGTHVSKQRVPDVFRYFFGPNAPQEQVQERPFRGLGSGVIIDADKGYIVTNNHVIDGADDIQVGLHDGREVKAKLIGTDSESDIALLQIEAKNLVAIKTSDSDELRVGDFAVAIGNPFGLGQTVTSGIVSALGRSGLGIEMLENFIQTDAAINSGNSGGALVNLKGELIGINTAIVAPGGGNVGIGFAIPANMVKNLVAQIAEHGEVRRGVLGISGRDLDSQLAQGFGLDTQHGGFVNEVTAGSAAEKAGIKAGDIIVSVDGRAIKSFQELRAKVATMGAGAKVELGLIRDGDKKTVNVTLGEASQTTEKAAGAVHPMLQGASLENASKGVEITEVAQGSPAAMSGLQKGDVIVGINRSAVKDLKSLKEQLKDQEGAVALKILRGKSLLYLVLR

SEQ ID NO: 7203 - DNA, 1452 bp, Hyphomonas neptunium ATCC 15444
  CDS (1)..(1452): transl_table=11
atgaaccggaccgccgttgcggtattcgccctgatggcatgtatggcccccacagcgctcgcacaggcgggtggaagcctgtcgcgtcccggagcgccggtagatgcgaagaccgcgccgcaaagcttcagtgcgctctccaaacgtctcatgccggccgtggtgaacatctccacgtcacaggttgtggccagccgcctgccaacctttccggaaggctcgcccgcagaacgcttcaacgaatactttggccgcaatgatgacggcttccagcggcagggctcgctgggttccggcttcgtcatcagcgccgacggctacatcgtcaccaacaatcacgtcatcgaaaaggctgacacgatcgaggtcaccttctccgatggccgcacgatggacgccaagattatcggccgcgaccgggattccgacattgccgtcctgaaagtcaccgcgcggggcgcgctgccttttgtggaccttgccgacagcgaccgggcagaagtcggtgactgggtgatcgcgatcggtaacccgctgggctttggcggctcggtatctgccgggatcatctcggccacgggccgcgacctcaacactgggcggtctgacaatttcatccagaccgatgcggccatcaaccagggtaactccggtggtccgctgttcaatctgaatggccaggtcgttggcgtgaacacggcgatcatttcccagtcgggcgggtccattggcctgggcttttcggtgccttccaacacggtgaagcgcatctcggcgcagctcatcaaggatggccgggtgaaccggccctggctgggcgtaaatgtgcaggatgcggacgagtccctgatcaaggcctataaggccaaaggttcggcgggcaccatcgtgacccgcgtgacggatgcgagcccggcagcgaaagccaagctcgaagtcggcgatctgatcctctccatcgatgggcgcgccgtggcgggggtgcgtgacatgacgcgccagctttccgaaaagcccatcggtaaggcgatcacgctgagcatcgtcagggatggccgcgcgcgggatgtcgccgtcacgctgggcgaactgcccgatgaggacgaacccgcgacagcggcgccatccgaagccgtcggcatgtcgaacgatctgggcgcagacctcgtggcactcgacgatgacgttcgccgccgcttcggcgcgccgcgggatatgaacggcgtggcggttacgggtgtcagcacgcgcgggcgggcctacaacaagctgcgcaagggcgatgtgatcgtggaggtgaacttccagtccgtcagcgccgtggccgatgtcatcaagcgtcttgataccgcgatgcagacgccaaatcagcccatcctgatccgcgtcaaacggcggggagagacgggaggctggttcgaccagttcgtatcggtcgacatcaagaagtag

SEQ ID NO: 7204 - protein, 483 aa, Hyphomonas neptunium ATCC 15444
MNRTAVAVFALMACMAPTALAQAGGSLSRPGAPVDAKTAPQSFSALSKRLMPAVVNISTSQVVASRLPTFPEGSPAERFNEYFGRNDDGFQRQGSLGSGFVISADGYIVTNNHVIEKADTIEVTFSDGRTMDAKIIGRDRDSDIAVLKVTARGALPFVDLADSDRAEVGDWVIAIGNPLGFGGSVSAGIISATGRDLNTGRSDNFIQTDAAINQGNSGGPLFNLNGQVVGVNTAIISQSGGSIGLGFSVPSNTVKRISAQLIKDGRVNRPWLGVNVQDADESLIKAYKAKGSAGTIVTRVTDASPAAKAKLEVGDLILSIDGRAVAGVRDMTRQLSEKPIGKAITLSIVRDGRARDVAVTLGELPDEDEPATAAPSEAVGMSNDLGADLVALDDDVRRRFGAPRDMNGVAVTGVSTRGRAYNKLRKGDVIVEVNFQSVSAVADVIKRLDTAMQTPNQPILIRVKRRGETGGWFDQFVSVDIKK

SEQ ID NO: 7205 - DNA, 1356 bp, Rhizobium leguminosarum bv. viciae 3841
  CDS (1)..(1356): transl_table=11
atgtcgcgttcgttgctagccttggtggcgctcttcatcgcaggtgagagcctgttgtcggctccagccgtagcaaacagcctgtcgctcgcgccgatgctccagagggtcgtgccgagcgtcgtcagcatctcggtgcagggcaaggaactcgacgacgcggatgcgacgctcgccgatcccttctacagaaagtttttcggactccctgacgacgccgcgccggcagagcacggcttccaatcagccggctcgggtgtcgtcatcgacgaggtccacggctacatcgtcaccaaccagcatgtcatagcaagcgcctcaaaaatcgaggtggtgctttccgatggccgacgcttcaaagcgaaactcgtcggcgccgatcccgagacggatgtcgctgtcgttcaaattccgcccgatcatcttgttcaggccgattttggaagcgcgtcctccctgcatgtcggcgacgtcgtcgtggcgatcgggaatcccttcgggctgggccagactgcgacgatgggcatcgtcagcgcgcttggacgccgcgccgtaggatcggagggttacgaagggttcattcagacggatgcttcgaccaatcccggcaactcgggcggcgcacttgtaaacgagaacggtgtcgtcgtcgggatcaacagcgcgatcatcggccccgccggcggaagcatcggcattggttttgcagtgcccgccgagactgtcggtatcgtgatgcggcagctcatcctaaccggcaagatggtacgcggcgaggtcggagttgtcactcaggacctgacgcccggtcttgcaagggcgttcggcgtcaatgaagggccgggggcgctcatcagcgaagtccggcccggttcgccggcggcgaatgcaggaattcagccgggcgacgtcatccgaatggtcgacggaaggacggtgcgcggcgcgtccgacgtacgcaggcttgtgggatcgctaccattgcagtccaggccgtccttccagatcgatcgcgccagccgaaggatagaggcgtttcccgcggtgtccgccgcaccggtcgccgaaccggccgctccccgcaccatccatatcgctcgcggccctctcgctgacgtcgagatggcgaactcccccgacggtctcggcgcgcgcgtcgtcgtcgtcgccgagggttcggtcgcggcacaggccggtctgcaactggacgacgttatcgtcgctctcgaccagcagccggtgacggacgtcgggcaagtgcttgcaattctcatgaaggagcatgcccgcgctctcgtcaccgtcgtgaggaacggccatcgcctcttcgtggccgccgacgtgcagacccagtag

SEQ ID NO: 7206 - protein, 451 aa, Rhizobium leguminosarum bv. viciae 3841
MSRSLLALVALFIAGESLLSAPAVANSLSLAPMLQRVVPSVVSISVQGKELDDADATLADPFYRKFFGLPDDAAPAEHGFQSAGSGVVIDEVHGYIVTNQHVIASASKIEVVLSDGRRFKAKLVGADPETDVAVVQIPPDHLVQADFGSASSLHVGDVVVAIGNPFGLGQTATMGIVSALGRRAVGSEGYEGFIQTDASTNPGNSGGALVNENGVVVGINSAIIGPAGGSIGIGFAVPAETVGIVMRQLILTGKMVRGEVGVVTQDLTPGLARAFGVNEGPGALISEVRPGSPAANAGIQPGDVIRMVDGRTVRGASDVRRLVGSLPLQSRPSFQIDRASRRIEAFPAVSAAPVAEPAAPRTIHIARGPLADVEMANSPDGLGARVVVVAEGSVAAQAGLQLDDVIVALDQQPVTDVGQVLAILMKEHARALVTVVRNGHRLFVAADVQTQ

SEQ ID NO: 7207 - DNA, 1446 bp, Solibacter usitatus Ellin6076
  CDS (1)..(1446): transl_table=11
atggttcgaacctgcctggtaattgttgcctgttttttcctcgcctcgtgccacagcccgcaggcggtcagtgcgaacaacgaaaaacgccagctacccgcggcaaatacgggcgagaatcttccgattctctcctactccccggtggtggaccacgtggcgcccgccgttgtcaccatccgtgcctcgcaccgcgtgcgcgccccgcggcagttccctttctccgacaccccgctcttccgcgagttcttcggcggcggatcgcccgtcccgcgcgatcgcccggaagtggagtcggcgctcggctccggtgtcatcgtccggtccgatggacatatcctcaccaaccaccacgtgatcgatggcgcggaagatatcaaggttgatctcagtacccgccgcacttactccgccaaggtcgtcggcagcgattctcctagtgacatcgcggtactcaagatcagcggaggagaccttccggtcctccagcttggcgattcggaccgtgtgcgcgtgggggacgtctgtctcgccgtcggcaatcctttggcggtcggtgaatccgtcaccgccggtatcatcagcgccaagggacgctccaccgacagtgtcggcggcggcagctttcaggatttcctccagacggatgcgcccattaaccagggcaactccggaggagcgctggtcaatacccgcggcgaactgatcgggatcaattcgcagatcctctcctctaacggcggcaatgtcggcatcggcttcgcgattccttccaacatggccaagagcgtgatggatcagttgatcgggaagggaagcgtgcagcgaggtatgctcggcgttagcatccagcctgtcaccagcgacatcgcttccagcctcggcctgaaggatgtgcgcggcatcctcatcaattccgtgactcccgccggcccggccgaaaaagccggtctccagcgcggtgacgtgattctgcaggtcgatggcaaggacgtgaacgagcccaaccagctgcgcaatgagatcgccgcgcgcgccccgggtgcggagatcaacctcaccattcagcgcgacgggaaacaacagcaggtccgcaccaaactgggcactctcactccgcagactgccgccgcggacgcgccgggaggcggatcgggtggaggcggcaaactgggtattggcgtagtgcccctcactcccgaccttgccgcgcagcttggcctgcgccgcggagcgcaggggctggccgtccagtcgatcgaccccgaaggtcccgccgcacaggccggcctgcgcgaaggcgacgtcattcaggaggtgaaccgccagcccgtccacaccatcgacgagctgcgcagcgccctccagaaatccggcgaccgcgcacccttactgctgattaaccgcgaaggtcaatccgcctacgtgccagtgccattgaagtga

SEQ ID NO: 7208 - protein, 481 aa, Solibacter usitatus Ellin6076
MVRTCLVIVACFFLASCHSPQAVSANNEKRQLPAANTGENLPILSYSPVVDHVAPAVVTIRASHRVRAPRQFPFSDTPLFREFFGGGSPVPRDRPEVESALGSGVIVRSDGHILTNHHVIDGAEDIKVDLSTRRTYSAKVVGSDSPSDIAVLKISGGDLPVLQLGDSDRVRVGDVCLAVGNPLAVGESVTAGIISAKGRSTDSVGGGSFQDFLQTDAPINQGNSGGALVNTRGELIGINSQILSSNGGNVGIGFAIPSNMAKSVMDQLIGKGSVQRGMLGVSIQPVTSDIASSLGLKDVRGILINSVTPAGPAEKAGLQRGDVILQVDGKDVNEPNQLRNEIAARAPGAEINLTIQRDGKQQQVRTKLGTLTPQTAAADAPGGGSGGGGKLGIGVVPLTPDLAAQLGLRRGAQGLAVQSIDPEGPAAQAGLREGDVIQEVNRQPVHTIDELRSALQKSGDRAPLLLINREGQSAYVPVPLK

SEQ ID NO: 7209 - DNA, 1479 bp, Solibacter usitatus Ellin6076
  CDS (1)..(1479): transl_table=11
atgtcaacgcgaactatgttgatcgctccggccgtggtgctggtcgcgcttgccgcctgcggcaggcaaacctcaagcagcagcaagaattctgcgaatcgcgaggagacaagctcctccgcgattgtcagcaggcccggccccccgctctcctatgctgacgtcgtggatcacgcctcgcccgcggtagtaacgatccgctcggaacgccgtgtgcgcgctccggagcaatttccgttcgcggaagatccgtcgtttcgccagttcttcggcaacccgttgccggggcgcggcgggcaatccgcgcccagccaggtggaacacgccctcggctccggggtaattgttcgcgctgacgggcacatcctgacaaaccatcacgtggtcgatggcgccgaagatattaaagtcgatctcaacgaccaccgtacgttgtccgcgaaagtggtaggcgtggatccgccgagcgatctggcggtcctgaagatcgacgcccaggatctgcccgtgctggccctggccgattccgatcgcgtgcgtgtcggagatatttgcctcgccgtcggaaaccccctcggcgtggggcagaccgtcaccgccggcatcatcagcgccagaagccgcagcacggatctaagtacgggaagtttcgaagacttcctgcagaccgacgccccaatcaatcagggcaactcgggcggagcgctgatcaataccaacgcggcgctaatcggcatcaactcgcagattctctcgccgaccggaggcaacatcggaatcggcttcgccattccgtctaatctggcgaagaacgtcatggatcagctgatcaccacgggcaaggtccaccgcggccagctcggcgtaggtgtgcaacccctcacatccgatctcgcatccggcctcggcctgaaggaagttcgcggtgtgctggtcaacctggtcaagcctggaagccccgcggaccgtgcaggaattcgcaatggcgacgtgatcacggctatcgatggacaccctgtggacgaacccaacgcactgaggaatcgagttgccaccaccgcaccggattcccaggcgaagctctcctttattcgcgatggcaaggaacagcaggtaacggtcaaactcggcgagctgacggcggaatcggcagcgatggagcggcctaacggcatgcccggcaacgctcccaccgatcggcgcctcggcgtaagcgttgagcccttgtctcctgccctcgcgcaggagctcggcgtgcgccgggatatgcagggactggcggtgcgcgacgtccagcccgatgggccggccgcgcgggccggcgtgcaacccggcgacgtgatcatcgcgttaaaccggcaggccgtgcggtccgcggccgatgtcgcggcagcgctcaggagtgcgtcctccaggccgagcctgttactgattaatcgagccggacagaatgtgtttctaaccgtgagtccgcagtag

SEQ ID NO: 7210 - protein, 492 aa, Solibacter usitatus Ellin6076
MSTRTMLIAPAVVLVALAACGRQTSSSSKNSANREETSSSAIVSRPGPPLSYADVVDHASPAVVTIRSERRVRAPEQFPFAEDPSFRQFFGNPLPGRGGQSAPSQVEHALGSGVIVRADGHILTNHHVVDGAEDIKVDLNDHRTLSAKVVGVDPPSDLAVLKIDAQDLPVLALADSDRVRVGDICLAVGNPLGVGQTVTAGIISARSRSTDLSTGSFEDFLQTDAPINQGNSGGALINTNAALIGINSQILSPTGGNIGIGFAIPSNLAKNVMDQLITTGKVHRGQLGVGVQPLTSDLASGLGLKEVRGVLVNLVKPGSPADRAGIRNGDVITAIDGHPVDEPNALRNRVATTAPDSQAKLSFIRDGKEQQVTVKLGELTAESAAMERPNGMPGNAPTDRRLGVSVEPLSPALAQELGVRRDMQGLAVRDVQPDGPAARAGVQPGDVIIALNRQAVRSAADVAAALRSASSRPSLLLINRAGQNVFLTVSPQ

SEQ ID NO: 7211 - DNA, 1374 bp, Magnetococcus sp. MC-1
  CDS (1)..(1374): transl_table=11
atgctgggacagaagcaaaaatggcgggtggttgggggcgtattggttgggttggcgctgctgttgggcagtgctcccctgcatgcgggtgcttggccggtggcggtggagggcgacaaactgcccaccctggccgatatgctggagcggaccacgccgggggtggtgaacattgccaccagcggttcggtagaggtggcggagacgcccctgttgaacgatcccttttttcggcatttttttgatatacctaccatgcgtcgggcgaaaaagatccgctcgttgggctcgggggtggtggtggatgccgcgcatggttacatcctgaccaaccatcatgtgatcgacaaggcacaggtaattaccgtgaccttgcatgatgggcgggccttgaaagcggtgcaagtgggggcagatcccgagaccgatgtggcggtgattaaggtagaggcgaaggatctgcatgccctgcccttaggcaattcagatatcctgcgggttggggattttgtggtggccattggtaacccctttggtctggggcagacggtgacctcgggcattgtgagtgcgctggggcgtagtggtttaggcattaaggggtatgaggatttcattcagaccgatgcttcgattaatccgggtaactcggggggggccttggtcaacttgcgtggggagttggtggggattaacaccgccattttggccaagggcggtggtaatgtgggcattggttttgctatccccgccaacatgaccaagcagttgatggcccaattgattgagtatggcgaggtgcgccgtgggctcctgggtatctccagccaggatctcaccccggagttgaaccaggcctttgggctggagcatcaacatggcagtgtggtaacccgtgtcacccgtggttcagcggcccaaaaggcgggtttacaagcaggggatattattaccgaggtcaatggtgtggcggtgcgcaatgcagcccatatgcgcaatttagtggggctgctgcgggtgggggaggcggtgcagttaacccgtctgcgggatggtcatagccgcacggtcaaagcggtggttgaggcttctaaacgggagcagattgagggcagccggttaagcccccgccttgagggcgctgtgttggaaaaagaggagcaggatgaaaaacccggcgtggtggtgcgcaaggtggtccggggcagcatggccgcccgcatggggctgcaagagggggatcgtctccttgaagtcaaccagcaatcggtgaaaaatttggccgatatggggaaagcgctagctgtggatgggcggcagatgctgctcaccttggagcggggtgagcgtcggatacgggtgatggtacgctga

SEQ ID NO: 7212 - protein, 457 aa, Magnetococcus sp. MC-1
MLGQKQKWRVVGGVLVGLALLLGSAPLHAGAWPVAVEGDKLPTLADMLERTTPGVVNIATSGSVEVAETPLLNDPFFRHFFDIPTMRRAKKIRSLGSGVVVDAAHGYILTNHHVIDKAQVITVTLHDGRALKAVQVGADPETDVAVIKVEAKDLHALPLGNSDILRVGDFVVAIGNPFGLGQTVTSGIVSALGRSGLGIKGYEDFIQTDASINPGNSGGALVNLRGELVGINTAILAKGGGNVGIGFAIPANMTKQLMAQLIEYGEVRRGLLGISSQDLTPELNQAFGLEHQHGSVVTRVTRGSAAQKAGLQAGDIITEVNGVAVRNAAHMRNLVGLLRVGEAVQLTRLRDGHSRTVKAVVEASKREQIEGSRLSPRLEGAVLEKEEQDEKPGVVVRKVVRGSMAARMGLQEGDRLLEVNQQSVKNLADMGKALAVDGRQMLLTLERGERRIRVMVR

SEQ ID NO: 7213 - DNA, 1434 bp, Azoarcus sp. BH72
  CDS (1)..(1434): transl_table=11
atgcaacaccccctgcgcgccaccaccaccgcctctgccctgatcctcgccctcgccggcgccttcggcaccgacgcgctggcgcaggcgcctgctccacgcggattgcccgccggcagcatcgtgctgccgagcttcgacaccatcatccagcgcgtcggccccgcggtcgtcaacatcagcaccgaaggcccggtgcgcaccggcgggccgtccggcggcctcagcccggatgatccgttctccgaattcttccgtcgcttcggcccgccgctcggcccccagttcggcaacccgccggggcagggcccggtacgcggccaggggtccggcttcatcgtcagcgccgacggtatcgtactgaccaacgcacacgtggtcgacggcgctagcgaagtcaccgtgaagctgaccgacaagcgcgagttcaaggccaaggtgctcggcgtcgacaaaccgaccgacgtcgcggtgctgcgcatcgacgccaagaacctgcccacggtgccgctgggcgatccgcagaaagcgcacgtgggcgactgggtgctcgcgatcggcgcgcccttcggcttcgaaaactccgttacggccggcatcatctcggccaagtcgcgctcgctgcccaatgaaggctacgtgcccttcatccagaccgacgtcgcgatcaacccaggcaactcgggtggcccgctgctcaatcttgccggcgaagtggtgggcatcaactcacagatctactcgcgctcgggtggctaccagggcctttcgttcgcgattccgatcgacgtcgcggccggcgtgcgcgaccagatcgtggcccacggcaaggtcacgcgcggccgcatcggcgttgccgtacaggacgtcaatcaggcgttggcggaatccttcggcctcaagagcgccggcggcgcgctgatcagctcggtcgaacccggcgcgccgggcgacaaggccgggttgaaggtcggcgacgtcatcatcgaactgaacggcgagaagatcgtcaactcggctgacctgccgccgcgcgtggcagcggtacgccccggcaacacggtgcgcatgaaggtctggcgcaagggcgaaagccgcgacctggaggtgaaggtcggcgagttcccggacgacagccaggtggcaagcagcaccggcaaggccgaccagggtcgcctcgggctggcggtgcgcgcgttgtcgggcgaggagcggcgccaggcgggcttgccgggcgggctggtcgtgaccgaggtggcagggcccgcggcccgcgccggcatccagcgcggcgacctcatcctgtcgatcaacggccagccggtggaaacggtggaccagctgcgcgcgctggtggccaaggctggcaagcatgtcgcgctgctcgtccagcgcgatgaagcacgcatattcgtaccggtcgagctgggttga

SEQ ID NO: 7214 - protein, 477 aa, Azoarcus sp. BH72
MQHPLRATTTASALILALAGAFGTDALAQAPAPRGLPAGSIVLPSFDTIIQRVGPAVVNISTEGPVRTGGPSGGLSPDDPFSEFFRRFGPPLGPQFGNPPGQGPVRGQGSGFIVSADGIVLTNAHVVDGASEVTVKLTDKREFKAKVLGVDKPTDVAVLRIDAKNLPTVPLGDPQKAHVGDWVLAIGAPFGFENSVTAGIISAKSRSLPNEGYVPFIQTDVAINPGNSGGPLLNLAGEVVGINSQIYSRSGGYQGLSFAIPIDVAAGVRDQIVAHGKVTRGRIGVAVQDVNQALAESFGLKSAGGALISSVEPGAPGDKAGLKVGDVIIELNGEKIVNSADLPPRVAAVRPGNTVRMKVWRKGESRDLEVKVGEFPDDSQVASSTGKADQGRLGLAVRALSGEERRQAGLPGGLVVTEVAGPAARAGIQRGDLILSINGQPVETVDQLRALVAKAGKHVALLVQRDEARIFVPVELG

SEQ ID NO: 7215 - DNA, 1404 bp, Magnetospirillum magnetotacticum MS-1
  CDS (1)..(1404): transl_table=11
atgaccacgtccctgaagatcctcgccgccgcccttgccctggtgattctcgtgcccgccgcccaggcccaaacccaggtcgtgccgacctcgcgcgagcaggtgaaactgaccttcgcgccggtggcccgtcaggtggcgcccgccgtggtcaatatctataccaagcgggtggtcagggccgccgcctcgcccatgttcgccgatcccttcttccgccgcttcttcggtgatgtgccgggcatgagccaggaccgggtgcagcgctctctgggctcgggcgtgatgatcggggccgacggcacggtggtcaccaaccaccacgtcatcaaggacgccgacgaggtcaccgtgatcctctccgaccgccgcgaattcgaggcccgcatcgtcggctcggacgagcgcaccgatctggcggtgctcaagatcgacggcggaaaagagagctttcccaccctggttctgggcgattccgacgccatcgaggtgggcgacgtggtgctggccgtgggcaatccgttcggcgttggccagacggtgacccagggcatcatctcggccctggcgcgcaccaatgtgggcgtgtccgacgtgcaaagcttcatccagaccgatgccgccatcaatcccggcaattccggcggcgccctggtggatctgcaaggccgcctgatcggcatcaacagcgccatctattccaaggacggcggctccaacggcatcggcttcgccattcccaccgccctggtccggcaggtgaccacctccatcgccaagggcggcaaggtggtgcggccctggctgggcgcatcgggtcaggcggtaaccgccgatctggcccaggccatgaagcttccccggcccgtgggcgtgctggtcaaccatatcagccccgattcccccgcccagcgggccggtctggccgatggcgacgtgatcgtcgcggtggaaggacgcgaggttgacgataccgaaggcatgcgttttcgcctcgccaccctggccatcggctcggaggcgcgccttaccgtgttacggggcggcgtggaacggattctgaccgtccgtctggtggcgcccccggaaaacccgccccgcgacaaaaccgagatcaacggccgcaaccccttttccggcacgaccctggtcaatctcaacccggccctggccgaggaactgggcatcaattccagcctgaccggcgtgatgatcctggccatcaagcgtggctcggtggccaaccgcctggggctgcagcccggcgacatgctgatcaagatcaacgaacgcgccattgccagcgtcgccgacgcccgccggtcgctggacgccgaatcggcccgctgggccatcaccatcaagcgtaacggcgaggtgatgagcttggtcctgggcggatga

SEQ ID NO: 7216 - protein, 467 aa, Magnetospirillum magnetotacticum MS-1
MTTSLKILAAALALVILVPAAQAQTQVVPTSREQVKLTFAPVARQVAPAVVNIYTKRVVRAAASPMFADPFFRRFFGDVPGMSQDRVQRSLGSGVMIGADGTVVTNHHVIKDADEVTVILSDRREFEARIVGSDERTDLAVLKIDGGKESFPTLVLGDSDAIEVGDVVLAVGNPFGVGQTVTQGIISALARTNVGVSDVQSFIQTDAAINPGNSGGALVDLQGRLIGINSAIYSKDGGSNGIGFAIPTALVRQVTTSIAKGGKVVRPWLGASGQAVTADLAQAMKLPRPVGVLVNHISPDSPAQRAGLADGDVIVAVEGREVDDTEGMRFRLATLAIGSEARLTVLRGGVERILTVRLVAPPENPPRDKTEINGRNPFSGTTLVNLNPALAEELGINSSLTGVMILAIKRGSVANRLGLQPGDMLIKINERAIASVADARRSLDAESARWAITIKRNGEVMSLVLGG

SEQ ID NO: 7217 - DNA, 1383 bp, Actinobacillus pleuropneumoniae serovar 1 str. 4074
  CDS (1)..(1383): transl_table=11
atgaaaaaatcaattttagcttcattattattaggtctaggtttattttcaacgccggcgacgacttttgccactttaccgattgccattgacgggcaaacaatgcccagccttgcgccgatgatagaaaaagtacgtcctgcggtagtaagtattgcggttgaagggaaaacacaagcgggaaaaacccaatatcgccgtgatattccggaagaattcgaatttttctttggaccggatatgttcggtgaacgcagtgcgccacgtaatttccgagggcaaggatccggcgcgatcatcaatgccgaaaaaggttatgtgattaccaataaccacgtaatcaaggatgcggataaaattactattaaacttgaagacggtcgtgaatttaaagcgaaattagtcggtgcggatccgttatccgacgtggcattagtacaaatggaaaacccgaaagatttaatcgaattaaaatttgccgactcggataaattgcgcgtcggtgattttagtgtagcaatcggcaatccgttcggtttaggtcaaaccgtaacatccggtattatctccgcattaggacgttcgaccggtagtatcgacgaaggttatgaaagctatattcaaacggatgctgcggtaaaccaaggtaactctggcggtccgttaatcaatttaaacggtgaattaatcggtattaatacggcgattatctctccgagcggtgggaatgcgggcattgctttcgcaattccgagtaatatggcgaatagccttgtacaacaaattatcgaattcggtgaagtgaaacgcggtatgttgggtattaaaggcggtgaattaaatgccgatcttgcaaaagagtttaatatcagcgcacaacaaggtgcatttatcagcgaagtgtttgctgattcggctgcagctaaagccggcttaaaagcaggcgatgttattactgaaattaacggtcaaaaaatccgtagtttcagtgaattacgtgcaaaagttgcaacgtccggcgtaggtaaagaaatcgagctaacttatttacgtgacggtaaaacggaaaaagcgaaagtgactttacaagcggaacaaggtaaaagcgtaagcgcaaccacgaaggacattctccccggacttaaaggggcggaattaactaacttcgataaagatcgcgttaaaggcgtcgcgattgcgaaagtagaaaaaggctcgttagcggaacaacgcggtttggcggaaggcgatgtgattgtcggggtaaaccgcattgctgtagaaaatcttacgcaattacgtcaagtcttagattcaaaaccgtctgtcgttgcccttaatattttacgtaacggcgcaaacttttacttaattcttcaataa

SEQ ID NO: 7218 - protein, 460 aa, Actinobacillus pleuropneumoniae serovar 1 str. 4074
MKKSILASLLLGLGLFSTPATTFATLPIAIDGQTMPSLAPMIEKVRPAVVSIAVEGKTQAGKTQYRRDIPEEFEFFFGPDMFGERSAPRNFRGQGSGAIINAEKGYVITNNHVIKDADKITIKLEDGREFKAKLVGADPLSDVALVQMENPKDLIELKFADSDKLRVGDFSVAIGNPFGLGQTVTSGIISALGRSTGSIDEGYESYIQTDAAVNQGNSGGPLINLNGELIGINTAIISPSGGNAGIAFAIPSNMANSLVQQIIEFGEVKRGMLGIKGGELNADLAKEFNISAQQGAFISEVFADSAAAKAGLKAGDVITEINGQKIRSFSELRAKVATSGVGKEIELTYLRDGKTEKAKVTLQAEQGKSVSATTKDILPGLKGAELTNFDKDRVKGVAIAKVEKGSLAEQRGLAEGDVIVGVNRIAVENLTQLRQVLDSKPSVVALNILRNGANFYLILQ

SEQ ID NO: 7219 - DNA, 1392 bp, Haemophilus influenzae R2866
  CDS (1)..(1392): transl_table=11
atgaaaaaaacacgttttgtattaaatagtattgcacttggattaagtgtattaagcacatcatttgttgctcaagccactttgccaagttttgtttcggaacaaaacagtcttgcaccgatgttagaaaaagtacaacctgccgttgtcactctttccgttgaaggaaaagctaaagtagattctcgttctcctttcctagacgatattcctgaagaatttaaattcttctttggcgatcgttttgccgaacaatttggtggacgtggagaatcaaagcgtaacttccgtggtttaggttctggtgtcattattaatgcaagcaaaggctatgttttaaccaataatcatgttattgatggagctgataaaattaccgtgcaattacaagatgggcgtgaatttaaagcaaaattagtgggtaaagatgaacaatcagatattgcattagtacagcttgaaaaaccaagtaatttaacagaaatcaaatttgctgattccgacaaattacgcgtaggcgatttcactgttgcaatcggtaatccatttggtttaggtcaaactgtgacatcaggtattgtttctgcattgggtcgttcaacaggttctgacagtggcacttatgaaaactatattcaaaccgatgcagcagtaaaccgcggtaattcgggtggtgcattagtcaatctaaatggcgaacttattggaattaataccgcaattatttcgccaagcggtggcaatgcaggaattgcctttgcgattccaagtaatcaagcaagcaatttagtgcaacaaattttagaatttggtcaagtgcgtcgcggattgcttggtattaaaggtggcgaactcaatgctgatttagccaaagcctttaatgtaagcgcgcaacaaggtgcatttgtaagtgaagttttaccgaaatctgctgctgaaaaagcaggacttaaagcgggcgatattatcacggcgatgaacggtcaaaaaatctcaagtttcgctgaaattcgtgcaaaaatcgcaaccactggtgcaggcaaagaaattagcttgacttacttacgtgatggcaaatcccacgacgttaaaatgaaattacaagcggatgatagtagccaactttcctcaaaaactgagttgcctgcattagatggtgcaacattgaaagactacgatgctaaaggcgttaaaggaattgaaatcacaaaaattcaacctaattcgctggctgcacaacgtggtttaaaatcgggcgatattattattggtattaatcgtcaaatgatcgaaaacattcgtgaattaaataaagtgcttgaaactgaaccgtcagcagttgcacttaatattttacgaggtgacagtaatttctatttattagtgcaataa

SEQ ID NO: 7220 - protein, 463 aa, Haemophilus influenzae R2866
MKKTRFVLNSIALGLSVLSTSFVAQATLPSFVSEQNSLAPMLEKVQPAVVTLSVEGKAKVDSRSPFLDDIPEEFKFFFGDRFAEQFGGRGESKRNFRGLGSGVIINASKGYVLTNNHVIDGADKITVQLQDGREFKAKLVGKDEQSDIALVQLEKPSNLTEIKFADSDKLRVGDFTVAIGNPFGLGQTVTSGIVSALGRSTGSDSGTYENYIQTDAAVNRGNSGGALVNLNGELIGINTAIISPSGGNAGIAFAIPSNQASNLVQQILEFGQVRRGLLGIKGGELNADLAKAFNVSAQQGAFVSEVLPKSAAEKAGLKAGDIITAMNGQKISSFAEIRAKIATTGAGKEISLTYLRDGKSHDVKMKLQADDSSQLSSKTELPALDGATLKDYDAKGVKGIEITKIQPNSLAAQRGLKSGDIIIGINRQMIENIRELNKVLETEPSAVALNILRGDSNFYLLVQ

SEQ ID NO: 7221 - DNA, 1509 bp, Prosthecochloris aestuarii DSM 271
  CDS (1)..(1509): transl_table=11
atgaaaagaaaatatacctacttgtttcttgtgctcgccggtgtgctggttggcgcgcttgctttttctcatattgatgtcactgtaccggttgccgagaaaaagatcgcggtcacgagtttttcgaatgatgctgctgcgtcgccgggggtcgagcatcagcctatccgttcgctgaaggacctgaacgaagcatttgtccagttggctgagtctgcgacaccttccgttgtgacgatttttaccgaaaagacggtcaacagaaaaaccatttctccgtttgatcttttcggcagtccctttgacgattttttcaatgttccacgtgacaggggagggcagaatggatccaaggaggtgctcagaggactcggctcaggggtggtcgtcagtgcggatggttatatccttaccaacaaccatgttgtcgataatgccgatgtgatctacattcgtacgtatgaaaataataaagtggcggccaaagtggtcggcaaggacccgaagacagatctggcggttatcaaggctgacgtcaaaggattgaagcctatcgctatcggcgacagtgacgcactgagggttggtgagtgggtgatcgctattggcagtccgctcggagagaaccttgcccgcacagtaacgcagggtattgtcagcgctaaaggccgcgccaatgtcggacttgctgattatgaagattttattcagacagacgctgccatcaatcccggcaattccggtggtcccctggtcaatatcaacggtgaacttgtcgggatcaacactgctattgcaagtcggacaggtggttttgaagggatcggctttgctgttccttcgaatatggcaaaaaaagtgatgcagtcgctcatcagcaacggcaaggttacaagaggatggctgggcgtcaccattcaggatgtcgatgaaaatatcgccaaggggctgcagcttgatccgccagagggtgttcttgtcggaacggttgttgacgatggtcctgctgcatcggcaggggtgaagacgggagatgtgatcattgccatcgatggtaaaaaagtgaccgataccattgaacttcgtaacggcattgcagagacacctccggggacgactgtaaaactcagggtgtggcgaaacgggcaggtaaagctcttgagcgtgcggttgagcgagcttcccggaaaggaggaggttgctgtcgaagagaaggctgaaatcactgatctcctgggtttcagtgtttcggaactgacctccgagctggcttcacgatacaggctgagtcgggataagggtgctgttcttgtgaccggtatcgatccatcgagcaaggcgtatcgagctggtttgcgacagggagatctcattctttccgtcaacaagaaaaacgtaagcacctacaaggagtttcttgcggtggccggctcagtgaaaaaaggcgatctcctctttctcttgatcgaacgtcagggcagcaaagtgtattttgcctttaacatttaa

SEQ ID NO: 7222 - protein, 502 aa, Prosthecochloris aestuarii DSM 271
MKRKYTYLFLVLAGVLVGALAFSHIDVTVPVAEKKIAVTSFSNDAAASPGVEHQPIRSLKDLNEAFVQLAESATPSVVTIFTEKTVNRKTISPFDLFGSPFDDFFNVPRDRGGQNGSKEVLRGLGSGVVVSADGYILTNNHVVDNADVIYIRTYENNKVAAKVVGKDPKTDLAVIKADVKGLKPIAIGDSDALRVGEWVIAIGSPLGENLARTVTQGIVSAKGRANVGLADYEDFIQTDAAINPGNSGGPLVNINGELVGINTAIASRTGGFEGIGFAVPSNMAKKVMQSLISNGKVTRGWLGVTIQDVDENIAKGLQLDPPEGVLVGTVVDDGPAASAGVKTGDVIIAIDGKKVTDTIELRNGIAETPPGTTVKLRVWRNGQVKLLSVRLSELPGKEEVAVEEKAEITDLLGFSVSELTSELASRYRLSRDKGAVLVTGIDPSSKAYRAGLRQGDLILSVNKKNVSTYKEFLAVAGSVKKGDLLFLLIERQGSKVYFAFNI

SEQ ID NO: 7223 - DNA, 1446 bp, Xylella fastidiosa Ann-1
  CDS (1)..(1446): transl_table=11
atgcgaccgctacctactttactgacgctatctatcgctgccgcattcggcggttttgcagccactgggatgaatgcttggcttgataaccgcgccgaagcggcatccaacaccaatgccatctcaccaatatcatcactgccaacgggcacggtgcctcaaaccacggctgccaaccagccgctaccatcgttagcacccatgctgcaacaagtgatgccagcagtggtcagcatcaacagtaaacaagtggtacgggtgcgcaatccatttttcgacgacccgatcctacgtcggctattcccagagatcccccaagaacgcattaatgagtcgctcggatctggggtgatcatcgacgcgcgcaatgggtacgtacttaccaatcatcacgtgatcgaaaatgccgacgccgtgcaggtgacattagcagatgggcgcagcttcaaggccgagttcctcggttctgacgcagacaccgacatcgccttgatccggataaaagcaaataaactgaccgaaatcaaactcgcagacagtaacaaattacgcgtgggcgacttcgtcgtagccattggtaacccgttcggctttacccaaacggtgacctcaggcatcgtctcggcggtaggtcgcagtggcatcctcggcctgggttaccaaaacttcatccaaaccgacgcatcgatcaacccgggtaactcaggcggcgcactggtgaatcttcatggccagttggttggcatcaacacggccagcttcaacccacagggcagcatggctggcaacatcggcttaggcctggcgattccttcgaatctagcgcgcaacgtcgtcgagcaattggtcacgaaaggcgttgtggtacgcgggacaatcggcgtacaaacacagaatattgatgcacgaatggcacaaagcttaggcctgagtaatccacacggcgcattagtgactcgcgtattacccaattccgctggtgccgcagccggactgcaaccaggtgatgtgatcctggcagccaatgaccaaagggtggacaacgcggaaacattgcacaactacgaaggactacagcccgtcggtagctcagtaacactggaagtacaccgtggcggcaagccactcaaaatacgcctcacactcaaagaattgccacgcgcaatcgccggagaaacgctggattcacgactgtcgggcgccatcttcgttgacctgccagagtccctccgtcaatcaggaatcggtggagtcatggtcaacaaaatcaaacacggcagccgcgctgcggccaatgggttggtagccggagatgtcatcattgccgcatccatcggtgaattctctgatctggcgagctggcgggcaagcttttcccacccaccacaacggctgatactgcgtgtgctgcgcggtaacgcacagtatgatgcgctgatgcgctga

SEQ ID NO: 7224 - protein, 481 aa, Xylella fastidiosa Ann-1
MRPLPTLLTLSIAAAFGGFAATGMNAWLDNRAEAASNTNAISPISSLPTGTVPQTTAANQPLPSLAPMLQQVMPAVVSINSKQVVRVRNPFFDDPILRRLFPEIPQERINESLGSGVIIDARNGYVLTNHHVIENADAVQVTLADGRSFKAEFLGSDADTDIALIRIKANKLTEIKLADSNKLRVGDFVVAIGNPFGFTQTVTSGIVSAVGRSGILGLGYQNFIQTDASINPGNSGGALVNLHGQLVGINTASFNPQGSMAGNIGLGLAIPSNLARNVVEQLVTKGVVVRGTIGVQTQNIDARMAQSLGLSNPHGALVTRVLPNSAGAAAGLQPGDVILAANDQRVDNAETLHNYEGLQPVGSSVTLEVHRGGKPLKIRLTLKELPRAIAGETLDSRLSGAIFVDLPESLRQSGIGGVMVNKIKHGSRAAANGLVAGDVIIAASIGEFSDLASWRASFSHPPQRLILRVLRGNAQYDALMR

SEQ ID NO: 7225 - DNA, 1356 bp, Pseudoalteromonas tunicata D2
  CDS (1)..(1356): transl_table=11
atgaaaacaaaattatcccttttgagtgcaattatgctttcttcaagtctgttgattgcaccctctatttcttatgcaaaattaccagttgcagttgatggtcagcaacttccaacacttgcacctatgctcgaaaaagtcacacccggtgtcgtgagtattcaagtttcaggtgcaaaagaagtacgtcgtcgtgttgacccgtttgacttcttttttggaaatccccagcagcgccaaccacaaagtcaaaaacaaccttttaatggtttaggctccggcgttattatcaatgctgatgaaggttatgttgttaccaacaatcatgtaattcaagacgctgaaaaaattattattaccctcgaggatggccgtgaatacgaagccaagctaataggcacagatcaagaagccgacatcgcattactgcaaattaaagctgaaaatctaacagcattaaaattagcagattcagacaaactgcgcgtgggtgatttctctgttgcaattggtaacccattcggtctgagccacacagtaacatcaggtattgtcagtgcgctaggtcgtagcggccttaacattgaaggttttgaagactttattcaaacagacgctgctatcaaccaaggtaattcaggtggtgcattagtaaaccttaacggtgagcttatcggtattaataccgctattttaggtgcatctggcggtaatgttggtattggtttctcaattccatctaacatgatgaaaaatttagttgatcaaattattgagcacggcgaagtacgccgcggatcgctggggatcgaaggtcgaactttagatgcaggtattgccaaagcgcaagatatagatttaaaacaaggcgcttatgtctttaaagttgttgatgattcagcagctgcagaggctggcattcaagcgggtgatgtcattgtaagcattgacaaagccgacgttcacagcttccctgaactacgcagtaaagtagcaaccttaggtgagggtaaaaccgttaagcttggaatttaccgcgatggcaaagttaaaagcgtaaaagtaactctacgaggtaatactgttgcgtcagctgctgcagacaaaatgcacccacgtttacaaggtgcattacttgaagcaactaaagataacaccggcattgtggttaaagagatccaagatcgctcacccgctgcgcgtgttggtcttgaagaaggcgacattattatgcaagtaaatcgcaaacgcgttacgactatcaatgaacttgctcgtgcaatcgatgatataaacggcaatattgtgttaggtgttaaacgcggtgacaattcaatttttgtcttaattcagtaa

SEQ ID NO: 7226 - protein, 451 aa, Pseudoalteromonas tunicata D2
MKTKLSLLSAIMLSSSLLIAPSISYAKLPVAVDGQQLPTLAPMLEKVTPGVVSIQVSGAKEVRRRVDPFDFFFGNPQQRQPQSQKQPFNGLGSGVIINADEGYVVTNNHVIQDAEKIIITLEDGREYEAKLIGTDQEADIALLQIKAENLTALKLADSDKLRVGDFSVAIGNPFGLSHTVTSGIVSALGRSGLNIEGFEDFIQTDAAINQGNSGGALVNLNGELIGINTAILGASGGNVGIGFSIPSNMMKNLVDQIIEHGEVRRGSLGIEGRTLDAGIAKAQDIDLKQGAYVFKVVDDSAAAEAGIQAGDVIVSIDKADVHSFPELRSKVATLGEGKTVKLGIYRDGKVKSVKVTLRGNTVASAAADKMHPRLQGALLEATKDNTGIVVKEIQDRSPAARVGLEEGDIIMQVNRKRVTTINELARAIDDINGNIVLGVKRGDNSIFVLIQ

SEQ ID NO: 7227 - DNA, 1371 bp, Photobacterium sp. SKA34
  CDS (1)..(1371): transl_table=11
atgattaaaaagccttttcttgttattactgcgttagcattaggtatcagttctgctattaccccagtaacggcaacggctgcattacccacctctgttgatagccaacccatgccaagccttgcgccaatgttggagcaagtcacacccgcggttgttagtattgccgttgaaggtaagcatgtttctaagcagcgtttacctgaatctttccgttatttttttggtccagactttccttcagagcaagtccaagagcggccatttagaggtttaggctctggggttattgttgatgcaaagaaaggctatatcgtcactaaccatcatgtaattgatggcgcagataaaatcagtgttcaacttttttatggacgcgaaatcgatgccaaacttattggtagcgatagcatgtcagatattgcattactacagatagacaaaccagaaaacttaactgaagtaaaactggcgaactcagataaattacgtgtcggtgattttgctgtcgcaattggtaacccatttggtttaggtcaaacggtaacatcagggattgtctcggcactgggtcgtagtggcttaaatatcgagaactttgaaaactttattcaaaccgatgctgcaatcaatagcggtaactcaggcggtgcattagttaatcttaatggtgaactcattggtataaacaccgcgattttgggccctaatggcggtaatgtcggtattggctttgctattccctctaatatggtgaaaagcttaactgatcaaatcttagaatttggtcaagtcaaacgcggaattttgggtgttcaaggtggtgaattaactgcagagcttgctaaaaccttcggttattcaactaaccacggtgcatttgtcaaccaagtcatgcctaaatcttctgctgaaaaagcaggactgaaagcaggagatatcattaccgaagtgaacggaaaccctatccgtaccttcagtgagttaagagcgaaaattgcgactatgggcgcaggtaaggcgctaactttaggtattattcgcgatggcaaaaagcaaaccgttaatgtgaccttaaaagcagcaagtgaaaataaagtaaaggctgataatcttcaccctagcctagccggtgctgaatttaccaatactgttgctggcgataaagtcaaaggggttaaggtattaaagcttgacgagcgatctatcgctgcacgttatggcctacaaaaaggtgacattattattggtcttaaccgtaataagataaagaaccttggtgaacttcgtaaagcacttgaagcaaaacctaatgtgcttgcgatggaagttaaacgtgataacaacgtcctgtatctgattattagataa

SEQ ID NO: 7228 - protein, 456 aa, Photobacterium sp. SKA34
MIKKPFLVITALALGISSAITPVTATAALPTSVDSQPMPSLAPMLEQVTPAVVSIAVEGKHVSKQRLPESFRYFFGPDFPSEQVQERPFRGLGSGVIVDAKKGYIVTNHHVIDGADKISVQLFYGREIDAKLIGSDSMSDIALLQIDKPENLTEVKLANSDKLRVGDFAVAIGNPFGLGQTVTSGIVSALGRSGLNIENFENFIQTDAAINSGNSGGALVNLNGELIGINTAILGPNGGNVGIGFAIPSNMVKSLTDQILEFGQVKRGILGVQGGELTAELAKTFGYSTNHGAFVNQVMPKSSAEKAGLKAGDIITEVNGNPIRTFSELRAKIATMGAGKALTLGIIRDGKKQTVNVTLKAASENKVKADNLHPSLAGAEFTNTVAGDKVKGVKVLKLDERSIAARYGLQKGDIIIGLNRNKIKNLGELRKALEAKPNVLAMEVKRDNNVLYLIIR

SEQ ID NO: 7229 - DNA, 1614 bp, Xanthobacter autotrophicus Py2
  CDS (1)..(1614): transl_table=11
atgcgaccgcccatgacccgctcgcccatgacccgctccgacaacaccccctccgtgaccaagcgccaccgcaaggctctcctggccggcgtggtcggtctcgcgctcgccggcgtcgtggccggccagttcgtgccgccgctgaacggtcccgtcgccgcccagatcaccaccagccagccggccggcaccttctccttcgccgatatcgtcgagaaggtctcgcccgccgtcgtctcggtgaaggtgaagaaggatgccggcaacgaacagatggccatgggcggcgatttcggcggcaatgttccgccccagatcgagcagttcctgaagcgcttcggcttcggcgacggccagggccccatgggtccgggtggtcccggcggcccgggcatgggtccgcgcggcggccacggtcccaagggcgagcgcccggtggtgggccagggctccggcttcatcatctcggctgacggctatgtggtgaccaacaaccacgtggtggacggcgccgacgaggtggacgtgaccaccaccgacggcaaggaataccaggccaaggtgatcggcaccgatccgcgcaccgacgtggccctgctgaagatcgagaacgtcaccaacctgccgtgggtgaagctcgcggacggcgccccgcgcgtcggtgactgggtgatcgcggtgggcaatcccttcggcctcggcggcaccgtgaccgccggcatcgtctcggcccgtggccgcgacattggctcgggtccctatgacgacttcatccagatcgacgcccccatcaaccggggcaattcgggcggcccgaccttctcgctgaacggcgaggtgatcggcatgaacaccgccatcgtctccccctcgggtggcaacgtgggcattgccttcgccattccgtccgagaccgtgaagacggtggtggcccagctgcgcgacaagggctcggtggcccgcggctacatcggcgtgcagatccagccggtgaccgaggacctcgcctccggcctcggcatcaaggacgccgagggcgccctggtggcgcaggttcagcccaacacccccggcgccaaggcaggcctgaaggccggcgacgtgatcgtgaaggtcaacaacgagccgatcaaggaagcccgcgatctgacccgcaaggtgggcatgatgaagccgggtaccgagatcaagctctcgctgatccgcgatgccaagcccatggacctgtccctggtgctcgaccagctgcccaacgatcaggtcgcctcgcgctccggtgcgccccagcagggcgaggatgacaccgccggcgccaccaaggacctgccgcgcctcggcctccagctcgccccgtccaagagcgttcagggcgccggcggcgaaggcgtggtggtgaccggtgtggagcccaacggccccgccgcccagcgcggtttcaagaccggcgacgtgatcctgaaggtgggcgacaaagcggtctccaccccgaaggatgtgcgcgacggcctcgccgccgccaaggccgacaaccgcaaggcggtgctcatccaggtgaagagcggcgagggcgtgcgcttcgtcgccatcaccctcgacgccaaggccaagggctga

SEQ ID NO: 7230 - protein, 537 aa, Xanthobacter autotrophicus Py2
MRPPMTRSPMTRSDNTPSVTKRHRKALLAGVVGLALAGVVAGQFVPPLNGPVAAQITTSQPAGTFSFADIVEKVSPAVVSVKVKKDAGNEQMAMGGDFGGNVPPQIEQFLKRFGFGDGQGPMGPGGPGGPGMGPRGGHGPKGERPVVGQGSGFIISADGYVVTNNHVVDGADEVDVTTTDGKEYQAKVIGTDPRTDVALLKIENVTNLPWVKLADGAPRVGDWVIAVGNPFGLGGTVTAGIVSARGRDIGSGPYDDFIQIDAPINRGNSGGPTFSLNGEVIGMNTAIVSPSGGNVGIAFAIPSETVKTVVAQLRDKGSVARGYIGVQIQPVTEDLASGLGIKDAEGALVAQVQPNTPGAKAGLKAGDVIVKVNNEPIKEARDLTRKVGMMKPGTEIKLSLIRDAKPMDLSLVLDQLPNDQVASRSGAPQQGEDDTAGATKDLPRLGLQLAPSKSVQGAGGEGVVVTGVEPNGPAAQRGFKTGDVILKVGDKAVSTPKDVRDGLAAAKADNRKAVLIQVKSGEGVRFVAITLDAKAKG

SEQ ID NO: 7231 - DNA, 1383 bp, gamma proteobacterium HTCC2207
  CDS (1)..(1383): transl_table=11
gtgcttaaaagacttttgcttgttacttcctttgtatgtcttgtttttaaccctctcagtgcgcttgctcagctgccagatttcactgaattggttgaggatacatccgccgcagtggtgaaaatcaacacggtgcagaaagcccgcaagaacaggtcggggcagattgcgcctgaccaaattccggagatcttccgcgatctatttcagcagcgccagcggccgcaaacccaacgtccggttatggcaatgggctcgggctttgtgatttccgaagatggttacattatcaccaaccaccatgtgattgatggtgctgacgagattgttgtgcgcttttcagatcgacgcgaatttactgccacagtggtgggcaaagatcgccgctcagatctcgccgtgctcaaggtcgaagcagataatttgcctacgctcaaacttgccgcgccagaccaacttaaagtcggtgaatgggtgttggccatagggtcgccctttggtctcgactattcggccagcgtcgggattgtcagtgccatagggcgcagtattcccacagaaaaaggggagaattatgtgccctttattcagactgatgtggcaattaatccaggaaattccggtggcccactgttcaatctggacggcgaggttgtgggtatcaactcacagatctattctcgctctggaggctctattgggctctcttttgccatccccaccagtgtcgcagtcggtgttatcgaacagcttaaggaaaatggcgaagtgcagcgcggctggctcggcgtagtgattcaggatgtagacaaagatttggctcaatcactggatctggatcggccgcagggcgcactcattaatgctgttgaaccggatagtccagcagacaaaggaggcattaagcctggcgatgtgattgtccgatttaacaaacaacagatcattgaatccggtgatttaccgcatgttgtcggcatgctggcgcctgaaaaaaaggctccggtggagctctatcgcaagggcaagctaaagaaattgactgtcgcagtgggtcgtctggataacggtgattccagtgtcgccggtggttctgatggaagcgaccgcctgggtttagtggttgccgatctcagtgaccgcgaaaggagctctctgggaattcgcggtggggtgattttggagcaggtttcgccagattcggcgggctcggagtcaggcttaaatcgcggtgacgtgatcttgcagctcggctacagtcgtattgatgacagcgatgagtacaaacaagttgtgcgagaattacctgtggatacgccaatattaatccgattctatcggcagggtagagcgatctcacgaacgattatccttgcgaagtga

SEQ ID NO: 7232 - protein, 460 aa, gamma proteobacterium HTCC2207
MLKRLLLVTSFVCLVFNPLSALAQLPDFTELVEDTSAAVVKINTVQKARKNRSGQIAPDQIPEIFRDLFQQRQRPQTQRPVMAMGSGFVISEDGYIITNHHVIDGADEIVVRFSDRREFTATVVGKDRRSDLAVLKVEADNLPTLKLAAPDQLKVGEWVLAIGSPFGLDYSASVGIVSAIGRSIPTEKGENYVPFIQTDVAINPGNSGGPLFNLDGEVVGINSQIYSRSGGSIGLSFAIPTSVAVGVIEQLKENGEVQRGWLGVVIQDVDKDLAQSLDLDRPQGALINAVEPDSPADKGGIKPGDVIVRFNKQQIIESGDLPHVVGMLAPEKKAPVELYRKGKLKKLTVAVGRLDNGDSSVAGGSDGSDRLGLVVADLSDRERSSLGIRGGVILEQVSPDSAGSESGLNRGDVILQLGYSRIDDSDEYKQVVRELPVDTPILIRFYRQGRAISRTIILAK

SEQ ID NO: 7233 - DNA, 1455 bp, delta proteobacterium MLMS-1
  CDS (1)..(1455): transl_table=11
atgaaatctgcggctatcacgctgaattggcgtaaaactctgtttattttttccttctgctggctactgctggccctggcggccaccgggctcagggccgcgccgccctcctttgccgagctggccgaagagatggggccttcggtggttaatatctataccacccagaccgttaaggcgccccgctcgccccatcctttctttggcggtgaaggctttgaggagctgccggagatgttccgccgcttctttgatatgccgcatccctccccccacggtgagcagcagcaacccccccgggagctacagcggaccagcctgggctccggggtgattatttccaccgatggttatattgttaccaacaaccacgtggtggaaaacgccgattccattaatatccggctgaccaacttcgaggagtatgacgccgaggtcatcggccgtgatcccaaaaccgacctggcattgctgaaaatcgacagcaagcatgagttgccggcggttcgcatgggggattcggaagccctgcgagttggcgattgggtgctggccatcggcaacccctttggtttcgagcagacggtgaccgccgggatcgtcagcggcaaagggcgttccctgggcagcggcccctatgaaaactttatccagaccgatgcctccattaaccccggcaattccggcggcccgctctttgctctggacggggcaatggtgggcatcaacaccgccatttacagccgtggcgggggtaatatcggtattggttttgcgattccggtcaatatggccaagaatgtggtcgagcagttgcgggagcacggcactgtgacccggggctggctgggggtgatgatccagcatgtgaccccggacctggcccggcatctgcaactggagcggcccatcggcgccctggtgggcgaggttgatcccgccgggccggcggccgccgccggcctcaaagccggtgatgtgatcgtcgagtacgccggcaaggaaatcagccagatgaccatggtgcccaccctggtggcccagaccacccccggtgaggaggtggagatggtggtgatgcggcggggcgagcggcagaccctgacggtgaccatcggcaagcttgatgaagaggatgagcgccgggcccggagtgctcccgaatcggaggagcaactggggctggcggtccaggagttgactccggaggtggccgaatccctggggatcagccaggatcaaggggtgctgatcgccgatgtcaaagccggttccgccgccgccgaagccggcttgcgccggggtgaggtgatcgtcgaggttaaccagcaggccatcgagagtctggagcagtatgccgcagtcatcgaagaagccctggaagagggcagtgtgctgctgctggtccgtaaccgccaggggcagagccgctttgtcgccatcaggatcaggtag

SEQ ID NO: 7234 - protein, 484 aa, delta proteobacterium MLMS-1
MKSAAITLNWRKTLFIFSFCWLLLALAATGLRAAPPSFAELAEEMGPSVVNIYTTQTVKAPRSPHPFFGGEGFEELPEMFRRFFDMPHPSPHGEQQQPPRELQRTSLGSGVIISTDGYIVTNNHVVENADSINIRLTNFEEYDAEVIGRDPKTDLALLKIDSKHELPAVRMGDSEALRVGDWVLAIGNPFGFEQTVTAGIVSGKGRSLGSGPYENFIQTDASINPGNSGGPLFALDGAMVGINTAIYSRGGGNIGIGFAIPVNMAKNVVEQLREHGTVTRGWLGVMIQHVTPDLARHLQLERPIGALVGEVDPAGPAAAAGLKAGDVIVEYAGKEISQMTMVPTLVAQTTPGEEVEMVVMRRGERQTLTVTIGKLDEEDERRARSAPESEEQLGLAVQELTPEVAESLGISQDQGVLIADVKAGSAAAEAGLRRGEVIVEVNQQAIESLEQYAAVIEEALEEGSVLLLVRNRQGQSRFVAIRIR

SEQ ID NO: 7235 - DNA, 1350 bp, Rickettsiella grylli
  CDS (1)..(1350): transl_table=11
atgaagagactattatatcaattattattcggcgttttacttataatcaatatttatccttccagttacgccagttggtcccttaattcagtgcatcaaaataaggataacttctctcaggcattacaaccgatactccctgccgttgtgaatgtttccgttcaaggggatatccctttgaatcaattacctccgcctgtccctgggcgtccctatcctcgtcattttgaaagtatgggttcaggcgtcattgtcgatgcaaaagcagggtatgttttaaccaacgctcatgttattcgcgaagctaaaaccattaccgttaccttaagtgatggccgtgttttaaatgccacactgaaaggatcagatcctgcttctgatattgctttactgaccatcacgcctgatcacttaacggctattcctttaggtaattccgatcatttaaaagtgggtgattttgtagccgctatcggcaatccttttggactgaaccaaacagtcacttcaggaatcgtgagtgctttacaacgtacgggattaggaatagaaggttttgaaaatttcattcaaacggacgcgtccatcaatccaggcaattcagggggggctttgatcaatttacaagggcaactcattggcattaatacagccatattaacgcctggtttaaacgcaggaaatattggaattggctttgctatacccattaatatggcctatggcgtgatgaaacaattagctgaatatgggtctgtcaaacggggtttaatgggagttctcgtgcaagatctaacccccatattagcgaccgcgctccatattccatctacactcaacggagcacttgtctctcaagttcctcgttattcacctgccgcggctgcaggtattcacatcggcgatattattcagtccattaatggcatacccattcataatagcggacaagtcaaaaatattgtgggtctgttaagagtgaatgataaaattaatattaagttattgcgaaaagggaaaacgataacgaccgttttaaacctcactgatcctaaacaatataaaaaagtggccgaacaaaataatccgtttttatatgggttaatgttgcgcgattttaatcaaacgattacaggtcaagggaatttacgaggcgttgaggtcgttgatatggatgaaaacagtcctgcctggcatgcgggtatacggcctggcgatgttatcctctctgctaatcaaatcaatgtaaccgaggttccgcaattacaagcgattgcgaagcagaacaaacaaggactattagtgaatgtattatctcgcagcggaagtcggtttgttgtcattaaataa

SEQ ID NO: 7236 - protein, 449 aa, Rickettsiella grylli
MKRLLYQLLFGVLLIINIYPSSYASWSLNSVHQNKDNFSQALQPILPAVVNVSVQGDIPLNQLPPPVPGRPYPRHFESMGSGVIVDAKAGYVLTNAHVIREAKTITVTLSDGRVLNATLKGSDPASDIALLTITPDHLTAIPLGNSDHLKVGDFVAAIGNPFGLNQTVTSGIVSALQRTGLGIEGFENFIQTDASINPGNSGGALINLQGQLIGINTAILTPGLNAGNIGIGFAIPINMAYGVMKQLAEYGSVKRGLMGVLVQDLTPILATALHIPSTLNGALVSQVPRYSPAAAAGIHIGDIIQSINGIPIHNSGQVKNIVGLLRVNDKINIKLLRKGKTITTVLNLTDPKQYKKVAEQNNPFLYGLMLRDFNQTITGQGNLRGVEVVDMDENSPAWHAGIRPGDVILSANQINVTEVPQLQAIAKQNKQGLLVNVLSRSGSRFVVIK

SEQ ID NO: 7237 - DNA, 1353 bp, Alteromonadales bacterium TW-7
  CDS (1)..(1353): transl_table=11
atgaaaatgaaattatcacttatcagtgctgctattttatctacaagcttattaatgagcccggtagcgtcttatgcaaagttaccaatagcagttaacgggcaacagctacctactcttgcacctatgcttgaacaaatttccccaggtgttgtgagtattcaggtttcgggctctaaagaagttcgccgccgcgccgatccacttgagttcttttttggccaacaacaacctcgcagccaaaagcgccaatttagtggtttgggttcaggtgtgattatcaatgcagatgaaggttatgtggttactaataatcacgtgatccaggatgctgaaaaaatgatcgttacactcgaagatggacgtgaatttgaagctactaaaattggtacagataaagagtctgacattgcactactacaaatagacgctgatgatctgacagaaatcaaacttgctaactcagaccaattacgagtcggcgattttgcagttgctataggcaacccgtttggtttaagccacaccgtcacctcaggtattgttagtgcccttggacgcagtggtttaaacattgaaggttacgaagatttcattcaaacagacgccgcaattaaccaaggtaattctggcggtgctttagtgaatttaaatggagaactaattggcattaacaccgctattttaggtgcatctggtggtaacgttggaattggttttgctattccttcaaacatgatgaaaaacttggttgatcagattattgagcatggtgaagtacgccgtggctcgctaggcatatcgggtcgcccacttgatgcgggcttagccaaagcacaacagcttgatgttaaacaaggtgcttatgtaatgcaggtaatggatgatactgctgcaagtaaagcaggcataaaagccggggatgttattgtaagcattaatggcagcgatataagcggcttccatgaactgcgcagtaaaattgctacattaggtgaaggcagagaaataaagctcagtatttaccgagatggaaaaataaaaacgctcaaagtcacactcgacggtgcatctggtgttaaagcggttggcgaagaactgcaccccgcatttcaaggggctgaattagaaaatgttcagaaaaataacgcaaaggggattgaaattacttctgtcgatcctcgctctccttctgcacgggtaggcctagaagaaggtgacatgatagtccaagtgaaccgccaacgtgttgagacaattcgcgatatgaataaaatcatcgaaaatacgaaaggtaatattgtactaggcgttaaacgtggacgtgagtctatatttatcctaattcagtaa

SEQ ID NO: 7238 - protein, 450 aa, Alteromonadales bacterium TW-7
MKMKLSLISAAILSTSLLMSPVASYAKLPIAVNGQQLPTLAPMLEQISPGVVSIQVSGSKEVRRRADPLEFFFGQQQPRSQKRQFSGLGSGVIINADEGYVVTNNHVIQDAEKMIVTLEDGREFEATKIGTDKESDIALLQIDADDLTEIKLANSDQLRVGDFAVAIGNPFGLSHTVTSGIVSALGRSGLNIEGYEDFIQTDAAINQGNSGGALVNLNGELIGINTAILGASGGNVGIGFAIPSNMMKNLVDQIIEHGEVRRGSLGISGRPLDAGLAKAQQLDVKQGAYVMQVMDDTAASKAGIKAGDVIVSINGSDISGFHELRSKIATLGEGREIKLSIYRDGKIKTLKVTLDGASGVKAVGEELHPAFQGAELENVQKNNAKGIEITSVDPRSPSARVGLEEGDMIVQVNRQRVETIRDMNKIIENTKGNIVLGVKRGRESIFILIQ

SEQ ID NO: 7239 - DNA, 1434 bp, Pseudomonas putida GB-1
  CDS (1)..(1434): transl_table=11
atgtcaataccacgcttgaaatcctacctaacgatgttcgccgccgtgctcatgctcggccaggtgctcaccgcccaggccgaggaagccctgccggacttcaccagcctggtcgagcaggcctcgccggcggtggtcaacatcagtaccaagcagaagctgccggatcgccgcatcgctgcagggcagatgccggacctggaaggcctgccgccgatgttccgcgagttcttcgaacgcaacatgccgcaacaaccgcgctcgccacgcggtgaccgccagcgcgaggcgcagtcgctgggctcgggcttcatcatttccagtgatggctacgtgctcaccaacaaccacgtggtcgccgacgccgacgagatcatcgtccgcctgtcggaccgcagcgagctgcaggccaaattggtcggcaccgacccgcgtaccgacgtggccctgctgaaggtcgagggcaagaacctgccgatcgtgaagctgggtgattccgagaagctcaaggtgggtgagtgggtactggccatcggttcgccgttcggcttcgaccattcggtgaccaaaggtatcgtcagcgccaagggccggaccctgcccaatgacacctacgtaccgttcatccagaccgacgtggccatcaacccgggtaactccggtggtccgctgttcaacatgaagggcgaagtggtgggtatcaactcgcagatcttcacccgttctggcggtttcatgggcttgtcgttcgccatcccgatcgatgtggcgatcgatgtctccaaccagctgaaaaaagacggcaaggtcagccgtggctggctgggtgtagtgattcaggaggtcaacaaggacctggctgaatccttcggcctggacaagcctgcgggtgccctggtggcccaggtattggaaaacggcccggctgccaagggcggcctgcaggtgggtgacgtgatcctcagcatgaacggccagcctatcgtcatgtcggccgacctgccgcacctggttggcggcctcaaggatggcgagaaggccaagctggaaatcatccgcaacggcaagcgtcagaacctggacatcagcgtgggcgcactgccggacgacgatgccgacattggcactggcgccgaaggcagcgccgagcgcagcagcaaccgcctgggcgtatcggtggccgacctgaccgccgagcagaagaaatccctggagctcaagggaggcgtggtcatcaaggaagtgcaggatggccccgcagccatgattggcctgcgcccgggtgatgtcatcagccacctgaacaaccaggccatcggttcggccaaggaattcaccgaaatcgccaaggagctgccgaagaaccgttcggtatcgatgcgcgtcctgcgtcaggggcgcgccagcttcatcaccttcaagcttgctgaataa

SEQ ID NO: 7240 - protein, 477 aa, Pseudomonas putida GB-1
MSIPRLKSYLTMFAAVLMLGQVLTAQAEEALPDFTSLVEQASPAVVNISTKQKLPDRRIAAGQMPDLEGLPPMFREFFERNMPQQPRSPRGDRQREAQSLGSGFIISSDGYVLTNNHVVADADEIIVRLSDRSELQAKLVGTDPRTDVALLKVEGKNLPIVKLGDSEKLKVGEWVLAIGSPFGFDHSVTKGIVSAKGRTLPNDTYVPFIQTDVAINPGNSGGPLFNMKGEVVGINSQIFTRSGGFMGLSFAIPIDVAIDVSNQLKKDGKVSRGWLGVVIQEVNKDLAESFGLDKPAGALVAQVLENGPAAKGGLQVGDVILSMNGQPIVMSADLPHLVGGLKDGEKAKLEIIRNGKRQNLDISVGALPDDDADIGTGAEGSAERSSNRLGVSVADLTAEQKKSLELKGGVVIKEVQDGPAAMIGLRPGDVISHLNNQAIGSAKEFTEIAKELPKNRSVSMRVLRQGRASFITFKLAE

SEQ ID NO: 7241 - DNA, 1413 bp, Pasteurella haemolytica
  CDS (1)..(1413): transl_table=11
atgaggaacattcacaatatgaacaaaacaatgaaaaaatcatttttaactgcattcattttaggctcaaccattgccgcaatgccggcgtatgcagaagcaacattacccacagccgtaaatgggcaagctgtgccaagccttgcaccaatgctggaaaaagttcgcccggcggtggtgagtattgcagtagaaggtaaaaccaaaggcgatagccgccgcagtcgtgaaattccggaagaatttgaatttttcttcggtcctcacgccgatttattcggcaaccgctcatcagctccacgcaatttccgtggcgttggatcaggtgcagtcatcaatgccgaaaaaggttatgtgattaccaataaccacgtgatcgacaatgccgataaaattaccgtaaaacttgaagacggacgtgaatttaaagctaaattagttggtgctgatcccctttcagatgtggcgttaattcaagttgaagatccaaaaaacttaactgaaattaaattcgccgattccgataaattacaagtgggcgattttacagttgcaatcggtaacccgtttggcttaggacaaactgttacttcaggcatcatctcggcacttggtcgttcaaccggtcaatccgatgaaggctatgaaaactatattcaaaccgatgcggcagttaaccaaggtaactctggcggcccgttaattaacttaaacggcgaattaatcggaattaacaccgctattatttctccaagtggtggcaatgccggtatcgcctttgcgattccaagtaatatggcaaacagcttggtgactcaaattattgagtttggtgaagtaaaacgtggaatgttaggcattaaaggcggtgaattgaatgctgaccttgctaaagagttcaatatttccacccaacaaggggcatttgtaagcgaagtcttaccggattctgctgctgctaaagccggctttaaagcaggtgatgtgattactgaaatcaacggtcaaaaaatccgtagtttcagcgaattacgagcaaaagtagctacttcaggtgtaggtaaagagattgaacttacttacctgcgtgacggcaaagaagccaaagcaaaagtgaccttacaatcggattctgaagccaaagttactgcttcaaacctcattccggcattaaaaggggcagattttaacaactacaatgccaaaggcattaaaggggttgaaatttctaacgtagaaaaaggctcgattgctgaaatgcgaagcctcaaaaaaggcgatattatcatcggcgtgaaccgccactcggtagaaaacattgccgatttacgcaaaatattagaaaccaagccatctgtggttgcactcaatattgtgcgtgacggtgcaaatttctatgtgattttgcaataa

SEQ ID NO: 7242 - protein, 470 aa, Pasteurella haemolytica
MRNIHNMNKTMKKSFLTAFILGSTIAAMPAYAEATLPTAVNGQAVPSLAPMLEKVRPAVVSIAVEGKTKGDSRRSREIPEEFEFFFGPHADLFGNRSSAPRNFRGVGSGAVINAEKGYVITNNHVIDNADKITVKLEDGREFKAKLVGADPLSDVALIQVEDPKNLTEIKFADSDKLQVGDFTVAIGNPFGLGQTVTSGIISALGRSTGQSDEGYENYIQTDAAVNQGNSGGPLINLNGELIGINTAIISPSGGNAGIAFAIPSNMANSLVTQIIEFGEVKRGMLGIKGGELNADLAKEFNISTQQGAFVSEVLPDSAAAKAGFKAGDVITEINGQKIRSFSELRAKVATSGVGKEIELTYLRDGKEAKAKVTLQSDSEAKVTASNLIPALKGADFNNYNAKGIKGVEISNVEKGSIAEMRSLKKGDIIIGVNRHSVENIADLRKILETKPSVVALNIVRDGANFYVILQ

SEQ ID NO: 7243 - DNA, 1736 bp, Edwardsiella tarda
  CDS (224)..(1639): transl_table=11
taatcatctgctggatatatcgtgttcacgcgttggctttgtaaagtcgggcgcataaatatttacgcttccttgactttattgcggtgaacttcatttcagtttactactcttagtaaacataatatcaccgtcacggtgatagcggcgccgtctggcaacgccgttcagcgccgctgaatgaatccgttttatcgttgctattacgagagaaaatcgtgctatgaaaaaaaccactttagtattgagtgccgttgcattgagtctgggtatggcgttgagtccgatgtcggccagcgcggcagagacctcttccgccaccacagcccaggcgctgccgagcctggcaccaatgctggagaaagtgatgccgtccgtggtcagcatcaacgtcgagggcagcgcgaccgtcaataacagccgcgtgccgccgcagttccagcagttttttggcgaagactccccgctgtgccagccgggttcgccgttcggggattcgccgatgtgccagggcggcggcaatgcgccgtccaaagagcgctttaaggcgctgggctccggggtcattatcgacgcgggtaaaggctatgtcgtgaccaacaaccacgtggtggccaacgccgacagcattaaagtgcagctgagcgacggtcgccgcttcgacgccaaggtgatcggcaccgatccgcgtaccgatatcgcgctgatccagctgaaggatgccaagaacctgaccgccattaaaatggcggactctgacaatttgcgcgtgggcgactatgcggtggcgatcggcaacccctacgggctgggtgagaccgtcacctccgggatcgtttccgcgctgggccgcagcggcctgaacgtggaaaactacgaaaactttattcagactgacgcggcgattaaccgcggtaactccggcggtgcgctggtgaacctgaacggcgatctcatcgggatcaacaccgccattctggcgccggacggcggcaacatcggcatcggcttcgccattccgagcaacatggtgaaaaacttgaccggtcagatggtggagtacggccaggtgaaacgcggtgagctggggatcatggggaccgagctgaactccgagctggcgaaggcgatgaagatcgacgcccagcgcggcgcctttatcagccaggtgctgccgaagtcagccgccgcgaaggccgggctgaaacggctagatgtcatcgtctccctgaacgggaagaacatctccagcttcgcttccttccgcgctgaaatcggcaccatgccggtcggcagcaagctggcgctggggatcatccgcgacggtaagccgatgaacgtggaggtaaccttggagcagagcgcgcagagccaggtggcctctgacaacatcttcagcggtatcgaaggggccgagctgagcaatgcggccggtggcaagggcgtgaaggtggacaacgtgaagaaaggctccaccgccgcgcgtatcggtctgcagaagggcgacgtgatcctgggcgtgaaccagcacgcgatcgctaacatcggtgagctgcgtaaaattctggatgccaagccgccggtgctggcgctgaacatccagcgtggcgacaacaccctgtatctgctgatgcagtaattcctccgcgcgtcgcctggatatcgggtgacgcccccggaaagacgaataccccgtgagcgtattgcccacggggtatttttttatccgcatctca

SEQ ID NO: 7244 - protein, 471 aa, Edwardsiella tarda
MKKTTLVLSAVALSLGMALSPMSASAAETSSATTAQALPSLAPMLEKVMPSVVSINVEGSATVNNSRVPPQFQQFFGEDSPLCQPGSPFGDSPMCQGGGNAPSKERFKALGSGVIIDAGKGYVVTNNHVVANADSIKVQLSDGRRFDAKVIGTDPRTDIALIQLKDAKNLTAIKMADSDNLRVGDYAVAIGNPYGLGETVTSGIVSALGRSGLNVENYENFIQTDAAINRGNSGGALVNLNGDLIGINTAILAPDGGNIGIGFAIPSNMVKNLTGQMVEYGQVKRGELGIMGTELNSELAKAMKIDAQRGAFISQVLPKSAAAKAGLKRLDVIVSLNGKNISSFASFRAEIGTMPVGSKLALGIIRDGKPMNVEVTLEQSAQSQVASDNIFSGIEGAELSNAAGGKGVKVDNVKKGSTAARIGLQKGDVILGVNQHAIANIGELRKILDAKPPVLALNIQRGDNTLYLLMQ

SEQ ID NO: 7245 - DNA, 1368 bp, Enterobacter cloacae
  CDS (1)..(1368): transl_table=11
atgaagaaaaaaaaccagctgttgagcgctatcgcgttaagtgtcgggttatctctctcggcgtccgtccctgtatttgccgccattccctcccaggtgcctggccaggcggccattccaagcctcgcgcctatgctggaaaaagtgttgccggcggtcgtcagcgttcaggttgagggcaccgcagtacaaagccaacgcgtccctgaagaactgaaaaaatattttggcgatgagtctcccgaccagcaggctcagccttttgaaggcctgggttctggcgtcattattgatgcggcaaaaggctatatcctgaccaacaaccacgtcatcagccaggccgataaaatcagcgtccagctgaacgatggccgcgaatttgatgccaaactgatcggcggcgatgaccagagcgacatcgcgctgctgcaggtgcaaaacccaagcaacctgacccagattgccatcgcggattccgacaaactgcgcgtcggcgattttgccgtcgccgtgggcaacccctttggtttagggcagaccgccacctccgggatcgtctcggcgctcgggcgcagcggcctcaatctggaagggctggaaaactttatccagaccgatgcctcaatcaaccgtggtaactccggcggagcattgctcaaccttaacggcgagctgattgggattaacacggcgattctggccccgggcggcggcagcatcgggatcggttttgctatccccagcaatatggccaaaaccctggcgcagcaattgatccagttcggtgaaatcaaacgcgggctgctgggtattaaaggtatggagatgagcgcggatatcgcaaaagcgttcaatatcaacgtacagcgcggggcgtttgtcagtgaagtgctgccaaactccggctcggcaaaagcgggcgtgaaatcgggagatgtgatcgtcagcctgaacgacaaaccgctgaatagctttgcagaactgcgctcacggattgccacgacggaacctggcgccaaagtgaagctgggcctgatccgtgacggtaagccgcttgacgttgaagtgacgctggataagagcacttcatcctcggccagcgcggagcttatcgccccggcgctacagggggctacgttgagcgacgggcagctgaaggacggtacgaaaggcatcagcatcgacaccgtcgagaagagcagccctgccgcacaggccggattgcatcaggatgacgtgattatcggtgtcaaccgcaaccgcgtgcagtctattgccgaactgcgcaaggtgctggaaagcaaaccagcggttattgccctgcaggtcatgcgtggcaatgagtccatctatattctgttgcgctaa

SEQ ID NO: 7246 - protein, 455 aa, Enterobacter cloacae
MKKKNQLLSAIALSVGLSLSASVPVFAAIPSQVPGQAAIPSLAPMLEKVLPAVVSVQVEGTAVQSQRVPEELKKYFGDESPDQQAQPFEGLGSGVIIDAAKGYILTNNHVISQADKISVQLNDGREFDAKLIGGDDQSDIALLQVQNPSNLTQIAIADSDKLRVGDFAVAVGNPFGLGQTATSGIVSALGRSGLNLEGLENFIQTDASINRGNSGGALLNLNGELIGINTAILAPGGGSIGIGFAIPSNMAKTLAQQLIQFGEIKRGLLGIKGMEMSADIAKAFNINVQRGAFVSEVLPNSGSAKAGVKSGDVIVSLNDKPLNSFAELRSRIATTEPGAKVKLGLIRDGKPLDVEVTLDKSTSSSASAELIAPALQGATLSDGQLKDGTKGISIDTVEKSSPAAQAGLHQDDVIIGVNRNRVQSIAELRKVLESKPAVIALQVMRGNESIYILLR

SEQ ID NO: 7247 - DNA, 1368 bp, Pasteurella piscicida
  CDS (1)..(1368): transl_table=11
atgagaaaacctctgcttgttttaagtgcactggctttaggtattagttcagttgtcaccccgatgacggcaactgcggcgttacctaccgccgttaataatcaacaagtacctagccttgcgccaatgcttgagcaagtaacaccagctgtagtaagcattgcagttgaaggtaaacacgtttccaaacagcgcctacctgaggcttatcgctttttctttggtccagattttcctaccgagcaagtacgagaacaaccatttagggggttaggctcgggggttatcattgacgctaaaaaagggtatgtcgttaccaataaccatgttattgatggcgcagataccatcaaagtacagctttctgacggacgtgagataaaagcaaagctgcttggtaccgataaaatgtctgatattgcgttgctgcaattagaagatgccaaagatcttacggctatcaaactcgctgattctgataatcttcgcgtaggcgatttcgccgttgctatcggtaacccatttggcctaggacaaacagtaacatcaggtattgtttccgctcttggtcgtagtggtttaaatatcgagaacttcgaaaactttatccaaactgatgcgccaatcaatagcggtaactcaggtggtgccttagtaaacttaaacggtgagttgattggtattaataccgcgattcttgcgcctaacggtggtaacgtcggtatcggttttgcaatccctgctaatatggtgaaaaacttaacagatcaacttatcgaatttggtcaagttaagcgcggtgttctgggtgttactggtggtgagctaacctctgagctagctgaaacctttggttataaaacaaatcacggcgcgtttgtaaaccaagtacttcctgaaggctctgcggcaaaagcaggtctaaaagcaggtgatattattgtttcagtcaataataagccgattcgtactttcagtgaattacgcgcaaaaattgtaactctaggtgctggtaagaaagtaacactaggcctaattcgcgatggtaaagagctgaatgttcctgtgactttagaagcagcaaaacagactcaagttaaagctgatgatctgcatgaaagcttagccggtgctgaatttgctaatactagcccagaagataaagttcacggagttaaagtaaccgagctgaacaagcaatctattgcggctcgctatggcttgaagaagggcgatatcattattggtctaaaccgtcagccaattaaaaaccttggcgaacttcgtaaggcgcttgagaaaaaaccaaacgtacttgcaatggaagttaaacgtggtgatagcgtactgtatttaatcatgcgttaa

SEQ ID NO: 7248 - protein, 455 aa, Pasteurella piscicida
MRKPLLVLSALALGISSVVTPMTATAALPTAVNNQQVPSLAPMLEQVTPAVVSIAVEGKHVSKQRLPEAYRFFFGPDFPTEQVREQPFRGLGSGVIIDAKKGYVVTNNHVIDGADTIKVQLSDGREIKAKLLGTDKMSDIALLQLEDAKDLTAIKLADSDNLRVGDFAVAIGNPFGLGQTVTSGIVSALGRSGLNIENFENFIQTDAPINSGNSGGALVNLNGELIGINTAILAPNGGNVGIGFAIPANMVKNLTDQLIEFGQVKRGVLGVTGGELTSELAETFGYKTNHGAFVNQVLPEGSAAKAGLKAGDIIVSVNNKPIRTFSELRAKIVTLGAGKKVTLGLIRDGKELNVPVTLEAAKQTQVKADDLHESLAGAEFANTSPEDKVHGVKVTELNKQSIAARYGLKKGDIIIGLNRQPIKNLGELRKALEKKPNVLAMEVKRGDSVLYLIMR

SEQ ID NO: 7249 - DNA, 2077 bp, Klebsiella pneumoniae
  CDS (374)..(1807): transl_table=11
tctagatgcaccttgcaggcatgcaagcttcggccgcctaggccgcggccgcacttgtgtataagagtcaggtcaccggcttggcctatgttgaagcggtaaataaactggcgcgtacggcgcccgaatttgcgctgatggaatactattatcgctgccgtctgattcaggactatatcagcgggatgacggatttgtatgcgtgggatgaatatcggcgactcatggcggtggaataggctggagttttgtaaagatggacaataaatttttactttttccagaaacttaattccggaacttagcgttataaaatgactctgatagtcacgtacacagcaactttcgttacctgatattgagattgaaactgatgaaaaaaaccacgttagcaatgagtgcactggctctgagtttaggtctggcgttgtccccgctctctgcgagcgcggcagaaacggcatcttcggccactaatgcacagcagatgccaagcctggccccgatgctggagaaggtgatgccgtcggtggtgagcattaacgttgaaggtagcaccaccgttaataccccacggatgccacgtaacttccagcagttctttggcgataattcgccgttctgccaggatggttctcctttccagagttcgccgttttgccagggcggcggacagggcggtcagcctgacggcggccagcaacagaaatttatggcgctgggctccggcgtcatcattgatgccgccaaagggtatgtggtgaccaacaaccacgtcgttgacaacgccaccacgattaaggttcagctgagcgatggccgtaggtttgatgccaaagtcgtcggcaaagatccgcgctctgatatcgcgctgattcagattcaggatccaaaaaacctgacggcgattaagcttgccgactccgatgcgctgcgcgtcggtgattacaccgtggctatcggcaacccgttcggtctgggcgaaaccgtgacctccgggattgtctccgcgctgggccgtagcggcctcaacgtggaaaactacgaaaactttatccagaccgatgcggcgattaaccgcgggaactccggcggtgcgctggtgaacctcaacggcgagctgatcggtatcaacaccgccattctggcgccggacggcggcaacatcggtatcggttttgctatcccgagcaacatggtgaaaaacctgaccgagcagatggtgaaatatggccaggtgaaacgcggtgagctcggcattatgggcaccgaactgaactctgagctggcgaaagcgatgaaagtcgatgcccagcgcggggccttcgtcagccaggtaatgccaggttcggcggccgcgaaagcgggcattaaagccggcgatgtcatcacgtccctcaacgggaaagcgatcagcagcttcgccgcgctgcgtgcccaggtcggcaccatgcctatcggcagcaaagttgagcttggtctgttgcgcgacggcaaaccggtgaccgtgaccgtcgaactgcagcagagcaaccagacccaggttgactccagcaccatcttcaacgggattgaaggggcagaaatgagcaataagggtcaggataagggcgtggtggtcaataatgtgaaagccggtaccccggcggcacagattggcctcaagaaaggcgatgtcatcattggggcgaatcagcagccggtgaaaaacatcgccgatctgtggaaaatcttcgacgccaaaccgtccgtactggcgctgaacattcagcgcggcgacgcctctatctatctgctgttgcagtaaccgccagcgctcgcttcccagccccttccctcgccgagggcaggggcttttttcgttctgtgaccgcccccacaactccacatatctcaccccggcttagtgcaaatgcacaatgcagcgcgacgatgactcttttatgctggtgcccagcaaaggggaggactacatggctggctggcatcttgataccaaaatggcgcaggatattgtggcgcggaccatgcgcatcatcgataccaatatcaacgtgatggatgcccgtgggcggat

SEQ ID NO: 7250 - protein, 477 aa, Klebsiella pneumoniae
MKKTTLAMSALALSLGLALSPLSASAAETASSATNAQQMPSLAPMLEKVMPSVVSINVEGSTTVNTPRMPRNFQQFFGDNSPFCQDGSPFQSSPFCQGGGQGGQPDGGQQQKFMALGSGVIIDAAKGYVVTNNHVVDNATTIKVQLSDGRRFDAKVVGKDPRSDIALIQIQDPKNLTAIKLADSDALRVGDYTVAIGNPFGLGETVTSGIVSALGRSGLNVENYENFIQTDAAINRGNSGGALVNLNGELIGINTAILAPDGGNIGIGFAIPSNMVKNLTEQMVKYGQVKRGELGIMGTELNSELAKAMKVDAQRGAFVSQVMPGSAAAKAGIKAGDVITSLNGKAISSFAALRAQVGTMPIGSKVELGLLRDGKPVTVTVELQQSNQTQVDSSTIFNGIEGAEMSNKGQDKGVVVNNVKAGTPAAQIGLKKGDVIIGANQQPVKNIADLWKIFDAKPSVLALNIQRGDASIYLLLQ

SEQ ID NO: 7251 - DNA, 1362 bp, Aeromonas hydrophila
  CDS (1)..(1362): transl_table=11
atgcgtaaacctctttctgtgctcagtgtgttagccctcagtgtcggtatcgccatgtctgcggcccccgtgcaggctgcactgccctcccttttggcgaacaatcaggagatgccgagcctggcgccggtactcgaacaagtcacccctgccgtggtcaacatttccgtctccggcaagaagatcacccgccagcgtctgccggaacagttccgcttcttcttcggccccaacatgcctgacgaacaggtaagcgagcagcccttccaggcgctcgggtccggtgtcatcatcgacgccaagaagggctacgtgatcaccaacgcccacgtggtgcacgaggcggacgagatcaaggtcaacctgaaggatggccgtgaatacgccgccaagaagatcggcgaagacaagcagtccgacatcgctctgctgcaaatcaaggccgaggatctggttcaaatcaaattcgccgactctgacgagctgcgggtcggtgactatgcgctggccatcggcaacccgttcggtctcggccagaccgtcacctccggcatcgtcagtgcactcggtcgcagcggcctcaacatcgagaacctggaaaacttcatccagaccgatgcggccatcaactcgggcaactcgggtggcgccctgctcaacctgcgcggcgagctgatcggcatcaacaccgccatcctgggccccaacggcggcaacatcggcatcggctttgccattccgtccaacatggtgcgcgacctgtccgaacagatcgtgaaatacggtgaagtccgtcgcggccagctgggcatcatagggaccgagctcacctctgaagtggccaagaccttcggctacaacaagaaggacggcgccttcgtcaaccaggtgatgcctgactctgccgccgccaaggccggcatcaagccgggcgacatcatcgtcagcatcgacggcaaggccattcgctccttcggcgagctgcgggccaagattgccaccatgggtgccgacaagcaggtggcactgggcctgatccgcgatggcaaggagcagaccgtcaaggtcaccctgaagaaggcggatgacagcgaaatcctggccagcgcgctgcacccggcactggaaggggccaagctgagcaccaccagcgagccggtgagcggcgtggccgtctccgagatcgatccgcgctcccctgccgccgcctccggtctgcagaagggcgacgtcatcatcggcgtcaaccgcctgcgcatcaactcgctggaagagctgagcaaggcactgaagaacaagccggatgtgctggccctcaacatccagcgcggcgactcttcgctctacctggtaattcgttaa

SEQ ID NO: 7252 - protein, 453 aa, Aeromonas hydrophila
MRKPLSVLSVLALSVGIAMSAAPVQAALPSLLANNQEMPSLAPVLEQVTPAVVNISVSGKKITRQRLPEQFRFFFGPNMPDEQVSEQPFQALGSGVIIDAKKGYVITNAHVVHEADEIKVNLKDGREYAAKKIGEDKQSDIALLQIKAEDLVQIKFADSDELRVGDYALAIGNPFGLGQTVTSGIVSALGRSGLNIENLENFIQTDAAINSGNSGGALLNLRGELIGINTAILGPNGGNIGIGFAIPSNMVRDLSEQIVKYGEVRRGQLGIIGTELTSEVAKTFGYNKKDGAFVNQVMPDSAAAKAGIKPGDIIVSIDGKAIRSFGELRAKIATMGADKQVALGLIRDGKEQTVKVTLKKADDSEILASALHPALEGAKLSTTSEPVSGVAVSEIDPRSPAAASGLQKGDVIIGVNRLRINSLEELSKALKNKPDVLALNIQRGDSSLYLVIR

SEQ ID NO: 7253 - DNA, 1476 bp, Shigella sonnei
  CDS (1)..(1476): transl_table=11
atgaaaaaaaccacattagcactgagtcgactggctctgagtttaggtttggcgttatctccgctctctgcaacggcggctgagacttcttcagcaacgacagcccagcagatgccaagccttgcaccgatgctcgaaaaggtgatgccttcagtggtcagcattaacgtagaaggtagcacaaccgttaatacgccgcgtatgccgcgtaatttccagcagttcttcggtgatgattctccgttctgccaggaaggttcaccgtttcagagctctccgttctgccaggggggccagggcggtaatggcggcggccagcaacagaaattcatggcgctgggttccggcgtcatcattgatgccgataaaggctatgtcgtcaccaacaaccatgttgttgataacgcgacggtgattaaagtccagctgagcgatggccgtaagttcgacgcgaagatggttggcaaagatccgcgctctgatatcgcgctgatccaaatccagaacccgaaaaacctgaccgcaattaagatggcggattctgatgcactgcgcgtgggtgattacaccgtagcgattggtaacccgtttggtctgggcgagacggtaacttccgggattgtctctgcgctggggcgtagcggcctgaatgccgaaaactacgaaaacttcatccagaccgatgcagcgatcaaccgtggtaactccggtggtgcgctggttaacctgaacggcgaactgatcggtatcaacaccgcgatcctcgcaccggacggcggcaacatcggtatcggttttgctatcccgagtaacatggtgataaacctgacctcgcagatggtggaatacggccaggtgaaacgcggtgagctggggattatggggactgagctgatctccgaactggccaaagcgatgaaagttgacgcccagcgcggtgctttcgtaagccaggttctgcctaattcctctgctgcaaaagcgggcattaaagcgggtgatgtgatcacctcactgaacggtaagccgatcagcagctttgccgcactgcgtgctcaggtgggtactatgccggtgggcagcaaactgaccctgggcttactgcgcgacggtaagcaggttaacgtgaacctggaactgcagcagagcagccagaatcaggttgattccagctccatcttcaacggcattgaaggcgctgagatgatcaacaaaggcagagatcagggcgtggtagtgaacaacgtgaaaacgggcactccgcgtgcgcagatcggcctgaagaaaggtgatgtgattattggcgcgaaccagcaggcagtgaaaaacatcgctgaactgcgtaaagtgctcgacagcaaaccgtctgtgctggcactcaacattcagcgcggcgaccgccatctacctgttaatgcagtaatctccctcaaccccttcctgaaaacgggaaggggttctccttacaatctgtga

SEQ ID NO: 7254 - protein, 491 aa, Shigella sonnei
MKKTTLALSRLALSLGLALSPLSATAAETSSATTAQQMPSLAPMLEKVMPSVVSINVEGSTTVNTPRMPRNFQQFFGDDSPFCQEGSPFQSSPFCQGGQGGNGGGQQQKFMALGSGVIIDADKGYVVTNNHVVDNATVIKVQLSDGRKFDAKMVGKDPRSDIALIQIQNPKNLTAIKMADSDALRVGDYTVAIGNPFGLGETVTSGIVSALGRSGLNAENYENFIQTDAAINRGNSGGALVNLNGELIGINTAILAPDGGNIGIGFAIPSNMVINLTSQMVEYGQVKRGELGIMGTELISELAKAMKVDAQRGAFVSQVLPNSSAAKAGIKAGDVITSLNGKPISSFAALRAQVGTMPVGSKLTLGLLRDGKQVNVNLELQQSSQNQVDSSSIFNGIEGAEMINKGRDQGVVVNNVKTGTPRAQIGLKKGDVIIGANQQAVKNIAELRKVLDSKPSVLALNIQRGDRHLPVNAVISLNPFLKTGRGSPYNL

SEQ ID NO: 7255 - DNA, 1398 bp, Buchnera aphidicola subsp
  CDS (1)..(1398): transl_table=11
atgaaaaaaataaccatgatcttcaatacagtattaatatttctagtttttttattaatttctggtttttcttggcataagtcagaaattcctactcaagaaaagttttttgaatcaaaatcttttagtttgtctacagttttggaaaaagtaataccgtcagtagtgagtattactgttgaaggtaatgtaacacaatctactagaattcctcgtcaattccagtcgtcttttaataaaaaagttttagattgtttcgggatttcacgatgtatgactcgtcagggaaaatttcatgcgttaggatcaggagtgattttagattctaaaaatggatatatagtaactaatagtcatgttgtagatcgtgcaaacaaaattcaagttcagttaagtaatggttgtaagcacgaagcagtagtaattggaaaagatgcacgttttgacattgctataattaaattaaaaaaagtaaaaaatcttcatgaaattaaaatgtctaattcagatatattaaaagtgggtgactatgttattgctattggaaatccttatggtttaggagaaacagttacatcaggcataatttctgctttacatcgcagcggattaaatattgaaaattatgaaaattttattcaaactgatgctgcaatcaatcgaggaaattctggtggtgctttagttaatttaaaaggtgaattaattggaattaatactgctattttgactcctgacggtggaaatattggcattggttttgcaattcctatcaatatggtaaataatttgactacgcaaattcttgaatatggacaagtcaaacaaaatgaactaggtattgtaggtatggaattaaattctgatttagctaaagtattgaaaattaatgttcacagaggtgcgtttattagtcaagtgttatccaagtctcctgctgatgtgtctggaattaaacctggtgatgttataatattattgaatagaaaaccaattgctagttttgctactttacgtgctgaaatagcatcatttccgataaagacaaaaatagagttaggaatactaagaaataaaaaagttaaatttattattgtagaacttaagcaaaaaattcaaagcaaaattgattcttctgttttatgtaaattaatttcgggtgctagtttaagtaattttcgtattcatggacagaataaaggtatttgcgttaattacgtaaataatggaacgccagcttatcgaacaggactaagaaaaaatgatattatttttgaagtcaataaatatcaagtgtcgtctttaagtaattttcaaaaagtgcttaaaactaaacctttaatattagttttgcatgttaaacgtgggaatgatgttttatatcttgtcacgcattaa

SEQ ID NO: 7256 - protein, 465 aa, Buchnera aphidicola subsp
MKKITMIFNTVLIFLVFLLISGFSWHKSEIPTQEKFFESKSFSLSTVLEKVIPSVVSITVEGNVTQSTRIPRQFQSSFNKKVLDCFGISRCMTRQGKFHALGSGVILDSKNGYIVTNSHVVDRANKIQVQLSNGCKHEAVVIGKDARFDIAIIKLKKVKNLHEIKMSNSDILKVGDYVIAIGNPYGLGETVTSGIISALHRSGLNIENYENFIQTDAAINRGNSGGALVNLKGELIGINTAILTPDGGNIGIGFAIPINMVNNLTTQILEYGQVKQNELGIVGMELNSDLAKVLKINVHRGAFISQVLSKSPADVSGIKPGDVIILLNRKPIASFATLRAEIASFPIKTKIELGILRNKKVKFIIVELKQKIQSKIDSSVLCKLISGASLSNFRIHGQNKGICVNYVNNGTPAYRTGLRKNDIIFEVNKYQVSSLSNFQKVLKTKPLILVLHVKRGNDVLYLVTH

SEQ ID NO: 7257 - DNA, 1428 bp, Salmonella typhimurium
  CDS (1)..(1428): transl_table=11
atgaaaaaaaccacattagcaatgagtgcactggctctgagtttaggtttggcattgtcgcctctgtctgccacggcggctgaaacgtcctcttcagcaatgactgcccagcagatgccaagcctggcaccgatgctcgaaaaagtgatgccatcggtggtcagtattaatgttgaaggtagcaccacggtgaatacgccgcgtatgccgcgtaatttccagcagttctttggcgatgactccccgttctgccaggacggttctccgttccagaattctccgttctgccagggcggcggtaacggcggcaacggcggtcaacaacagaaattcatggcgctgggctccggcgtaattattgacgccgcgaagggctacgtcgtcaccaacaaccacgtggttgataacgccagcgtgattaaagtacagcttagcgatgggcgtaaattcgatgctaaagtggtgggcaaagatccgcgttctgatatcgcgctgattcaaattcagaatccgaagaacctgacggcgattaagctggcggactccgacgcgctgcgcgtgggggattataccgtcgctattggtaacccgtttggtctgggcgaaacggtgacgtcaggtatcgtttcggcgctggggcgtagcggcctgaacgtagaaaattacgagaactttattcagaccgacgccgcgattaaccgtggtaactccggcggcgcgctggtgaacctgaacggtgagctgatcggtattaacaccgcgattctggcgccggacggcggcaacatcggtatcggcttcgctatccccagtaacatggtgaaaaacctgacgtcgcagatggtggaatacggccaggtgaaacgcggcgaactggggatcatggggactgagctgaattccgaattggcgaaagcgatgaaagtcgacgcccagcgaggcgcgttcgtcagccaggtgatgccgaattcgtccgcggcgaaagcgggtatcaaagccggggatgtcattacctcgctgaacggtaaaccgatcagcagctttgcggcgctgcgcgctcaggtcggcactatgccggtcggcagcaaaatcagcctcggtctgctgcgtgaaggtaaagcgattacggtgaatctggaactgcagcagagcagccagagtcaggttgattccagcaccatcttcagcgggattgaaggcgctgaaatgagcaataaaggccaggataaaggcgttgtggtgagcagcgtgaaagcgaactcacccgccgcgcaaattggcctcaaaaaaggcgatgtgattatcggcgctaaccagcagccggtgaaaaatatcgccgagctgcgtaagattctcgacagcaagccgtcggttctggcgctgaatattcagcgtggtgatagttctatttatttgctgatgcagtaa

SEQ ID NO: 7258 - protein, 475 aa, Salmonella typhimurium
MKKTTLAMSALALSLGLALSPLSATAAETSSSAMTAQQMPSLAPMLEKVMPSVVSINVEGSTTVNTPRMPRNFQQFFGDDSPFCQDGSPFQNSPFCQGGGNGGNGGQQQKFMALGSGVIIDAAKGYVVTNNHVVDNASVIKVQLSDGRKFDAKVVGKDPRSDIALIQIQNPKNLTAIKLADSDALRVGDYTVAIGNPFGLGETVTSGIVSALGRSGLNVENYENFIQTDAAINRGNSGGALVNLNGELIGINTAILAPDGGNIGIGFAIPSNMVKNLTSQMVEYGQVKRGELGIMGTELNSELAKAMKVDAQRGAFVSQVMPNSSAAKAGIKAGDVITSLNGKPISSFAALRAQVGTMPVGSKISLGLLREGKAITVNLELQQSSQSQVDSSTIFSGIEGAEMSNKGQDKGVVVSSVKANSPAAQIGLKKGDVIIGANQQPVKNIAELRKILDSKPSVLALNIQRGDSSIYLLMQ

SEQ ID NO: 7259 - DNA, 1368 bp, Escherichia coli
  CDS (1)..(1368): transl_table=11
atgaaaaaacaaacccagctgttgagtgcattagcgttaagtgtcgggttaactctctcggcgtcatttcaggccgtcgcgtcgattccaggccaggttgccgatcaggcccctctccccagtctggctccaatgctggaaaaagtgcttccggcagtggtgagcgtacgggtggaaggaacggccagtcagggacagaaaatcccggaagaattcaaaaagttttttggtgatgatttaccggatcaacctgcacaacccttcgaaggtttaggctccggtgtcatcatcaacgccagtaaaggctatgtgctgaccaacaaccatgtgattaatcaggcacagaaaatcagtattcagctcaatgatgggcgcgagtttgatgcaaaactgattggtagcgatgaccagagcgatatcgccctgttacaaattcaaaacccgagcaaattaacgcaaatcgctattgccgactccgataaattgcgcgtcggtgattttgccgtagcggtcggtaacccatttggccttgggcaaaccgccacctctggcattgtttccgcattaggccgcagcgggttgaatcttgaaggtctggaaaactttatccagacagatgcttccattaaccgcggtaactccggcggtgcactattaaaccttaacggtgagttaattggcatcaacactgcaatccttgcgcctggcggcgggagcgtcgggattggatttgccatccccagtaatatggcgcgaacactggcgcagcagcttatcgactttggtgaaatcaaacgcggtttgttaggcatcaaaggcaccgagatgagtgccgatatcgccaaagccttcaaccttgacgtgcagcgtggcgcgtttgtcagcgaagtgttgccaggttctggctcggcaaaagcgggcgtcaaagcgggcgatattattaccagcctcaacggcaaaccgctgaatagctttgctgagttgcgctctcgtatcgcgaccaccgagccgggcacgaaagtgaagcttggcctgctgcgtaacggcaaaccactggaagtagaagtgacgctcgataccagcacctcttcgtcggccagcgctgaaatgatcacgccagcgctggaaggtgcaacgttgagcgatggtcagctaaaagatggcggcaaaggtattaaaatcgatgaagttgtcaaaggaagcccagctgctcaggctggcttgcaaaaagacgatgtgatcattggcgtcaaccgcgatcgggtgaactcgattgctgaaatgcgtaaagtgctggcggcaaaaccggccatcatcgccctgcaaattgtacgcggcaatgaaagcatctatctgctgatgcgttaa

SEQ ID NO: 7260 - protein, 455 aa, Escherichia coli
MKKQTQLLSALALSVGLTLSASFQAVASIPGQVADQAPLPSLAPMLEKVLPAVVSVRVEGTASQGQKIPEEFKKFFGDDLPDQPAQPFEGLGSGVIINASKGYVLTNNHVINQAQKISIQLNDGREFDAKLIGSDDQSDIALLQIQNPSKLTQIAIADSDKLRVGDFAVAVGNPFGLGQTATSGIVSALGRSGLNLEGLENFIQTDASINRGNSGGALLNLNGELIGINTAILAPGGGSVGIGFAIPSNMARTLAQQLIDFGEIKRGLLGIKGTEMSADIAKAFNLDVQRGAFVSEVLPGSGSAKAGVKAGDIITSLNGKPLNSFAELRSRIATTEPGTKVKLGLLRNGKPLEVEVTLDTSTSSSASAEMITPALEGATLSDGQLKDGGKGIKIDEVVKGSPAAQAGLQKDDVIIGVNRDRVNSIAEMRKVLAAKPAIIALQIVRGNESIYLLMR

SEQ ID NO: 7261 - DNA, 24 bp, Artificial sequence
  primer
atgaaaaaaaccacattagcactg

SEQ ID NO: 7262 - DNA, 25 bp, Artificial sequence
  primer
ttactgcattaacaggtagatggtg

SEQ ID NO: 7263 - protein, 471 aa, Artificial sequence
  consensus sequence
  Variant (2)..(2): Xaa in position 2 is any amino acid
  Variant (5)..(33): Xaa in position 5 to 33 is any amino acid
  Variant (34)..(75): Xaa in position 34 to 75 is any or no amino acid
  Variant (79)..(79): Xaa in position 79 is any amino acid
  Variant (81)..(84): Xaa in position 81 to 84 is any amino acid
  Variant (85)..(90): Xaa in position 85 to 90 is any or no amino acid
  Variant (93)..(94): Xaa in position 93 to 94 is any amino acid
  Variant (97)..(97): Xaa in position 97 is any amino acid
  Variant (100)..(102): Xaa in position 100 to 102 is any amino acid
  Variant (104)..(107): Xaa in position 104 to 107 is any amino acid
  Variant (109)..(109): Xaa in position 109 is any amino acid
  Variant (111)..(111): Xaa in position 111 is any amino acid
  Variant (113)..(113): Xaa in position 113 is any amino acid
  Variant (114)..(114): Xaa in position 114 is any or no amino acid
  Variant (116)..(118): Xaa in position 116 to 118 is any amino acid
  Variant (120)..(122): Xaa in position 120 to 122 is any amino acid
  Variant (124)..(124): Xaa in position 124 is any amino acid
  Variant (126)..(128): Xaa in position 126 to 128 is any amino acid
  Variant (130)..(130): Xaa in position 130 is any amino acid
  Variant (132)..(139): Xaa in position 132 to 139 is any amino acid
  Variant (140)..(141): Xaa in position 140 to 141 is any or no amino acid
  Variant (143)..(148): Xaa in position 143 to 148 is any amino acid
  Variant (149)..(149): Xaa in position 149 is any or no amino acid
  Variant (151)..(153): Xaa in position 151 to 153 is any amino acid
  Variant (154)..(154): Xaa in position 154 is any or no amino acid
  Variant (158)..(160): Xaa in position 158 to 160 is any amino acid
  Variant (162)..(162): Xaa in position 162 is any amino acid
  Variant (168)..(170): Xaa in position 168 to 170 is any amino acid
  Variant (171)..(175): Xaa in position 171 to 175 is any or no amino acid
  Variant (177)..(177): Xaa in position 177 is any amino acid
  Variant (179)..(179): Xaa in position 179 is any amino acid
  Variant (182)..(182): Xaa in position 182 is any amino acid
  Variant (185)..(186): Xaa in position 185 to 186 is any amino acid
  Variant (188)..(195): Xaa in position 188 to 195 is any amino acid
  Variant (196)..(202): Xaa in position 196 to 202 is any or no amino acid
  Variant (209)..(209): Xaa in position 209 is any amino acid
  Variant (212)..(212): Xaa in position 212 is any amino acid
  Variant (218)..(218): Xaa in position 218 is any amino acid
  Variant (220)..(220): Xaa in position 220 is any amino acid
  Variant (222)..(223): Xaa in position 222 to 223 is any amino acid
  Variant (225)..(227): Xaa in position 225 to 227 is any amino acid
  Variant (231)..(231): Xaa in position 231 is any amino acid
  Variant (234)..(234): Xaa in position 234 is any amino acid
  Variant (235)..(240): Xaa in position 235 to 240 is any or no amino acid
  Variant (243)..(243): Xaa in position 243 is any amino acid
  Variant (244)..(244): Xaa in position 244 is any or no amino acid
  Variant (246)..(247): Xaa in position 246 to 247 is any amino acid
  Variant (252)..(260): Xaa in position 252 to 260 is any amino acid
  Variant (262)..(265): Xaa in position 262 to 265 is any amino acid
  Variant (267)..(269): Xaa in position 267 to 269 is any amino acid
  Variant (270)..(270): Xaa in position 270 is any or no amino acid
  Variant (273)..(273): Xaa in position 273 is any amino acid
  Variant (276)..(285): Xaa in position 276 to 285 is any amino acid
  Variant (287)..(294): Xaa in position 287 to 294 is any amino acid
  Variant (295)..(300): Xaa in position 295 to 300 is any or no amino acid
  Variant (303)..(306): Xaa in position 303 to 306 is any amino acid
  Variant (308)..(310): Xaa in position 308 to 310 is any amino acid
  Variant (312)..(312): Xaa in position 312 is any amino acid
  Variant (314)..(314): Xaa in position 314 is any amino acid
  Variant (315)..(315): Xaa in position 315 is any or no amino acid
  Variant (318)..(320): Xaa in position 318 to 320 is any amino acid
  Variant (323)..(323): Xaa in position 323 is any amino acid
  Variant (325)..(328): Xaa in position 325 to 328 is any amino acid
  Variant (330)..(347): Xaa in position 330 to 347 is any amino acid
  Variant (349)..(356): Xaa in position 349 to 356 is any amino acid
  Variant (358)..(358): Xaa in position 358 is any amino acid
  Variant (360)..(396): Xaa in position 360 to 396 is any amino acid
  Variant (397)..(443): Xaa in position 397 to 443 is any or no amino acid
  Variant (445)..(453): Xaa in position 445 to 453 is any amino acid
  Variant (454)..(455): Xaa in position 454 to 455 is any or no amino acid
  Variant (457)..(459): Xaa in position 457 to 459 is any amino acid
  Variant (461)..(463): Xaa in position 461 to 463 is any amino acid
  Variant (466)..(466): Xaa in position 466 is any amino acid
  Variant (468)..(470): Xaa in position 468 to 470 is any amino acid
PXVVXXXXXXXXXXXXXXXXXXXXXXXXXXXXXXXXXXXXXXXXXXXXXXXXXXXXXXXXXXXXXXXXXXXXXXXGSGXIXXXXXXXXXXGYXXTNXHVXXXAXXXXVXLXDXXRXXXAXXXGXDXXXDXAXXXXXXXXXXLXXXXXXXSXXXXVGDXXXAXGNPFGXXXXXXXXTXTXGIXSAXXRXXXXXXXXXXXXXXXFIQTDAXINXGNSGGXLXNXXGXXXGINXAIXXXXXXXGGXXGXXFAIPXXXXXXXXXQXXXXGXXXXRGXLGXXXXXXXXXXAXXXXXXXXXXXXXXGAXXXXVXXXSXAXXAGXXXGDXIXXXXGXXXXXXXXXXXXXXXXXXGXXXXXXXXRXGXXXXXXXXXXXXXXXXXXXXXXXXXXXXXXXXXXXXXXXXXXXXXXXXXXXXXXXXXXXXXXXXXXXXXXXXXXXXXXXXXXXXGXXXXXXXXXXXAXXXGXXXGDXIXXXN

SEQ ID NO: 7264 - protein, 38 aa, Artificial sequence
  protein pattern
  Variant (2)..(2): Xaa in position 2 is Ile or Leu
  Variant (6)..(6): Xaa in position 6 is any or no amino acid
  Variant (8)..(8): Xaa in position 8 is any or no amino acid
  Variant (11)..(11): Xaa in position 11 is any amino acid
  Variant (17)..(17): Xaa in position 17 is Ala or Pro
  Variant (19)..(19): Xaa in position 19 is Phe, Ile, Leu, Met or Val
  Variant (20)..(20): Xaa in position 20 is Ala, Asp, Asn or Thr
  Variant (21)..(22): Xaa in position 21 to 22 is any amino acid
  Variant (24)..(24): Xaa in position 24 is any amino acid
  Variant (25)..(25): Xaa in position 25 is Ile, Leu, Met or Val
  Variant (26)..(26): Xaa in position 26 is Ala, Ile or Val
  Variant (28)..(28): Xaa in position 28 is Ile, Leu, Met or Val
  Variant (30)..(30): Xaa in position 30 is Ala, Ser or Thr
  Variant (31)..(33): Xaa in position 31 to 33 is any amino acid
  Variant (34)..(34): Xaa in position 34 is Ala, Gly, Asn, Pro, Ser or Thr
  Variant (35)..(37): Xaa in position 35 to 37 is any amino acid
  Variant (38)..(38): Xaa in position 38 is Ala, Gly, Asn or Ser
FXQTDXAXINXGNSGGXLXXXXGXXXGXNXXXXXXXXX

SEQ ID NO: 7265 - protein, 15 aa, Artificial sequence
  protein pattern
  Variant (2)..(2): Xaa in position 2 is Glu, Lys or Arg
  Variant (3)..(3): Xaa in position 3 is any amino acid
  Variant (4)..(4): Xaa in position 4 is Ile, Leu, Met or Val
  Variant (5)..(5): Xaa in position 5 is Gly or Leu
  Variant (6)..(6): Xaa in position 6 is any amino acid
  Variant (8)..(10): Xaa in position 8 to 10 is any amino acid
  Variant (12)..(12): Xaa in position 12 is Ile, Leu or Val
  Variant (14)..(14): Xaa in position 14 is Leu or Val
  Variant (15)..(15): Xaa in position 15 is Ile, Leu or Val
AXXXXXDXXXDXAXX

SEQ ID NO: 7266 - protein, 13 aa, Artificial sequence
  protein pattern
  Variant (2)..(2): Xaa in position 2 is any amino acid
  Variant (3)..(3): Xaa in position 3 is Ile or Val
  Variant (4)..(4): Xaa in position 4 is Leu or Val
  Variant (7)..(7): Xaa in position 7 is any amino acid
  Variant (10)..(10): Xaa in position 10 is Ile or Val
  Variant (11)..(12): Xaa in position 11 to 12 is any amino acid
GXXXTNXHVXXXA

SEQ ID NO: 7267 - protein, 15 aa, Artificial sequence
  protein pattern
  Variant (3)..(4): Xaa in position 3 to 4 is any amino acid
  Variant (5)..(5): Xaa in position 5 is any or no amino acid
  Variant (7)..(7): Xaa in position 7 is any or no amino acid
  Variant (9)..(9): Xaa in position 9 is Ile or Val
  Variant (11)..(11): Xaa in position 11 is Asn or Ser
  Variant (13)..(13): Xaa in position 13 is Phe or Tyr
  Variant (15)..(15): Xaa in position 15 is Phe, Leu or Val
VGXXXVXAXGXPXGX

SEQ ID NO: 7268 - protein, 11 aa, Artificial sequence
  protein pattern
  Variant (2)..(2): Xaa in position 2 is Ala, Leu or Val
  Variant (3)..(3): Xaa in position 3 is Ser or Thr
  Variant (4)..(4): Xaa in position 4 is any amino acid
  Variant (6)..(7): Xaa in position 6 to 7 is Ile or Val
  Variant (9)..(10): Xaa in position 9 to 10 is any or no amino acid
TXXXGXXSXXA

SEQ ID NO: 7269 - DNA, 945 bp, Escherichia coli
  CDS (1)..(945): transl_table=11
atgcacgcttatcttcactgtctttcccactcgccgctggtggggtatgtcgacccggcgcaagaggtgctcgatgaggtcaatggcgtgattgccagcgcccgcgagcgtattgcggcattctcccctgaactggtggtgctgtttgcgccagatcactacaacggctttttctatgacgtgatgccaccgttctgtttaggcgttggagcgacggcaattggtgatttcggcagtgcggcaggagagctgcccgtgcctgtggagctggcggaggcctgtgcgcatgccgtcatgaagagcgggatcgatcttgccgtttcttactgtatgcaggtggaccacgggttcgcccagccgctggagttcctgctcggtgggctggataaggtgccagttctgcctgtgttcatcaacggtgtcgccacgccgctgcccggtttccagcgtacccgcatgttgggtgaagccattggacgtttcaccagcactctcaataaacgcgtgctgttcctgggttccggtgggctttcccatcagccgccggtgcccgaactggcgaaagccgatgcccatatgcgcgaccgtctgttggggagcgggaaagatttacccgccagtgagcgcgaattgcgtcagcaacgggtgattagcgccgctgagaagtttgttgaggatcagagaacgctgcatccgctcaacccgatttgggataaccagttcatgactttgctggagcagggacgcatacaggaactggatgccgtcagtaacgaagagctttccgccattgccggaaagtcgacacatgaaatcaaaacctgggtcgccgcttttgccgctatttctgcgtttggcaactggcgtagcgaagggcgttattaccgcccaatcccggagtggattgccggatttggctcgttaagcgccagaacagagaactaa

SEQ ID NO: 7270 - protein, 314 aa, Escherichia coli
MHAYLHCLSHSPLVGYVDPAQEVLDEVNGVIASARERIAAFSPELVVLFAPDHYNGFFYDVMPPFCLGVGATAIGDFGSAAGELPVPVELAEACAHAVMKSGIDLAVSYCMQVDHGFAQPLEFLLGGLDKVPVLPVFINGVATPLPGFQRTRMLGEAIGRFTSTLNKRVLFLGSGGLSHQPPVPELAKADAHMRDRLLGSGKDLPASERELRQQRVISAAEKFVEDQRTLHPLNPIWDNQFMTLLEQGRIQELDAVSNEELSAIAGKSTHEIKTWVAAFAAISAFGNWRSEGRYYRPIPEWIAGFGSLSARTEN

SEQ ID NO: 7271 - DNA, 954 bp, Photorhabdus luminescens subsp. laumondii TTO1
  CDS (1)..(954): transl_table=11
atgaccgttaaattgatttgtacttcacacacacctttgatgggttttggttctccgcctgaagcgacggaaaagcatgttcggcaggtttttcagcaattggctgaacagataaaggactacgatccacaattgatagtgattttcgctcccgaccattttaatggttttttttatgatctcatgccggcattttgcgttggagtaagagcgaatgcagtgggggattgggatattggtaaaggcccactcaatgttcctgaaaacaccgcgaaggatttaatttctgccttatatgattcagggattgatgtggctcactcctggcgtatgcaggtcgatcatggctttactcagccattgatgctgctttgccagaatttacagcgttatccaactatcccaatatttattaactgtgcagctaaaccattgccgacctgccgtcgtgctgttgagttaggtcgtgcagtgggtcaattcctattcacaacagatcagcgggtattgctgttaggctctggtggcttatcacatgatcccccgataccacaaatgggacaggttccgccggaagttgaagaagggttgattgccgggagaaatccgacaaaagaagcgcgtcaaaaacggcaaatccgggtaattgaggttggaaaatcgttggctcgtggcgagaatatcgttgctccgttgaatccacagtgggatgacgagttattgcgtattttttgtagtggcgatattcggcgtcttgcttcgttaaccgagggtggaatcgccattcagggcgggaaaggtggacaggaaattcgctgttggatcgcggcttttgcggcgctttctgtttatggcgaatataaagcgcaacggcattattaccaacctattaaggagtggctggcagggatggcaatggtcagtgctcaacctgtcactcagataggagcataa

SEQ ID NO: 7272 - protein, 317 aa, Photorhabdus luminescens subsp. laumondii TTO1
MTVKLICTSHTPLMGFGSPPEATEKHVRQVFQQLAEQIKDYDPQLIVIFAPDHFNGFFYDLMPAFCVGVRANAVGDWDIGKGPLNVPENTAKDLISALYDSGIDVAHSWRMQVDHGFTQPLMLLCQNLQRYPTIPIFINCAAKPLPTCRRAVELGRAVGQFLFTTDQRVLLLGSGGLSHDPPIPQMGQVPPEVEEGLIAGRNPTKEARQKRQIRVIEVGKSLARGENIVAPLNPQWDDELLRIFCSGDIRRLASLTEGGIAIQGGKGGQEIRCWIAAFAALSVYGEYKAQRHYYQPIKEWLAGMAMVSAQPVTQIGA

SEQ ID NO: 7273 - DNA, 951 bp, Mycobacterium avium subsp. paratuberculosis K-10
  CDS (1)..(951): transl_table=11
gtgatccgcaaagtggcactggctctgtgctgtatgtcgcacagcccgctcctgaatcttccggggccgtcgcgggacctgcttgacgacatcgacgccgccatcgcccgggcgcgaggcttcgtcgaagactacgacccgcagctcgtggtcatcttttcaccggaccactacaacgggttcttctacaaggtgatgccgcccttctgcatcggcagcagcgccagcggcgtcggcgattacggcacccacgccggaccgctggacgtcccggagaagctggcggtcgactgcgcgcaagccgtcctcgacgccggggtcgacatcgccgtgtcggccagcatggacgtcgaccacgggaccgtccagccgctggaaaagctgttcggcacggccatttcgcgtccggtgataccggtcttcgtcaacgcgatcggggtgccgcttgggccgatgcaccggtgccgggcgctgggcgccgccgtcggcacctatctggccacgctggacaagcgggtgctggtgatgggatccggtgggctctcgcacagtccgccggtacccaccctggccaccgcgcccgagcccgtgctgcagcggatcgtgcacggcgcgccgatgacggccgagcagcgccaggcccggcaggccgcggtgatcgacgcggccaggagcttcgccgccggcgacagtgcgctgcagccgctcaacccgacctgggatcaccggttcctggaaatcatcgaccgcggctcgctgagcgaattggaccgctggtcgaattcgttcgtgacgcacgagggcggcggctccgcgcacgaaatccgcacctgggtggccgcattcgccgcactgcaggcggccggtccctacgagacgaccatgcgctactacacgcccgcccccgaactgatcgccggattcgccatcagaacggcaagaccgaaatga

SEQ ID NO: 7274 - protein, 316 aa, Mycobacterium avium subsp. paratuberculosis K-10
MIRKVALALCCMSHSPLLNLPGPSRDLLDDIDAAIARARGFVEDYDPQLVVIFSPDHYNGFFYKVMPPFCIGSSASGVGDYGTHAGPLDVPEKLAVDCAQAVLDAGVDIAVSASMDVDHGTVQPLEKLFGTAISRPVIPVFVNAIGVPLGPMHRCRALGAAVGTYLATLDKRVLVMGSGGLSHSPPVPTLATAPEPVLQRIVHGAPMTAEQRQARQAAVIDAARSFAAGDSALQPLNPTWDHRFLEIIDRGSLSELDRWSNSFVTHEGGGSAHEIRTWVAAFAALQAAGPYETTMRYYTPAPELIAGFAIRTARPK

SEQ ID NO: 7275 - DNA, 942 bp, Mycobacterium sp. JLS
  CDS (1)..(942): transl_table=11
atggcgcagatcgccctgtgctgcacgtcgcacagtccgctactgaaccttccgggaccgtcgcgggaactccttgacgacatcgggtcggcgctggccgtcgcccgtgatttcgtcaccgagttcgacccggacctggtggtcaccttctcaccggaccactacaacgggttcttctacaaggtcatgcccccgttctgcgtcggcacctccgcgcagggcgtcggggactacggcacccacgccggaccgctcgacgtgccggaggacctcgcgaacgagctggccaccgccgtactggaagccggtgtggacgtggcgatctcggcgagtatggacgtcgaccacggcaccgtgcagccgctgcagaatctgttcggcgatgcgatggcccgtcccgtcatcccggtgttcatcaactccgtcgccaccccgctgggcccgctgcggcgcacccgtgcgctgggtacggcgatcggacggtacctcgcgaccctcgacaagcgtgtcctggtgatcggttcgggtgggttgtcccacgacccgccggtgcccaccctggcgaccgccccgccggcggcgctcgaccgcatcgtgcacggcgcaccgatgagcaccgaacagcggatggcccggcagtccgcggtgatcgacgcggcgcacgcgttcgcgcacggggaaagccccctgcagccgctcaatccggcgtgggatgcgacgttcctggagatcctcgacgagggctggctctcggatctcgacggctggtccaacgcgttcatcgcccgcgagggtgggaactccgcacacgagatccgcacctgggtagcggctttcgcggcgctggcggccggcggtgactaccgcaccggcctgcgcttctaccgtgccgcacccgagttgatcgcgggtttcgcgatccggacggcggtgctcgcgtga

SEQ ID NO: 7276 - protein, 313 aa, Mycobacterium sp. JLS
MAQIALCCTSHSPLLNLPGPSRELLDDIGSALAVARDFVTEFDPDLVVTFSPDHYNGFFYKVMPPFCVGTSAQGVGDYGTHAGPLDVPEDLANELATAVLEAGVDVAISASMDVDHGTVQPLQNLFGDAMARPVIPVFINSVATPLGPLRRTRALGTAIGRYLATLDKRVLVIGSGGLSHDPPVPTLATAPPAALDRIVHGAPMSTEQRMARQSAVIDAAHAFAHGESPLQPLNPAWDATFLEILDEGWLSDLDGWSNAFIAREGGNSAHEIRTWVAAFAALAAGGDYRTGLRFYRAAPELIAGFAIRTAVLA

SEQ ID NO: 7277 - DNA, 858 bp, Mycobacterium sp. JLS
  CDS (1)..(858): transl_table=11
atgaggtctgatcggctggttgtgtgcgcaagccacagcccgggcaaggaacgcgatgtcgagcacgcgtacggtcatcggttccgctcggcgctggcggcggcggccgaggacgtgcagcgcttcgatcccgacgtggtcatcgtgttcggcggagaccaccggcgggcgttccgccatgtggttccggccttcgccgtcgccctatcagcgtcgatcctcgccgaggggggccaccccgccggtggcctcgacgtcccgtcgcacgtggcccgagggttgtgcgagcacctgctcgccgcgggattcgatgtcgccgcatgccgcgatatcgggctggatcacgcgttcgcgcaaccggttcgggacctgctgggcgagctcgcggtcaaaccggtgatcccagtgccggtgaactgcgcgacggctccgctgccgaccggacgccgtgtggccgaattcggagcttcggtcgggcgtttcctcgacagcatcgacgagcgggcactggtgatcggcaccggcgggctgtcgcactcaccaccgagcctggaggtcgacacctacgctctcaccgacgacgagcgggcgcggatcatcgccgacggtatggccgaggcgcgcaacaagatccgacccgactgggaccacgaggtcttagacgcgatgtcgcactgggacgtcgaagcgctgatcgggctcgtcgacagtgcgcatgcacgcgcgggcgcgggtgccaacgaggtacgcacctgggttgccgcgggtgctgcgggcggcggccggccgttgacgccgctggtctacgagccggtcccggaatggatcaccgggatggcggtggcgatgtcggcgtga

SEQ ID NO: 7278 - protein, 285 aa, Mycobacterium sp. JLS
MRSDRLVVCASHSPGKERDVEHAYGHRFRSALAAAAEDVQRFDPDVVIVFGGDHRRAFRHVVPAFAVALSASILAEGGHPAGGLDVPSHVARGLCEHLLAAGFDVAACRDIGLDHAFAQPVRDLLGELAVKPVIPVPVNCATAPLPTGRRVAEFGASVGRFLDSIDERALVIGTGGLSHSPPSLEVDTYALTDDERARIIADGMAEARNKIRPDWDHEVLDAMSHWDVEALIGLVDSAHARAGAGANEVRTWVAAGAAGGGRPLTPLVYEPVPEWITGMAVAMSA

SEQ ID NO: 7279 - DNA, 954 bp, Burkholderia vietnamiensis G4
  CDS (1)..(954): transl_table=11
atgccgatccatctcgaatgcatgtcgcacacgccgctgcacggctatttcgatcccgcgccggcagtcgttgccgaagtcgagcgcgtgcagcgcgcggcgcgcgagcgggtcgacgcgttcgatccggagctggtgatcgtgttcgcgccggatcactacaacggcttcttttacgacgtgatgccgcagttctgcatcggcgcaagtgcgacggccgtcggcgatttcggcagcgcggccggcccgttgcccgtcgcgcgcgatgcggcgctcgcgctcgccgatgcggcgctcgcgagcgatatcgacgtcgccgtgtcgtatcggatgcaggtcgatcacggctgcgcccaggcgctcgaggtactcacgggccgcatcgaccgcttcccggtggtacccgtcttcatcaactcggttgcgccgccgatggcgtcgtgccgccgcgcgcgcctgctcggcgacgcgatcggccgtgtcgtcgcgcgcatgaaccggcgcgtgttgctgatcggctcgggcggcatctcgcatgagccgcccgtgccggaaatcgccggcgcggacgacgtcgtcgcggaacggttgatcgcgggccgcaacccgtcgcccgcgtcgcgcgatgcgcggcaatccagcaccgtcgcggcggccagggcattcgcagcgggcgacagccgcctgcatccgctcaatcccgcatgggatcgcaggttcctcgaattgctcgaacgcggtgacctcaccgccgccgatggcctcacgaacgaagcgatcacgcgcgatgcgggcaagtccgcgcacgagatccgcacgtgggtcgccgcattcggcgcacttgcggcgagcggcccgtacgcggcgtcgatcgattactaccgcgcgattcccgaatggatcgcgggtttcggcgcgatgcacgcgcgagagcggaccctttccaggagatag

SEQ ID NO: 7280 - protein, 317 aa, Burkholderia vietnamiensis G4
MPIHLECMSHTPLHGYFDPAPAVVAEVERVQRAARERVDAFDPELVIVFAPDHYNGFFYDVMPQFCIGASATAVGDFGSAAGPLPVARDAALALADAALASDIDVAVSYRMQVDHGCAQALEVLTGRIDRFPVVPVFINSVAPPMASCRRARLLGDAIGRVVARMNRRVLLIGSGGISHEPPVPEIAGADDVVAERLIAGRNPSPASRDARQSSTVAAARAFAAGDSRLHPLNPAWDRRFLELLERGDLTAADGLTNEAITRDAGKSAHEIRTWVAAFGALAASGPYAASIDYYRAIPEWIAGFGAMHARERTLSRR

SEQ ID NO: 7281 - DNA, 939 bp, Dechloromonas aromatica RCB
  CDS (1)..(939): transl_table=11
atgaccatccagctgaaatgtctgtctcacacgccgttgcgtggcatcaatgaccccggtgccgccactgttgccgaagttgacgccgttctggccaaggcaaaggccgaagtggaggccttcgatccggaactgattgtcgtcttcgcgccggatcactacaacggcctgttctacgacctgatgccgccgtttgtgatcgctaccgcggccgactcggtgggcgattaccagacgatgaccggtcctctgtcggtggacaaggatctggccctggaaatggccaagttcattctcgacagtgatatcgatatcgccatttcccatcgtctgcaggtcgatcacggctgcacgcaaacgctggaagaaatgaccggcagcctgacccgttacccggtgattcccatcatcatcaactcggtggccccaccgtttggcccctatcgccgggtgcgcaagctgggtgaggcggtcggcaaattcatcgccaagctgaacaagcgcgtgctgatcctcggcaccggcggcctgtcgcatgaaccgcccgtgccgctgctgtcgggtgccaatgaggatattgccaatttcctgattgccgggcgcaacccgacgccggaattccgcgccgcccgccaggcccgcacgctggccaccggcatgatcttcggcaaaccggaatgcgagctgaccccgctcaatcccgagtgggaccagaacttcatggatctgctgattcgtggccagttggacaaggtcgatgccttcgacatcgaagaaatttcgaaggcagccggtcgctcgacccatgaagtccgcacctgggtcgccgcttttgccgcaatggccgccagtggcccctacaacgcccatcaggattattaccgcccgatcaacgagtggattgctggttacggcgtggtcagcgccagccagaagtaa

SEQ ID NO: 7282 - protein, 312 aa, Dechloromonas aromatica RCB
MTIQLKCLSHTPLRGINDPGAATVAEVDAVLAKAKAEVEAFDPELIVVFAPDHYNGLFYDLMPPFVIATAADSVGDYQTMTGPLSVDKDLALEMAKFILDSDIDIAISHRLQVDHGCTQTLEEMTGSLTRYPVIPIIINSVAPPFGPYRRVRKLGEAVGKFIAKLNKRVLILGTGGLSHEPPVPLLSGANEDIANFLIAGRNPTPEFRAARQARTLATGMIFGKPECELTPLNPEWDQNFMDLLIRGQLDKVDAFDIEEISKAAGRSTHEVRTWVAAFAAMAASGPYNAHQDYYRPINEWIAGYGVVSASQK

SEQ ID NO: 7283 - DNA, 954 bp, Dechloromonas aromatica RCB
  CDS (1)..(954): transl_table=11
atggcagcattgcttcaatgtatttcgcatagcccgatgaaaggttatgtggatccttcaccggctattgtctccgatgtggaagtggcaatcgctcgtatgcgaaaggaactcgtggatttcgatccggaagttatctttctttttgctcctgatcactacaacggtttttttcttgatgtcatgccccagttttgcgttgggatcgctgcgacatcagttggagactatcggactacgccagggccgatcaatgttccacgtgagattgcaaggtcctgtgccgagcatttgatcagtaacgacattgatgttgcgatctcttaccgaatgcaggtggaccatggaatggttcagccgttggaggaattgatgggaggcctaaatgcctatcccgtagtccctttattcgttaacggtgttgctccgccgcttatcagtattcgtagagctaggctgtttggggcagcggttggagagtatgcaaaaaaactcaataaacgctgtttgtttatcgggtctggtggactttcccataacccccctgtgccccagattgatacagctacagaggagtttgctgaattccttatagctgggcgcaatccatcaccagaaagacgagctgctcgtcagcagcgaaccaaggacgctgcgattcgttttgctgcaggagacagtcagctgcatccgatcaattcggtatgggacgaggcttttatggccgatcttgtgaatcaggattggggtgccctagatgcttaccgtaacagtgaaattacagaacaggctggtatttcaactcacgaggcgaaatcctgggtcgcggcgcatgcagccatgaacgcagcaacttccggcggctacatggcagaggtccgttactacaaggctattcctgagtggattgttgggtatggggctatggcaggaagtgctgagcaagcaacataa

SEQ ID NO: 7284 - protein, 317 aa, Dechloromonas aromatica RCB
MAALLQCISHSPMKGYVDPSPAIVSDVEVAIARMRKELVDFDPEVIFLFAPDHYNGFFLDVMPQFCVGIAATSVGDYRTTPGPINVPREIARSCAEHLISNDIDVAISYRMQVDHGMVQPLEELMGGLNAYPVVPLFVNGVAPPLISIRRARLFGAAVGEYAKKLNKRCLFIGSGGLSHNPPVPQIDTATEEFAEFLIAGRNPSPERRAARQQRTKDAAIRFAAGDSQLHPINSVWDEAFMADLVNQDWGALDAYRNSEITEQAGISTHEAKSWVAAHAAMNAATSGGYMAEVRYYKAIPEWIVGYGAMAGSAEQAT

SEQ ID NO: 7285 - DNA, 945 bp, Ralstonia eutropha JMP134
  CDS (1)..(945): transl_table=11
atgccgatccaactggaatgtctgtcgcatacgccgttgcacggctacgtcgaccccgcgcccgaagtcgtcgccgaggtcgagcgcgtacaggctgcggcgcgcgatcgcgtgcgtgcattcgatcccgaactggtcgtggtctttgcgccggaccacttcaacggcttcttctatgacgtgatgccgccgttctgcatcggcgcagccgccaccgcgatcggtgacttcaagagcctggccggcaagctgcctgtgccggcggacctcgctctgtcgctggccgaaagcgtgatggccgccgatatcgatgtcgcgctgtcgcaccgcatgcaggtcgaccatggctgcgcggatgcgctcgcggcattgaccggcagcctgcatcgctatccggtcatccccgtgttcatcaattccgtggcgccgccgatggcgacactgcgccgcgcgcgcctgctcggcgatgcggtcggccgcttcctgtcgcgtgccggcaagcgtgtgctggtggtcggttctggcggcatctcgcatgagccgccggtgccggagttggccggcgccagcgaggaagttgccgaacgcctgatcgcaggacgcaacccgtcgcccgaatcgcgcgccgcgcgccaggcccgcactgttgccgccgcgaagtctttcgtcgcgggcgacagccacctgcatccgctcaatcccgagtgggaccgcgcattcctgtcgctgctcgcttccggtgaactcaccgccgtcgatggcatgaccaacgacgcgatcacgcgcgacggcggcaagtcggcgcacgagattcgcacgtgggtggctgcattcggtgcgctggctgcgtacgggccgtatcgcgcatcgctcgatttctaccgcgcgattcctgagtggatcgcgggcttcgccaccatgcatgccgagcctgcagcggtctga

SEQ ID NO: 7286 - protein, 314 aa, Ralstonia eutropha JMP134
MPIQLECLSHTPLHGYVDPAPEVVAEVERVQAAARDRVRAFDPELVVVFAPDHFNGFFYDVMPPFCIGAAATAIGDFKSLAGKLPVPADLALSLAESVMAADIDVALSHRMQVDHGCADALAALTGSLHRYPVIPVFINSVAPPMATLRRARLLGDAVGRFLSRAGKRVLVVGSGGISHEPPVPELAGASEEVAERLIAGRNPSPESRAARQARTVAAAKSFVAGDSHLHPLNPEWDRAFLSLLASGELTAVDGMTNDAITRDGGKSAHEIRTWVAAFGALAAYGPYRASLDFYRAIPEWIAGFATMHAEPAAV

SEQ ID NO: 7287 - DNA, 951 bp, Burkholderia xenovorans LB400
  CDS (1)..(951): transl_table=11
atgccggtattgctcgaatgtctttcccacacgccgcttagcggctactgtgatccggcgccggaagtcgtcgcggaagtcgggcggattcacgcggcggcgcgcgcacgcgttgcggacttcgatccgcaactggtcgtcgtgttcgcgcctgaccactacaacggtttcttctacgacgtgatgccgccgttctgcatcggcgcttcggcgagcgcggtcggcgacttcggcagtctggcgggccagcttgcggtccccgccgacctcgcgctcgatctcgcgcaagccgtgctcgcggccgacgtcgacgttgccctgtcgtaccggatgcaggtcgaccacggctgcgcgcaggcgctggagattctcaccggctcactggaccgttatccggtcgtgccggtgttcatcaactcggtcgcgccgcctatggcgtcgtgccgccgcgcgcgtttgctcggcgacgcgctgggccgcagcctcgcgcgttctggccaacgcgtgctggtgatcggctccggcggcatttcgcacgagccgccggtgcccgaactggcgggcgccacggacgaagtcgccgagcgcctgatcgccggccgcaatccgtcgcgggaagcgcgggcggcgcgccaggcccgcaccgtcgcggcggcccgcgcgttcgccgcgggcgacagccgcctgcatccgctgaatcccgaatgggaccgcgcgttcctgaagctgctcgaagaagggcagttgcccgcgctcgacggcttcaccgacagcgcgatcacgcgcgaggcaggcaagtccgcgcacgaggtacgcacgtggatcgccgcattcggcgcgctgcaggcgtacggaccttatcgcgccacgctcgattactaccggccgatccccgagtggatcgcgggcttcggcgcgatgcatgcgcggcccattgccgaaaccgcctga

SEQ ID NO: 7288 - protein, 316 aa, Burkholderia xenovorans LB400
MPVLLECLSHTPLSGYCDPAPEVVAEVGRIHAAARARVADFDPQLVVVFAPDHYNGFFYDVMPPFCIGASASAVGDFGSLAGQLAVPADLALDLAQAVLAADVDVALSYRMQVDHGCAQALEILTGSLDRYPVVPVFINSVAPPMASCRRARLLGDALGRSLARSGQRVLVIGSGGISHEPPVPELAGATDEVAERLIAGRNPSREARAARQARTVAAARAFAAGDSRLHPLNPEWDRAFLKLLEEGQLPALDGFTDSAITREAGKSAHEVRTWIAAFGALQAYGPYRATLDYYRPIPEWIAGFGAMHARPIAETA

SEQ ID NO: 7289 - DNA, 945 bp, Rhodococcus sp. RHA1
  CDS (1)..(945): transl_table=11
atgcccgtagcgctgtgcacgatgtcgcattcccccctcatgggacgaaacgacccggcccaaaccgtgatcgacgacgtcgatgccgcgttcgagaatgcgcgcacgttcatcgccgacttcgcccccgacctgatcgtgatcttcgccccggatcactacaacggggtctactacgatctgatgcccccgttctgcatcggtgccgcggcccagtcggtcggcgattacggcaccgaatccggaccactgaacgtcgaccgcgacgctgcctacacggtcgcccgggaagtcctcgccagcggagtcgacgtcgcgttctccgaacgcatgcacgtcgaccacggcttcgcccaagccctgcaactgctggtcggctcgatcaccgcggtcccgaccgtgccgatcttcatcaactccgtcgccgaaccactcggcccggtcagccgcgtccgactgctaggcgaggccgtcgggcgggccgcggcaaacctcgacaagcgggtgttgttcgtcggatccggtgggctgtcccacgatccgccggtcccgcagttcgccaccgcccccacggaggtgaaagagaagctcatcgacggtcgcaaccccaccgaggccgagcgcaacgcccgcgaacagcgggtcatcgacgccggtcgcgacttcgctgccggggtggccaccattgcgcccctcaacccggaatgggatcgcaacctgctcgacgttctcacctccggcgagatcgagcagatcgactcctggaccaacgaatggttcgtcgaacaggccgggcactcctcccacgaagtacgcacctggatcgccgcgtacgcggcgatgagcgccgccgggaagtaccgcgtcacctcgaccttctaccgcgaaatcccggaatggatcgccggattcggcatcagcaccgccgtcgccgtcgacgaatag

SEQ ID NO: 7290 - protein, 314 aa, Rhodococcus sp. RHA1
MPVALCTMSHSPLMGRNDPAQTVIDDVDAAFENARTFIADFAPDLIVIFAPDHYNGVYYDLMPPFCIGAAAQSVGDYGTESGPLNVDRDAAYTVAREVLASGVDVAFSERMHVDHGFAQALQLLVGSITAVPTVPIFINSVAEPLGPVSRVRLLGEAVGRAAANLDKRVLFVGSGGLSHDPPVPQFATAPTEVKEKLIDGRNPTEAERNAREQRVIDAGRDFAAGVATIAPLNPEWDRNLLDVLTSGEIEQIDSWTNEWFVEQAGHSSHEVRTWIAAYAAMSAAGKYRVTSTFYREIPEWIAGFGISTAVAVDE

SEQ ID NO: 7291 - DNA, 894 bp, Mycobacterium avium 104
  CDS (1)..(894): transl_table=11
atgaccactcatcggctggtggtctgcgccagccacagtcccggcaaggagcgcgacgtcgcgcaggcgttcgggctcgagttccggtcggctctggcacaggcggcggatcaggtgcgcgccttcgacccggaactcgtgattgtgttcggcggcgaccacaggcgcgctttcaccactgtggtaccgactttcggggtggcgctgtcggcatcgatcatcgcggaaggtgcccatcctgccggcgcgatgtcggtaccgtcggcgtgggctcgtgcactgtgcgagcacctgctcgccgaggagttcgacctcgccgtgtgtcgcgacgtcgcactggatcacgctttcgcacaaccgattcgggacctcgtaggcgaattggacgccaagcctgtcattccggtcgcggtgaactgcgcgacagccccgctgccgaccggccgacgcgtcgccggcttcggcgcggcggtcgggcgattcctcgactcggtcgaccaacgcgtgctgctgatcggcaccggcggactgtcgcattcgccaccaagcctggaagtcgacgcctacaaactcagcgacgacgagcgggctcgcattatcgccgacggaatggcggacgcgcgcaacaagatacgtccggactgggatgccgaggtgttggaggcaatgtcgatctgggacgccgaggcgctcatccgactcgtggactcggcgcatacccgagcaggcgcaggggccaacgagatcaggacctgggtcgcggcaggcgcggcgggaggtggcaggccggttgccgccttggcttacgagccggtgcccgaatggatcacgggaatggcggttgccacgtcagctgcgggcgctagctggcaagaccgaagaacccgcgtttga

SEQ ID NO: 7292 - protein, 297 aa, Mycobacterium avium 104
MTTHRLVVCASHSPGKERDVAQAFGLEFRSALAQAADQVRAFDPELVIVFGGDHRRAFTTVVPTFGVALSASIIAEGAHPAGAMSVPSAWARALCEHLLAEEFDLAVCRDVALDHAFAQPIRDLVGELDAKPVIPVAVNCATAPLPTGRRVAGFGAAVGRFLDSVDQRVLLIGTGGLSHSPPSLEVDAYKLSDDERARIIADGMADARNKIRPDWDAEVLEAMSIWDAEALIRLVDSAHTRAGAGANEIRTWVAAGAAGGGRPVAALAYEPVPEWITGMAVATSAAGASWQDRRTRV

SEQ ID NO: 7293 - DNA, 921 bp, Mycobacterium smegmatis str. MC2 155
  CDS (1)..(921): transl_table=11
atgtcccacagcccactgctgaatcttccgggaccgtcggccgagcttcttgaccagatcaccgatgcgatcgccgacgccagaaagttcgtcgaacagttcgatcccgaactggtcgtgaccttctcacccgaccactacaacgggttcttctaccggctcatgccgccgttctgcatcggcaccgcggccgcgggcgtcggggactacggcacgtaccagggaccgctgcccgtcgatgccgacatcgccaacgcgtgcgccgaatcgctgtgggaatccggcgtcgacatcgcgatctcgacggccatggacgtcgaccacggcaccgtgcaaccgctgcaggaactgttcggcgacgcgaccgcgcgcccggtggtgcccatcttcatcaactcggtggccacaccactcggaccgctgtcgcgctcacgcgccctcggcgccgcggtgggcacgttcctcgcgacgctcgacaaacgcgtcctcatcgtgggatccggtgggctgtcacatgatccgcccgtaccgacgctggccaccgcaccacccgcggcgctcgaccgcatcgtgcacggcgcgcccatgacacccgaacagcgaatggcccggcaggaggcggtgatcaaggccgcgcacgacttcgcccacggccagagcccgctgcgctccctcaaccccgactgggacaggagcctgctggagatcttcgacgagggccggttgagcgacctcgacggctggaccaacacgttcatcaccggcgagggcggcaactccgcgcacgagatccgcacgtgggtcgcggcgttcgcggcgctggccgcccatggggagtaccagaccggcaaccacttctaccgggcggcaccggaattgatcgcaggcttcgcaatcaggacggcggtaccgagcacatga

SEQ ID NO: 7294 - protein, 306 aa, Mycobacterium smegmatis str. MC2 155
MSHSPLLNLPGPSAELLDQITDAIADARKFVEQFDPELVVTFSPDHYNGFFYRLMPPFCIGTAAAGVGDYGTYQGPLPVDADIANACAESLWESGVDIAISTAMDVDHGTVQPLQELFGDATARPVVPIFINSVATPLGPLSRSRALGAAVGTFLATLDKRVLIVGSGGLSHDPPVPTLATAPPAALDRIVHGAPMTPEQRMARQEAVIKAAHDFAHGQSPLRSLNPDWDRSLLEIFDEGRLSDLDGWTNTFITGEGGNSAHEIRTWVAAFAALAAHGEYQTGNHFYRAAPELIAGFAIRTAVPST

SEQ ID NO: 7295 - DNA, 954 bp, Azoarcus sp. BH72
  CDS (1)..(954): transl_table=11
atgagcgcgatgctgcaatgcatgtcgcataccccgctgaagggctatttcgacccggcggcggacgtggtggaggaggtggccgcgctggccgccgcggtgcgcgaggaggtggcccacttcgatcccgaggtggtctatctcttcgccccggaccactacaacggctttttcctcgacctgatgccgcagttctgcctcggcatcgaggccacatcggtgggggactaccagactccgaaagggccgttgcgggtgccgcgcgcgctggccgaggcctgcgccggcgcggtgatcgcgcgcggcatcgacctcgcattctcctaccgcatgcaggtggaccacggctttgcgcagacgctggtggaagtgctgggcgggctcgcccgctacccggtggtgccgatcatgatcaacgcggtggcaccgccgctggcgagtttccagcgcgctcgcctgctgggcgcggcggtgggtgagtttgcccgcgggcagggcgggcgcgcgctcttcatcgcttccggcggcatgtcgcacaacccgcccatcccgcagatcgccaccgccaccgaccccgaggtgatcgagcgcatcgtcgccggacgcaaccccacgccggaggcgcgcgcggcccgccagcagcgcacggttgccgcggcgcaggcgttcgccgcgggcgacagtcccttgcggccgctcaatccggactgggaccgcgcgctgatgaagcggctgtgcagccgcgactgggcggcgatcgacgcctaccgcaacgacgaagtcagcgccgcggccggtgcttccgcccacgagctgaagagctgggtggccgccacggcggcgatggaatccgcgaccgccggccagtgggatgcgcgcgagcgctactaccgcgccatccccgaatggctggcgggcttcggcgccatgtcgggccttggccgccacccctga

SEQ ID NO: 7296 - protein, 317 aa, Azoarcus sp. BH72
MSAMLQCMSHTPLKGYFDPAADVVEEVAALAAAVREEVAHFDPEVVYLFAPDHYNGFFLDLMPQFCLGIEATSVGDYQTPKGPLRVPRALAEACAGAVIARGIDLAFSYRMQVDHGFAQTLVEVLGGLARYPVVPIMINAVAPPLASFQRARLLGAAVGEFARGQGGRALFIASGGMSHNPPIPQIATATDPEVIERIVAGRNPTPEARAARQQRTVAAAQAFAAGDSPLRPLNPDWDRALMKRLCSRDWAAIDAYRNDEVSAAAGASAHELKSWVAATAAMESATAGQWDARERYYRAIPEWLAGFGAMSGLGRHP

SEQ ID NO: 7297 - DNA, 951 bp, Mycobacterium sp. KMS
  CDS (1)..(951): transl_table=11
atggtcaccatggcgcagatcgccctgtgctgcacgtcgcacagtccgctactgaaccttccgggaccgtcgcgggaactccttgacgacatcgggtcggcgttggccgtcgcccgtgatttcgtcaccgaattcgacccggacctggtggtcaccttctcgccggaccactacaacgggttcttctacaaggtcatgcccccgttctgcgtcggcacctccgcgcagggcgtcggggactacggcacccacgccggaccgctcgacgtgccggaggacctcgcgaacgagctggccaccgcagtactggaagccggtgtggacgtggcgatctcggcgagtatggacgtcgaccacggcaccgtgcagccgctgcagaatctgttcggcgatgcgatggcccgtcccgtcatcccggtgttcatcaactccgtcgccaccccgctgggcccgctgcggcgcacccgtgcgctgggtacggcgatcggacggtacctcgcgaccctcgacaagcgtgtcctggtgatcggttcgggtgggttgtcccacgacccgccggtgcccaccctggcgaccgccccgccggcggcgctcgaccgcatcgtgcacggcgcaccgatgagcaccgaacagcggatggcccggcagtccgcggtgatcgacgcggcgcacgcgttcgcgcacggggaaagccccctgcagccgctcaatccggcgtgggatgcgacgttcctggagatcctcgacgagggctggctctcggatctcgacggctggtccaacgcgttcatcgcccgcgagggtgggaactccgcacacgagatccgcacctgggtagcggctttcgcggcgctggcggccggcggtgactaccgcaccggcctgcgcttctaccgtgccgcacccgagttgatcgcgggtttcgcgatccggacggcggtgctcgcgtga

SEQ ID NO: 7298 - protein, 316 aa, Mycobacterium sp. KMS
MVTMAQIALCCTSHSPLLNLPGPSRELLDDIGSALAVARDFVTEFDPDLVVTFSPDHYNGFFYKVMPPFCVGTSAQGVGDYGTHAGPLDVPEDLANELATAVLEAGVDVAISASMDVDHGTVQPLQNLFGDAMARPVIPVFINSVATPLGPLRRTRALGTAIGRYLATLDKRVLVIGSGGLSHDPPVPTLATAPPAALDRIVHGAPMSTEQRMARQSAVIDAAHAFAHGESPLQPLNPAWDATFLEILDEGWLSDLDGWSNAFIAREGGNSAHEIRTWVAAFAALAAGGDYRTGLRFYRAAPELIAGFAIRTAVLA

SEQ ID NO: 7299 - DNA, 942 bp, Xanthobacter autotrophicus Py2
  CDS (1)..(942): transl_table=11
atgaccatcaagctcaagtgcctttcgcacacgcctctgcgtggcctgaacgatcccgcgccggaggtgatcgccgaagtcgatgcggtgctggcccgcgcccgcgccgatgtggaagcattcgaccccgagctgatcgtgattttcgcgccggatcactataacggcctcttctacgatctgatgccgccattcgttattgcaacggcggcgaagtcggtcggggattacatgactttgccgggtccgctctcggtggagcgcgatctggcgctcgagctggcgcgcttcatcctcgatcacgacgtggacatctccctgtcccatcgcctgcaagtggatcacggctgcacccagaccctggaagagctgaccggcagcctcacgcgctatccggtgatccccatcatcatcaattcggtggcgcccccctttgcgccctatcggcggatccgccgcctcggcgaagtggtcggacaattcatcgccaccctcgacaagcgggtgctggtgctgggcaccggcgggctgtcccacgagcctccggtgccgcttctggagggcgcgcccgaagccatcggcgaattcctgatctgcgggcgcaatcccacccccgaagcgcgcgccgcccggcaggagcgcaccatcgccgccggcaagatctacggcaccgagctgtccgcgcagacccctctcaatgccgagtgggatcaggccttcatcgaccttctgctggatgcccggctcgacgccgtggacgacttcagcatcgaggaaatctcgaaggaagccggccgctccacccatgaggtccgcacctgggtggcggcgttcgcggcgcttgcggcggcccggggcggctacagcgcgcaccgcgactactaccgcccgatcaatgaatggatcgccggctacggcgtcatgagcgccgagccacgctga

SEQ ID NO: 7300 - protein, 313 aa, Xanthobacter autotrophicus Py2
MTIKLKCLSHTPLRGLNDPAPEVIAEVDAVLARARADVEAFDPELIVIFAPDHYNGLFYDLMPPFVIATAAKSVGDYMTLPGPLSVERDLALELARFILDHDVDISLSHRLQVDHGCTQTLEELTGSLTRYPVIPIIINSVAPPFAPYRRIRRLGEVVGQFIATLDKRVLVLGTGGLSHEPPVPLLEGAPEAIGEFLICGRNPTPEARAARQERTIAAGKIYGTELSAQTPLNAEWDQAFIDLLLDARLDAVDDFSIEEISKEAGRSTHEVRTWVAAFAALAAARGGYSAHRDYYRPINEWIAGYGVMSAEPR

SEQ ID NO: 7301 - DNA, 945 bp, Rhodococcus globerulus
  CDS (1)..(945): transl_table=11
atgaagcaggctttgctgtgcatgtcgcacagcccactgttgcaccacctcgacccgccggccgatgtcaaagcatcggtggaagcagcgttcgaccaggcccgcgcatttgttcacaatttcgatcccgatgtgatcgttaacttcggacccgatcactacaacggattcttctacgatctgatgccgccgttctgcatcggctacaaggcaaagggcagtggcgattacgactcgtttgccggtgaactgaacgtgccggaagctatggccgaggacttggcgcagttcgtgatggatcaggggctcgacattgcgatttcacgtcagatggaggtcgatcacggtgcggtgcaaccgatggagatcatctacggagacgtagcgtccaaaccgctgatcccagtcttcgtcaattcggttgccaggccgttcgtgaaggttgcccgcgtgcgtaagttcggcgaggccgtcggcgcgtatttcaagaattccgacaagaaggtgctgttcatcggttccggtgggctgtcacatgatccgccggttccgcagatcgccaccgccgacgaggctcagcgcaagatgctgaccgacggccggaatccgacgccgcaggcgcgtgcggccaggcaacagcgagtcatcgacacggccgtcaagttcgcggcggacgaggccgacatcatggatctgaatccggagtgggacagaggatttctcgacgtgtgcgcgtccgggcggatcgaggatttcgatcgctacaccgcagacgacatggatgcggtagccgggcactcctcgcatgaggtgcgcaactgggtggctgcctactctgccctacgggcctgcggtgaatacgagatcgcctacgagttctaccggccgatcaaggaatacatctccggctttgccgtcacgaccgcgattctgcgggatatctga

SEQ ID NO: 7302 - protein, 314 aa, Rhodococcus globerulus
MKQALLCMSHSPLLHHLDPPADVKASVEAAFDQARAFVHNFDPDVIVNFGPDHYNGFFYDLMPPFCIGYKAKGSGDYDSFAGELNVPEAMAEDLAQFVMDQGLDIAISRQMEVDHGAVQPMEIIYGDVASKPLIPVFVNSVARPFVKVARVRKFGEAVGAYFKNSDKKVLFIGSGGLSHDPPVPQIATADEAQRKMLTDGRNPTPQARAARQQRVIDTAVKFAADEADIMDLNPEWDRGFLDVCASGRIEDFDRYTADDMDAVAGHSSHEVRNWVAAYSALRACGEYEIAYEFYRPIKEYISGFAVTTAILRDI

SEQ ID NO: 7303 - DNA, 963 bp, Rhodococcus
  CDS (1)..(963): transl_table=11
atgacgctcgcgctggtctgcacgtcacacagtccgctgctggagttcaacaaccccccgcccgaggtccgcacagaggtggacagggccttcgcgcaggcccggcagttcatcgaagaatacgaccccgacctcgtcgtttccttcgcccccgatcactacaacgggttcttctacaagctcatgccgtcattttgcatcggcttcgaggcctcgggcgtgggggacttcggcagctccgccggccggctcgacgtgccctcggcgcttgccgagcagatggcgcagtcggtgctggaccagggcgtggacattgcagtctccctcgagatggaagtcgaccacggtgcggtccagcccttggaaatcctgctcgggggcatcgcgacgaagccggtgatcccgatcttcgtcaattccgtggcggcaccgttcgcgccgatgaagcgaatccgcctgctcggcgaggccgtgggcacattcctgaagaatttcgacgggaacgttctgctcctcgggtccggtggtctgtcccacgacccgccggtaccgcggctcgaggcagcgaccggggaacaacggaagatgttgctgggttgcaaccaccccaccgccgcggcgcgagcggtccgccagcagcgggttatcgacaccgccaaggccttcaccaggggtgaggccggcatcatggacctcgccccggagtgggaccggcaacttcttgacatcctggcctccggggagctggaacggctcgatgcgtggaccgccaaggagatggccgccacggcaggcaactccgcccacgaagtgcgcacctgggtcgcggcccacaacgccctgaaagcggccgccggccagtacacggtgacctccgagtactaccggcccattcccgagtacatcgccgggttcgccgtgaccacggccgtacccgttcacaagaccgccggcctcaggtag

SEQ ID NO: 7304 - protein, 320 aa, Rhodococcus
MTLALVCTSHSPLLEFNNPPPEVRTEVDRAFAQARQFIEEYDPDLVVSFAPDHYNGFFYKLMPSFCIGFEASGVGDFGSSAGRLDVPSALAEQMAQSVLDQGVDIAVSLEMEVDHGAVQPLEILLGGIATKPVIPIFVNSVAAPFAPMKRIRLLGEAVGTFLKNFDGNVLLLGSGGLSHDPPVPRLEAATGEQRKMLLGCNHPTAAARAVRQQRVIDTAKAFTRGEAGIMDLAPEWDRQLLDILASGELERLDAWTAKEMAATAGNSAHEVRTWVAAHNALKAAAGQYTVTSEYYRPIPEYIAGFAVTTAVPVHKTAGLR

SEQ ID NO: 7305 - DNA, 945 bp, Rhodococcus aetherivorans
  CDS (1)..(945): transl_table=11
atgcctgtagcgctgtgcgcgatgtcgcactcccccctgatgggacgcaacgaccccgaacaggaagtcatcgacgccgtcgacgccgcattcgaccacgcgcgccggttcgtcgccgacttcgcccccgatctcatcgtcatcttcgcccccgaccactacaacggcgtcttctacgacctgctgccgccgttctgtatcggtgccgccgcgcagtccgtcggcgactacggcaccgaagccggccctctcgacgtcgaccgtgacgccgcctacgcagtcgcccgcgaagtcctcgacagcggcatcgacgtcgcattctccgaacgcatgcacgtcgaccacggattcgcccaagcactccaattgctggtcggatcgatcaccgccgtgccgaccgtgccgatcttcatcaattcggtcgccgaaccgctcggcccggtcagccgggtacggctgctcggcgaggcggtcgggcgggccgctgccaagctggacaagcgtgtgctgttcgtcggatccggcggcctgtcccacgacccgccggtcccgcagttcgccaccgcgccagaggaagtgcgcgagcggttgatcgacggccgcaatcccagtgccgccgaacgtgatgcccgcgaacagcgcgtcatcaccgccgggcgggacttcgccgccggcaccgccgccatccagccactgaaccccgaatgggaccggcacctgctcgacgtcctcgcctccggcgacctcgagcagatcgacgcgtggaccaacgactggttcgtcgaacaggccggacactcctcccacgaagtgcgcacctggatcgccgcgtacgcggcaatgagcgccgccgggaagtaccgcgtcacctcgaccttctaccgcgaaatccacgagtggatagcaggattcggaattactaccgccgtcgccgtcgacgaatag

SEQ ID NO: 7306 - protein, 314 aa, Rhodococcus aetherivorans
MPVALCAMSHSPLMGRNDPEQEVIDAVDAAFDHARRFVADFAPDLIVIFAPDHYNGVFYDLLPPFCIGAAAQSVGDYGTEAGPLDVDRDAAYAVAREVLDSGIDVAFSERMHVDHGFAQALQLLVGSITAVPTVPIFINSVAEPLGPVSRVRLLGEAVGRAAAKLDKRVLFVGSGGLSHDPPVPQFATAPEEVRERLIDGRNPSAAERDAREQRVITAGRDFAAGTAAIQPLNPEWDRHLLDVLASGDLEQIDAWTNDWFVEQAGHSSHEVRTWIAAYAAMSAAGKYRVTSTFYREIHEWIAGFGITTAVAVDE

SEQ ID NO: 7307 - DNA, 945 bp, Pseudomonas putida
  CDS (1)..(945): transl_table=11
atgagcgcctacctgcattgcctgtcgcacaccccgctggtgggctacgtcgacccggtcgccgaggtgctggccgaagtggacgaggtggtcgccgccgcccgcgcgcgcatcgccgccttcgacccgcagctggtattcctcttcgccccggaccactacaacggcttcttctatgacgtgatgccgtcgttctgcatcggcatggccgccacagccatcggcgacttccacagtctcgccgggccgctcgacgtgccccgcgaaaccgccgaggcctgcgccgcggcggtgctggaggccggcgtggacgccgcggtgtcctaccgcatgcaggtcgatcatggcttcgcccagccgctggaactgttgctcggcggccttgcggaaaagccggtggtcccggtgttcatcaatggcgtggcggtgccgctgccgggcttccagcgcgcccgcctgctcggcgaagccatcggccgtttcgcccgttccaccggcaagcgcgtcctgttcctcggttccggcgggctgtcgcaccagccgccagtgccggagctggccaaggtcgacgcacgcatggccgaccgcctgctgggtagcggccgcgacctgccgaccgacgagcgccaggcccgccagcagcgggtgatcagcgccgccgaaggcttcgtcgccgaccagaacagcctgcacccgctgaaccccgagtgggacaaccacttcctcgacctgctcgaacagcgccgtttcgccgagctggacggcctgggcaacgccgagctgtcggccctggccggcaagtccacccacgaggtgaagacctgggtgaccgccttcgccgcgttgtccgcctttggcccgtaccaggcccacgagcgctactaccggccgatccccgagtggatcgccggcttcggctcgctttccgcccattccctttcctga

SEQ ID NO: 7308 - protein, 314 aa, Pseudomonas putida
MSAYLHCLSHTPLVGYVDPVAEVLAEVDEVVAAARARIAAFDPQLVFLFAPDHYNGFFYDVMPSFCIGMAATAIGDFHSLAGPLDVPRETAEACAAAVLEAGVDAAVSYRMQVDHGFAQPLELLLGGLAEKPVVPVFINGVAVPLPGFQRARLLGEAIGRFARSTGKRVLFLGSGGLSHQPPVPELAKVDARMADRLLGSGRDLPTDERQARQQRVISAAEGFVADQNSLHPLNPEWDNHFLDLLEQRRFAELDGLGNAELSALAGKSTHEVKTWVTAFAALSAFGPYQAHERYYRPIPEWIAGFGSLSAHSLS

SEQ ID NO: 7309 - DNA, 1047 bp, Pseudomonas putida
  CDS (1)..(1047): transl_table=11
atggcgttatcccgccgcctcatgggcgtatcagggttccgctcatgccgtcccagtgcgaggcggcctgcactggggcatcgacgtaaaggttccgtaccgatgaacgcttacctacattgcctgtcgcacaccccccttattgggcatttcgacccaacccaagacgtgctggatgaagtggccgaagtggttcgggccgctcgagcgcggatcgaggccttcaacccagagctcgtggtgctctttgcgcctgatcactacaacggctttttctacgacgtgatgccgcctttctgcttaggtatggccgcggaagctatcggcgattttggttcacttgtcggcacgctatctgtacccaaagaacttgccgaagcctgtgctgaatctgttctgacgtcgggaatcgatctggccgtgtcctacaggatgcaggtcgatcatggcttcgctcagccacttgagtttctgctcggcggcctggacaaatatcccgttcttcctgttttcgtgaactgtgtggcaccacctctgccgacgtttgagcgtgtccggttgctcggtgaagcgattggccgcttcacccgcgggctcaacaagcgggtgctgttcttgggctcgggcgggctgtctcatcagcccccagtgccagagttggcaaaggtcgatgcacgcatggccgaccggctgatgggcagtggtcgggatctaccgcctgaagagcgcgatgcccgtactcaacaagtcgtcgtggctgctgaacgatttgttgaagatcagaacacccttcatccactgaatcccaagtgggatcagtacttcctggatgtcgttgagcaggatctggtgagccagcttgatgacctcagtaactcccatctctcggagctggccggcaaatcgacgcatgaggtcaaggcctgggtcgctgcgttttcggccttggcggctcacggcgcctacaccgctaccgaccgctactaccgaccgattcctgagtggatcgcaggcttcggctctatcagtgcgcacacccagcgctaa

SEQ ID NO: 7310 - protein, 348 aa, Pseudomonas putida
MALSRRLMGVSGFRSCRPSARRPALGHRRKGSVPMNAYLHCLSHTPLIGHFDPTQDVLDEVAEVVRAARARIEAFNPELVVLFAPDHYNGFFYDVMPPFCLGMAAEAIGDFGSLVGTLSVPKELAEACAESVLTSGIDLAVSYRMQVDHGFAQPLEFLLGGLDKYPVLPVFVNCVAPPLPTFERVRLLGEAIGRFTRGLNKRVLFLGSGGLSHQPPVPELAKVDARMADRLMGSGRDLPPEERDARTQQVVVAAERFVEDQNTLHPLNPKWDQYFLDVVEQDLVSQLDDLSNSHLSELAGKSTHEVKAWVAAFSALAAHGAYTATDRYYRPIPEWIAGFGSISAHTQR

SEQ ID NO: 7311 - DNA, 951 bp, Rhodococcus rhodochrous
  CDS (1)..(951): transl_table=11
atgacccaggctctgctgtgcatgtcccacagcccactgctcgaccatgccacccctcccgcggaggtgaaatcggccgtagatgacgccttcgcgcgagcacgcgatttcgtcgaggcgttcgatccggaactcgttgtgaatttcggccccgaccatttcaacggcttcttctacgacctgatgccgccgttctgcatcggctatcgggctcatgggaccggcgactacgactcgttcgccggcgatctcgacgtccccgaagacgtcgcggccgacctcgcgcagttcgtcctcgaccacggcagcgacgtcgccatctcgaggcacatggaagtagatcatggtgccgtgcagccgatggagatcctccacggcggagatgccggtgcccggccgatccttccggtcttcgtgaattcgattgcgcgaccgtttgtcccgatgtcgcgggtgcgcgcattcgggcatgcggtcggcgacttcttcgcgggcaccgacaagcgggttctcttcctcggttccggtggcctctcgcacgaccctccggtcccgcagttcgccaccgccaccgcgtcgcaacgcgaattcctcacgtcgggaaggaatccccctcccgaggcccgtccggcgcggcaggcccggacgatcgagaccgctcgtcgcttcgcagcgggtgaggccgagatcatggacctcaatcccgaatgggaccgggcgttcctcgacgtgtgccggtccgggcgtgtcgaggacttcgaccgatacaccgccgacgagatggatgccgcagccggacactcctctcacgaagtccggacgtgggtagccgcctattccgcgctgcgagcgtgtggggagtacgacgtgacctacgagttctacagaccgatcaaggagtacattgccgggttcgccgtcaccacggcacaactggccggcgaggcctga

SEQ ID NO: 7312 - protein, 316 aa, Rhodococcus rhodochrous
MTQALLCMSHSPLLDHATPPAEVKSAVDDAFARARDFVEAFDPELVVNFGPDHFNGFFYDLMPPFCIGYRAHGTGDYDSFAGDLDVPEDVAADLAQFVLDHGSDVAISRHMEVDHGAVQPMEILHGGDAGARPILPVFVNSIARPFVPMSRVRAFGHAVGDFFAGTDKRVLFLGSGGLSHDPPVPQFATATASQREFLTSGRNPPPEARPARQARTIETARRFAAGEAEIMDLNPEWDRAFLDVCRSGRVEDFDRYTADEMDAAAGHSSHEVRTWVAAYSALRACGEYDVTYEFYRPIKEYIAGFAVTTAQLAGEA

SEQ ID NO: 7313 - DNA, 996 bp, Rhodococcus aetherivorans
  CDS (1)..(996): transl_table=11
atgacgctcgcgctagtctgcacgtcacacagtccgctgctggagttcaacgaccccccgcccgaggtccgcacagaggtggacagggccttcgcgcaggcccggcagttcatcgaagactacgaacccgacctcgtcgtttccttcgcccccgatcactacaacgggttcttctacaagctcatgccgccgttttgcatcggcctcgaggcctcgggcgtgggtgacttcggcagctccgccggcccgctcgacgtgccctcggcgcttgccgagcagatggcgcagtcggtgctggaccagggcgtggacattgcagtctccctcgagatggaagtcgaccacggtgcggtccagcccctggaaatcctgctcgggggcatcgcgacgaagccggtgatcccgatcttcgtcaattccgtggcggcaccgttcgcgcccatgaagcgaatccgcctgctcggcgaggccgtgggcacattcctgaagaatttcgacgggaacgttctgctcctcgggtccggtggtctgtcccacgacccgccggtaccgcggctcgaggcagcgaccggggaacaaaggaagatgttgctgggttgcaaccaccccaccgccgcggcgcgatcggtccgccagcagcgggttatcgacaccgccaaggccttcaccaggggtgaggccggcatcatggacctcgctccggagtgggaccggcaacttcttgacatcctggcctccggggagctggaacagctcgatgcgtggaccgccaaggagatggccgccacggcaggcaactccgcccacgaagtgcgcacctgggtcgcggcccacaacgccctgaaagcggccgccggccagtacacggtgacctccgagtactaccggcccattcccgagtacatcgccgggttcgccgtgaccacggccgtatccgttcccaagaccgccggcctcacggaaacagcggtcgccgccggaacggtgcgcgcatga

SEQ ID NO: 7314 - protein, 331 aa, Rhodococcus aetherivorans
MTLALVCTSHSPLLEFNDPPPEVRTEVDRAFAQARQFIEDYEPDLVVSFAPDHYNGFFYKLMPPFCIGLEASGVGDFGSSAGPLDVPSALAEQMAQSVLDQGVDIAVSLEMEVDHGAVQPLEILLGGIATKPVIPIFVNSVAAPFAPMKRIRLLGEAVGTFLKNFDGNVLLLGSGGLSHDPPVPRLEAATGEQRKMLLGCNHPTAAARSVRQQRVIDTAKAFTRGEAGIMDLAPEWDRQLLDILASGELEQLDAWTAKEMAATAGNSAHEVRTWVAAHNALKAAAGQYTVTSEYYRPIPEYIAGFAVTTAVSVPKTAGLTETAVAAGTVRA

SEQ ID NO: 7315 - DNA, 1095 bp, Pseudomonas putida
  CDS (151)..(1095): transl_table=11
cattctagcgtgcatgatgatcgggcagacaaaaacaaatctacctgcatggcgctgtcccgccgcctcatgggcgttgaacggatgcgctcatgccgtcccagtgcgaggcggcctgcactggggcattgacgtaaaggttccgtaccgatgaacgcttacctgcattgcctgtcgcacacccctctcattgggcatttcgacccaaaccaagacgtactggatgaagtggccgaagtggttcgagctgctcgagcgcggatcgaagcgttcaacccagaactcgtagtgctcttcgcgcctgatcactacaacggctttttctacgacgtgatgccgcctttttgcttaggcatggaagcggaagctatcggcgatttcggttcgcttgccggtacgctgtccgtacccaaagatgttgccgaagcttgtgctgaatctgttctgacgtcgggtattgatctggccgtgtcctacaggatgcaggtcgatcatggctttgctcagccactggattttctgctcggcggcttggacaagtatcccgttcttcctgttttcgtgaactgtgtggcaccacctctgccaacgtttgaacgtgtccggttgctcggtgacgcgattggccgcttcacccgcggactcaataagcgagtgctgttcttggggtcgggcggtttgtctcatcagcccccggtgcctgagttggcaaaggtcgatgcacgcatggctgatcgactgatgggcagtggtcgaaacctaccgcctgaagagcgcgatgcccggactcaacgagtcgtcgtggctgctgaacgatttgttgaaaatcaaaacacccttcatccgctgaaccctaagtgggatcggtacttcttggatgtcgttgagcaggatctgttgagccagcttgatgacctcagtaacgcccatctctccgagctggccggtaaatcgacgcatgaggtcaaggcttgggtcgccgcattttcggcactgtcggctcacggcgcctacaccgctaccgaccgctactaccgaccgattcctgaatggatcgcgggcttcggctctatcagtgcgcacacccagcgctaa

SEQ ID NO: 7316 - protein, 314 aa, Pseudomonas putida
MNAYLHCLSHTPLIGHFDPNQDVLDEVAEVVRAARARIEAFNPELVVLFAPDHYNGFFYDVMPPFCLGMEAEAIGDFGSLAGTLSVPKDVAEACAESVLTSGIDLAVSYRMQVDHGFAQPLDFLLGGLDKYPVLPVFVNCVAPPLPTFERVRLLGDAIGRFTRGLNKRVLFLGSGGLSHQPPVPELAKVDARMADRLMGSGRNLPPEERDARTQRVVVAAERFVENQNTLHPLNPKWDRYFLDVVEQDLLSQLDDLSNAHLSELAGKSTHEVKAWVAAFSALSAHGAYTATDRYYRPIPEWIAGFGSISAHTQR

SEQ ID NO: 7317 - DNA, 945 bp, Rhodococcus sp
  CDS (1)..(945): transl_table=11
atgcctgtagcgctgtgcgcgatgtcgcactcccccctgatgggacgcaacgaccccgaacaggaagtcatcgacgccgtcgacgccgcattcgaccacgcgcgccggttcgtcgccgacttcgcccccgatctcatcgtcatcttcgcccccgaccactacaacggcgtcttctacgacctgctgccgccgttctgtatcggtgccgccgcgcagtccgtcggcgactacggcaccgaagccggccctctcgacgtcgaccgtgacgccgcctacgcagtcgcccgcgacgtcctcgacagcggcatcgacgtcgcattctccgaacgcatgcacgtcgaccacggattcgcccaagcactccaattgctggtcggatcgatcaccgccgtgccgaccgtgccgatcttcatcaattcggtcgccgaaccgctcggcccggtcagccgggtacggctgctcggcgaggcggtcgggcgggccgctgccaagctggacaagcgtgtgctgttcgtcggatccggcggcctgtcccacgacccgccggtcccgcagttcgccaccgcgccagaggaagtgcgcgagcggttgatcgacggccgcaatcccagtgccgccgaacgtgatgcccgcgaacagcgcgtcatcaccgccgggcgggacttcgccgccggcaccgccgccatccagccactgaaccccgaatgggaccggcacctgctcgacgtcctcgcctccggcgacctcgagcagatcgacgcgtggaccaacgactggttcgtcgaacaggccggacactcctcccacgaagtgcgcacctggatcgccgcgtacgcggcaatgagcgccgccgggaagtaccgcgtcacctcgaccttctaccgcgaaatccacgagtggatagcaggattcgggattactaccgccgtcgccgtcgacgaatag

SEQ ID NO: 7318 - protein, 314 aa, Rhodococcus sp
MPVALCAMSHSPLMGRNDPEQEVIDAVDAAFDHARRFVADFAPDLIVIFAPDHYNGVFYDLLPPFCIGAAAQSVGDYGTEAGPLDVDRDAAYAVARDVLDSGIDVAFSERMHVDHGFAQALQLLVGSITAVPTVPIFINSVAEPLGPVSRVRLLGEAVGRAAAKLDKRVLFVGSGGLSHDPPVPQFATAPEEVRERLIDGRNPSAAERDAREQRVITAGRDFAAGTAAIQPLNPEWDRHLLDVLASGDLEQIDAWTNDWFVEQAGHSSHEVRTWIAAYAAMSAAGKYRVTSTFYREIHEWIAGFGITTAVAVDE

SEQ ID NO: 7319 - DNA, 966 bp, Comamonas testosteroni
  CDS (1)..(966): transl_table=11
atgagtggtagcgccatcgccactgcacgccgggcatttctcggcatgtcgcactcgcctttgctcggactgaaccctgtcgctgcggacgatcagatcgccatcgacaaggcgattgcggcggcgcgtgcggccgttcatgagttcgccccggagctcatcgtgctgctggggccggatcactacaacggcttcttcaatgagctgatgccgccgttctgcatcggcagccaggcaacggccgtgggcgactatctgtctcccgccggtcccctcaatgtggctggagaactggccatagcgctggccgaccatctgatggacagacatttcgatatcgcggtgtcgcggcgcatgctggtcgatcacggcttttcgcaggccctgcagttcctgtggggggacgagatggacacgccgcccgtgatccccatcttcatgaacgcagtggcccagcccggtattgcgcgcatggcccgatgcaaggcactgggagaaggcgttggcagctttctcgaccagttgcctctgcgcacgctgctgatcggctccggcgggctgtcgcacgagcctcccgtgccgacactggcccatcctgacccagccgtacgtgaacgcatcaccgtccgttccacccctacggagcaggagcgcgagctcaagaccgaacgcgtcaaggctgctggactggccctggcccatggcgacagctggatgaagccgctcaaccccgaatgggatctgcaatggatggacgccatggccagcggccagctggacggcttatgtgcaatgaacgaagcctcgatcggcgccatggccggcaactctgcccatgagtccaagacctggctggtagcgcggtccgccctgcctgccaacacccgtctgtcttgcccggtaagggcctaccgcgccattccatcgctcattgcgggctatggagtgatgttcatgcaccactga

SEQ ID NO: 7320 - protein, 321 aa, Comamonas testosteroni
MSGSAIATARRAFLGMSHSPLLGLNPVAADDQIAIDKAIAAARAAVHEFAPELIVLLGPDHYNGFFNELMPPFCIGSQATAVGDYLSPAGPLNVAGELAIALADHLMDRHFDIAVSRRMLVDHGFSQALQFLWGDEMDTPPVIPIFMNAVAQPGIARMARCKALGEGVGSFLDQLPLRTLLIGSGGLSHEPPVPTLAHPDPAVRERITVRSTPTEQERELKTERVKAAGLALAHGDSWMKPLNPEWDLQWMDAMASGQLDGLCAMNEASIGAMAGNSAHESKTWLVARSALPANTRLSCPVRAYRAIPSLIAGYGVMFMHH

SEQ ID NO: 7321 - DNA, 1805 bp, Ralstonia eutropha
  CDS (502)..(1443): transl_table=11
ggatccgctggccggctcgcccgtggcgcgcatgttcatccagccgcgcgtacgtactgccgatgatcgcctcgcgctgctcgacgacgccatcggcaatggttttgccgtgatcggctggggcaccaatccgaccttcggcctgacgccgcaggcacgcgcgctcgccgagaaggccggcatgcgcttcgtactcgccaagcctgatgtgcaactgcgtcacggcgacgacgtgcccgatggggtgatcgcgatcggcgatgcaagcggccgcctgaaggaatggttcagccgcctgccgcagtcggtggtcctgctgcgtccggatcgcttcgttgcgggcgtgtgctcgccccagcaggtgtcggaggccatcactgaactcgccggcaagctcggcatgacggaggtgccgccttatgccgaggcctctaccccttccaagacgtcgcgccccgtgctcgaccccgtcaccgttacccaggcagcaggagcatgaagatgccgatccaactggaatgtctgtcgcatacgccgttgcacggctacgtcgaccccgcgcccgaagtcgtcgccgaggtcgagcgcgtacaggctgcggcgcgcgatcgcgtgcgtgcattcgatcccgaactggtcgtggtctttgcgccggaccacttcaacggcttcttctatgacgtgatgccgccgttctgcatcggcgcagccgccaccgcgatcggtgacttcaagagcctggccggcaagctgcctgtgccggcggacctcgctctgtcgctggccgaaagcgtgatggccgccgatatcgatgtcgcgctgtcgcaccgcatgcaggtcgaccatggctgcgcggatgcgctcgcggcattgaccggcagcctgcatcgctatccggtcatccccgtgttcatcaattccgtggcgccgccgatggcgacactgcgccgcgcgcgcctgctcggcgatgcggtcggccgcttcctgtcgcgtgccggcaagcgtgtgctggtggtcggttctggcggcatctcgcatgagccgccggtgccggagttggccggcgccagcgaggaagttgccgaacgcctgatcgcaggacgcaacccgtcgcccgaatcggccgcgcgccaggcccgcactgttgccgccgcgaagtctttcgtcgcgggcgacagccacctgcatccgctcaatcccgagtgggaccgcgcattcctgtcgctgctcgcttccggtgaactcaccgccgtcgatggcatgaccaacgacgcgatcacgcgcgacggcggcaagtcggcgcacgagattcgcacgtgggtggctgcattcggtgcgctggctgcgtacgggccgtatcgcgcatcgctcgatttctaccgcgcgattcctgagtggatcgcgggcttcgccaccatgcatgccgagcctgcagcggtctgacccgatcaaggagaaccccgatgactgaaccaaatttcgtcaacgccatcgcagcacgcctgcgcgatgccgaggccacgcgccagaccgtcgcgccggtgcgtggcgagatcgcgatcgatgacatcgccaccgcgtatgccgtgcagcaggccaacgtcgacgcgcgcctcgcacaaggcgaacgcatcgtcggccgcaagatcggcctgacttcgctggccgtgcagaagcagctcggcgtcgaccagcccgacttcggcgcgctgttcgcgagcatggcgtatggcgacagccagccgatgccgctgtcgcgcctgatccagccgaaggtcgaagccgagatcgcactggtgctcgag

SEQ ID NO: 7322 - protein, 313 aa, Ralstonia eutropha
MPIQLECLSHTPLHGYVDPAPEVVAEVERVQAAARDRVRAFDPELVVVFAPDHFNGFFYDVMPPFCIGAAATAIGDFKSLAGKLPVPADLALSLAESVMAADIDVALSHRMQVDHGCADALAALTGSLHRYPVIPVFINSVAPPMATLRRARLLGDAVGRFLSRAGKRVLVVGSGGISHEPPVPELAGASEEVAERLIAGRNPSPESAARQARTVAAAKSFVAGDSHLHPLNPEWDRAFLSLLASGELTAVDGMTNDAITRDGGKSAHEIRTWVAAFGALAAYGPYRASLDFYRAIPEWIAGFATMHAEPAAV

SEQ ID NO: 7323 - DNA, 24 bp, Artificial sequence
  primer
atgcacgcttatcttcactgtctt

SEQ ID NO: 7324 - DNA, 25 bp, Artificial sequence
  primer
ttagttctctgttctggcgcttaac

SEQ ID NO: 7325 - protein, 310 aa, Artificial sequence
  consensus sequence
  Variant (2)..(2): Xaa in position 2 is any amino acid
  Variant (4)..(4): Xaa in position 4 is any amino acid
  Variant (7)..(7): Xaa in position 7 is any amino acid
  Variant (10)..(13): Xaa in position 10 to 13 is any amino acid
  Variant (14)..(14): Xaa in position 14 is any or no amino acid
  Variant (16)..(29): Xaa in position 16 to 29 is any amino acid
  Variant (32)..(36): Xaa in position 32 to 36 is any amino acid
  Variant (38)..(38): Xaa in position 38 is any amino acid
  Variant (40)..(40): Xaa in position 40 is any amino acid
  Variant (42)..(44): Xaa in position 42 to 44 is any amino acid
  Variant (46)..(46): Xaa in position 46 is any amino acid
  Variant (50)..(50): Xaa in position 50 is any amino acid
  Variant (53)..(53): Xaa in position 53 is any amino acid
  Variant (56)..(57): Xaa in position 56 to 57 is any amino acid
  Variant (60)..(60): Xaa in position 60 is any amino acid
  Variant (63)..(63): Xaa in position 63 is any amino acid
  Variant (65)..(66): Xaa in position 65 to 66 is any amino acid
  Variant (68)..(70): Xaa in position 68 to 70 is any amino acid
  Variant (73)..(77): Xaa in position 73 to 77 is any amino acid
  Variant (79)..(79): Xaa in position 79 is any amino acid
  Variant (81)..(81): Xaa in position 81 is any amino acid
  Variant (83)..(86): Xaa in position 83 to 86 is any amino acid
  Variant (88)..(90): Xaa in position 88 to 90 is any amino acid
  Variant (92)..(99): Xaa in position 92 to 99 is any amino acid
  Variant (101)..(101): Xaa in position 101 is any amino acid
  Variant (103)..(103): Xaa in position 103 is any amino acid
  Variant (105)..(106): Xaa in position 105 to 106 is any amino acid
  Variant (108)..(108): Xaa in position 108 is any amino acid
  Variant (113)..(114): Xaa in position 113 to 114 is any amino acid
  Variant (116)..(116): Xaa in position 116 is any amino acid
  Variant (118)..(119): Xaa in position 118 to 119 is any amino acid
  Variant (121)..(121): Xaa in position 121 is any amino acid
  Variant (123)..(127): Xaa in position 123 to 127 is any amino acid
  Variant (128)..(128): Xaa in position 128 is any or no amino acid
  Variant (130)..(131): Xaa in position 130 to 131 is any amino acid
  Variant (133)..(133): Xaa in position 133 is any amino acid
  Variant (135)..(135): Xaa in position 135 is any amino acid
  Variant (137)..(137): Xaa in position 137 is any amino acid
  Variant (140)..(140): Xaa in position 140 is any amino acid
  Variant (142)..(146): Xaa in position 142 to 146 is any amino acid
  Variant (147)..(147): Xaa in position 147 is any or no amino acid
  Variant (149)..(149): Xaa in position 149 is any amino acid
  Variant (151)..(151): Xaa in position 151 is any amino acid
  Variant (154)..(154): Xaa in position 154 is any amino acid
  Variant (156)..(156): Xaa in position 156 is any amino acid
  Variant (158)..(165): Xaa in position 158 to 165 is any amino acid
  Variant (169)..(170): Xaa in position 169 to 170 is any amino acid
  Variant (178)..(178): Xaa in position 178 is any amino acid
  Variant (183)..(189): Xaa in position 183 to 189 is any amino acid
  Variant (190)..(198): Xaa in position 190 to 198 is any or no amino acid
  Variant (200)..(206): Xaa in position 200 to 206 is any amino acid
  Variant (208)..(209): Xaa in position 208 to 209 is any amino acid
  Variant (211)..(220): Xaa in position 211 to 220 is any amino acid
  Variant (222)..(225): Xaa in position 222 to 225 is any amino acid
  Variant (226)..(230): Xaa in position 226 to 230 is any or no amino acid
  Variant (234)..(234): Xaa in position 234 is any amino acid
  Variant (237)..(251): Xaa in position 237 to 251 is any amino acid
  Variant (253)..(262): Xaa in position 253 to 262 is any amino acid
  Variant (263)..(263): Xaa in position 263 is any or no amino acid
  Variant (265)..(265): Xaa in position 265 is any amino acid
  Variant (267)..(267): Xaa in position 267 is any amino acid
  Variant (270)..(272): Xaa in position 270 to 272 is any amino acid
  Variant (274)..(274): Xaa in position 274 is any amino acid
  Variant (277)..(278): Xaa in position 277 to 278 is any amino acid
  Variant (280)..(283): Xaa in position 280 to 283 is any amino acid
  Variant (284)..(285): Xaa in position 284 to 285 is any or no amino acid
  Variant (287)..(287): Xaa in position 287 is any amino acid
  Variant (289)..(293): Xaa in position 289 to 293 is any amino acid
  Variant (294)..(294): Xaa in position 294 is any or no amino acid
  Variant (297)..(299): Xaa in position 297 to 299 is any amino acid
  Variant (301)..(301): Xaa in position 301 is any amino acid
  Variant (305)..(309): Xaa in position 305 to 309 is any amino acid
LXCXSHXPLXXXXXPXXXXXXXXXXXXXXARXXXXXFXPXLXXXFXPDHXNGXFYXXMPXFCXGXXAXXXGDXXXXXGXLXVXXXXAXXXAXXXXXXXXDXAXSXXMXVDHGXXQXLXXLXGXXXXXXPXXPXFXNXVAXPXXXXXXRXRXLGXAXGXXXXXXXXRVLXXGSGGLSHXPPVPXXXXXXXXXXXXXXXXGXXXXXXXRXXRXXXXXXXXXXFXXXXXXXXXLNPXWDXXXXXXXXXXXXXXXDXXXXXXXXXXXGXSXHEXXXWXAAXXAXXXXXXGXYXXXXXXYRXXXEXIAGXXXXXA

SEQ ID NO: 7326 - protein, 36 aa, Artificial sequence
  protein pattern
  Variant (2)..(2): Xaa in position 2 is any or no amino acid
  Variant (5)..(5): Xaa in position 5 is Ile, Leu or Val
  Variant (7)..(8): Xaa in position 7 to 8 is any amino acid
  Variant (10)..(10): Xaa in position 10 is any amino acid
  Variant (11)..(12): Xaa in position 11 to 12 is any or no amino acid
  Variant (15)..(15): Xaa in position 15 is Phe or Tyr
  Variant (16)..(16): Xaa in position 16 is any amino acid
  Variant (17)..(17): Xaa in position 17 is Ser or Thr
  Variant (18)..(19): Xaa in position 18 to 19 is any amino acid
  Variant (21)..(21): Xaa in position 21 is any amino acid
  Variant (22)..(22): Xaa in position 22 is Ile or Leu
  Variant (23)..(23): Xaa in position 23 is any amino acid
  Variant (25)..(25): Xaa in position 25 is Ala, Asp or Pro
  Variant (26)..(28): Xaa in position 26 to 28 is any amino acid
  Variant (30)..(30): Xaa in position 30 is any amino acid
  Variant (31)..(31): Xaa in position 31 is Ala, Asp, Glu, Gln, Ser or Thr
  Variant (32)..(32): Xaa in position 32 is any amino acid
  Variant (34)..(35): Xaa in position 34 to 35 is any amino acid
  Variant (36)..(36): Xaa in position 36 is Ala, Leu or Val
PXFCXGXXAXXXGDXXXXXGXXXVXXXXAXXXAXXX

SEQ ID NO: 7327 - protein, 42 aa, Artificial sequence
  protein pattern
  Variant (2)..(3): Xaa in position 2 to 3 is any amino acid
  Variant (4)..(4): Xaa in position 4 is any or no amino acid
  Variant (6)..(6): Xaa in position 6 is any or no amino acid
  Variant (8)..(8): Xaa in position 8 is any amino acid
  Variant (9)..(9): Xaa in position 9 is Ala, Gly or Val
  Variant (10)..(10): Xaa in position 10 is Ile, Leu or Val
  Variant (12)..(17): Xaa in position 12 to 17 is any amino acid
  Variant (18)..(18): Xaa in position 18 is Asp, Gly, Asn or Pro
  Variant (19)..(19): Xaa in position 19 is any amino acid
  Variant (20)..(20): Xaa in position 20 is Asn or Arg
  Variant (21)..(21): Xaa in position 21 is Cys, Thr or Val
  Variant (23)..(23): Xaa in position 23 is Phe, Ile, Leu or Val
  Variant (24)..(24): Xaa in position 24 is Ile, Leu, Met or Val
  Variant (26)..(26): Xaa in position 26 is Ser or Thr
  Variant (29)..(29): Xaa in position 29 is Ile or Leu
  Variant (32)..(32): Xaa in position 32 is Asp, Glu, Asn, Gln or Ser
  Variant (35)..(35): Xaa in position 35 is Ile or Val
  Variant (37)..(37): Xaa in position 37 is any amino acid
  Variant (38)..(38): Xaa in position 38 is Phe, Ile, Leu or Met
  Variant (39)..(39): Xaa in position 39 is Ala, Asp, Glu, Gly or Ser
  Variant (40)..(40): Xaa in position 40 is any amino acid
  Variant (41)..(41): Xaa in position 41 is Ala, Pro or Val
  Variant (42)..(42): Xaa in position 42 is Asp, Asn, Pro, Ser or Thr
RXXXLXGXXXGXXXXXXXXXXLXXGXGGXSHXPPXPXXXXXX

SEQ ID NO: 7328 - protein, 26 aa, Artificial sequence
  protein pattern
  Variant (2)..(6): Xaa in position 2 to 6 is any amino acid
  Variant (7)..(7): Xaa in position 7 is Ala, Asp, Glu, Asn or Gln
  Variant (8)..(9): Xaa in position 8 to 9 is any amino acid
  Variant (10)..(10): Xaa in position 10 is Asp or Pro
  Variant (11)..(11): Xaa in position 11 is Asp, Glu, Pro or Gln
  Variant (12)..(12): Xaa in position 12 is any amino acid
  Variant (13)..(13): Xaa in position 13 is Ile, Leu or Val
  Variant (15)..(15): Xaa in position 15 is any amino acid
  Variant (16)..(16): Xaa in position 16 is any or no amino acid
  Variant (18)..(18): Xaa in position 18 is Ala, Gly or Ser
  Variant (22)..(22): Xaa in position 22 is Phe or Tyr
  Variant (25)..(25): Xaa in position 25 is Phe, Leu or Val
  Variant (26)..(26): Xaa in position 26 is Phe or Tyr
AXXXXXXXXXXXXVXXFXPDHXNGXX

SEQ ID NO: 7329 - protein, 21 aa, Artificial sequence
  protein pattern
  Variant (2)..(2): Xaa in position 2 is any amino acid
  Variant (4)..(5): Xaa in position 4 to 5 is any amino acid
  Variant (6)..(6): Xaa in position 6 is Leu or Met
  Variant (7)..(7): Xaa in position 7 is any amino acid
  Variant (12)..(12): Xaa in position 12 is any amino acid
  Variant (13)..(13): Xaa in position 13 is Ala, Ser, Thr or Val
  Variant (15)..(15): Xaa in position 15 is Ala, Pro or Thr
  Variant (16)..(16): Xaa in position 16 is Leu or Met
  Variant (17)..(18): Xaa in position 17 to 18 is any amino acid
  Variant (19)..(19): Xaa in position 19 is Ile, Leu, Met or Val
  Variant (20)..(20): Xaa in position 20 is any amino acid
  Variant (21)..(21): Xaa in position 21 is Gly or Gln
AXSXXXXVDHGXXQXXXXXXX

SEQ ID NO: 7330 - protein, 15 aa, Artificial sequence
  protein pattern
  Variant (2)..(2): Xaa in position 2 is Ala, Ser or Thr
  Variant (5)..(5): Xaa in position 5 is Ala, Ile, Leu or Val
  Variant (6)..(6): Xaa in position 6 is Lys or Arg
  Variant (7)..(7): Xaa in position 7 is Ala, Asn, Ser or Thr
  Variant (9)..(9): Xaa in position 9 is Ile or Val
  Variant (12)..(12): Xaa in position 12 is any amino acid
  Variant (13)..(13): Xaa in position 13 is any or no amino acid
  Variant (15)..(15): Xaa in position 15 is Ala or Leu
SXHEXXXWXAAXXAX

SEQ ID NO: 7331 - protein, 13 aa, Artificial sequence
  protein pattern
  Variant (2)..(2): Xaa in position 2 is any amino acid
  Variant (3)..(3): Xaa in position 3 is Ile, Leu or Val
  Variant (5)..(5): Xaa in position 5 is Ile, Leu or Val
  Variant (6)..(6): Xaa in position 6 is Phe, Ile or Met
  Variant (7)..(7): Xaa in position 7 is Ile, Met or Val
  Variant (9)..(9): Xaa in position 9 is Ala, Cys, Gly or Ser
  Variant (12)..(12): Xaa in position 12 is any amino acid
PXXPXXXNXVAXP

SEQ ID NO: 7332 - protein, 16 aa, Artificial sequence
  protein pattern
  Variant (2)..(2): Xaa in position 2 is any or no amino acid
  Variant (4)..(4): Xaa in position 4 is any amino acid
  Variant (5)..(5): Xaa in position 5 is any or no amino acid
  Variant (8)..(8): Xaa in position 8 is Ser or Thr
  Variant (11)..(14): Xaa in position 11 to 14 is any amino acid
  Variant (15)..(15): Xaa in position 15 is Asp, Gly, Asn, Ser or Thr
LXCXXSHXPLXXXXXP

SEQ ID NO: 7333 - DNA, 1782 bp, Escherichia coli
  CDS (1)..(1782): transl_table=11
atgcgtagttttagccaactgtggccgactctcaagcgcctgttagcgtacggttcgccgtggcgtaaaccgctggggattgcggtcctgatgatgtgggttgcggcggcggcagaagtcagtgggccgctgcttatcagctattttatcgacaatatggtagcgaaaaataacctgccgttgaaagtggttgcagggctggctgcggcgtatgttgggctgcaactgtttgccgccgggctacattacgcgcagtcgctgctgtttaatcgggcggcagtaggcgtagtgcaacagttgcgtaccgacgtgatggatgctgcgttacgccagccattaagcgagtttgatacccaacccgtcgggcaggtgatttcccgcgtcactaatgacactgaagtgatccgcgatctctacgttaccgtagtggcaactgtcctgcgcagtgccgcgctggtgggcgcgatgctggtggcgatgttcagcctcgactggcgaatggcactggtggcgataatgattttcccggtggtgctggtggtaatggtgatataccagcgttacagcacgccgattgtccgtcgtgtgcgcgcctatttggcggatatcaacgacggctttaacgaaatcatcaatggcatgagcgttatccagcagtttcgtcagcaggcgcgatttggcgaacgtatgggggaggccagtcgttcacactatatggcgaggatgcaaaccctgcgcctcgacggttttctgctgcgtccgctgctgagtctgttttcatcgctcattctttgtggcttgttgatgctgtttggcttctccgccagcggcaccattgaagtgggcgtgctgtatgcgtttatcagctatcttgggcgacttaacgaaccattaatcgaactgaccacgcaacaggcgatgctgcaacaggctgttgttgctggtgagcgcgtgtttgaactgatggacggaccgcgccagcaatatggcaatgatgatcgcccgttacagagtggcaccatcgaagtcgataacgtgtcatttgcttatcgcgatgacaatctggtgctaaagaacattaatctctctgtgccttcgcgcaattttgtggcgctggtcgggcataccggcagtggcaaaagcaccctcgccagtttattgatgggctattacccgctaacggaaggtgagattcgccttgatggtcgtccattaagttcgctaagtcacagcgcgctgcgccagggcgtggcaatggtgcagcaagatccggtggtgctggcggataccttcctcgccaacgtgacgctggggcgggatatctccgaagaacgcgtctggcaggcgctggaaaccgtgcaactggcggagctggcgcgtagcatgagcgacggtatttacacgccgctgggcgagcaggggaataatctctcagttgggcaaaagcaactgctggcactggcgcgcgtgctggtcgagacgccgcaaatcctgatccttgatgaggcaaccgccagcattgactccggtactgaacaggcgattcaacatgctctggcggcggtgcgtgaacataccacgctggtagtgattgctcaccgcttatcgaccattgttgatgccgacaccattctggtgcttcatcgtgggcaagccgtggagcagggcactcaccagcaactgctggcggcccagggacgctactggcagatgtatcaactgcaacttgcgggcgaagagctggcagccagcgtgcgtgaagaggaatcattgagcgcctaa

SEQ ID NO: 7334 - protein, 593 aa, Escherichia coli
MRSFSQLWPTLKRLLAYGSPWRKPLGIAVLMMWVAAAAEVSGPLLISYFIDNMVAKNNLPLKVVAGLAAAYVGLQLFAAGLHYAQSLLFNRAAVGVVQQLRTDVMDAALRQPLSEFDTQPVGQVISRVTNDTEVIRDLYVTVVATVLRSAALVGAMLVAMFSLDWRMALVAIMIFPVVLVVMVIYQRYSTPIVRRVRAYLADINDGFNEIINGMSVIQQFRQQARFGERMGEASRSHYMARMQTLRLDGFLLRPLLSLFSSLILCGLLMLFGFSASGTIEVGVLYAFISYLGRLNEPLIELTTQQAMLQQAVVAGERVFELMDGPRQQYGNDDRPLQSGTIEVDNVSFAYRDDNLVLKNINLSVPSRNFVALVGHTGSGKSTLASLLMGYYPLTEGEIRLDGRPLSSLSHSALRQGVAMVQQDPVVLADTFLANVTLGRDISEERVWQALETVQLAELARSMSDGIYTPLGEQGNNLSVGQKQLLALARVLVETPQILILDEATASIDSGTEQAIQHALAAVREHTTLVVIAHRLSTIVDADTILVLHRGQAVEQGTHQQLLAAQGRYWQMYQLQLAGEELAASVREEESLSA

SEQ ID NO: 7335 - DNA, 2506 bp, Glycine max
  CDS (21)..(1922)
gggggtttcactgtttcagaatgaacggcttaagaagtgaaagagcccctctcttggaggctgagcgtgctggaagaggaaagagggatggtgcctcggaaggtcaagcctcagaccttgagcatggtgatgcagtgccggcggcaaatgtgggattctgtagggtgctttcacttgcaaaacctgaggctggaaagttggtgatcggtactgtggctctgttgattgcagccacatcaagtatcttagttcaaaaatttggtgggaagataattgacattgtctctagggaaatgaaaactccagaggagaaagatgaagctttgaatgctgttaagaacaccatactagaaatctttctggtcgttgtcttcggttcaatttgcactgcacttcgagcttggcttttttatactgctagtgaaagggttgttgcacgactgagaaagaatttgttcagtcatcttgtaaaccaggagatagccttctttgatgttactcgaactggggagcttttaagtaggctatctgaagatacacagatcataaagaatgctgcaactaccaatctttctgaggccctgagaaacttttcaactgcattaattggtctgagcttcatgtttgcaacatcatggaagttaacattgttggctttggctgttgtacctgttctttctgttgctgttcgcaagtttggccgttacctgcgtgaactttctcataaaactcaagctgcagctgcagttgcttcatcaatagctgaggaatcctttggtgcaataagaacagtaagatcatttgcccaagaagattatgaagtaacacgctactcagagaaagttaatgaaacacttaatcttggtcttaaacaagctaaaattgttggactcttttctggaggccttaatgctgcatctacactttcagtcattatagttgttatatatggagctaatttgacaatcaagggttccatgtcctcgggtgatcttacatctttcattctttatagtctctcagtgggttcttctatatccggtctgtcaggattgtatacagtagttatgaaagctgcaggtgctagcagaagggtatttcaacttttggatcgtacctcatccatgcctaagtcaggagataaatgtccacttggtgatcaagatggggaagtagaactagatgatgtgtggtttgcctatccatcacgccctagtcatccggtgctcaagggcattacattgaagctgcatccaggatcaaaggttgctcttgtcggtccaagtggtggtggaaagagtacaattgcaaacttaattgaaagattttatgacccaaccaaggggaagattctactgaatggggttcctttggtagaaatatcacacaagcatttacactggcagatcagtatagtgagtcaggagcctacactcttcaactgttccatagaggagaacatagcttatggatttgatggcaaagtgaacgatgttgatatagaaaatgctgctaaaatggccaatgcacatgaatttatatcaaaattcccagaaaaataccagacctttgttggagagcgtggggtaaggctttcaggagggcagaaacagagaatagcaattgctagagccctgcttatggacccaaaaattctcctcttggatgaagccaccagtgccctagatgctgaaagcgaatacctagtgcaggatgccatggagtctctcatgaaaggaagaacagttctagtcattgctcacaggttatccacagttaaaactgctgatactgttgcagttatatctgatggccaagtagttgagagaggcaaccatgaagagcttctcagcaagaacggtgtctatactgcattggtcaagagacaactgcaaacaacaaaagccgaaatctcggtttagcaaatcatgaataaccaaaccctaccatcttgcttgttaaacactcagtctgctcaaaaaggaggggcaaatgatactgaggcacaagttccttggaagaccttcacttccacagttgcaagttacagcattaccctctgtatcagaggaaagaaaatgagggaagagagaaaaatttaaaaattgaatagaagagaaaatagaaagaaagaaaatttcgaatttttcttcatctaaatgtcaatttttctttcttttcttaaccaaataaaataaaatgtatcattatctgtattttcttactttagtccaaacacatgattaaagtttagcaacaaatttggtgtaactcccgatatttcaaaaccagaagtaatcagtgtgatctatactgtcagtagagtattatcaacatgctttgtctaaaaaaaaaaaagaaaaaaaaagaaaactaatcgaaaaaaaacaacggataaaaaaaacgcagaacacactaatacaaaaggataaaaggtggggggcggcccccacttgagggctctccaggaaattaatgccgaacaggtccttgagggagacccgct

SEQ ID NO: 7336 - protein, 633 aa, Glycine max
MNGLRSERAPLLEAERAGRGKRDGASEGQASDLEHGDAVPAANVGFCRVLSLAKPEAGKLVIGTVALLIAATSSILVQKFGGKIIDIVSREMKTPEEKDEALNAVKNTILEIFLVVVFGSICTALRAWLFYTASERVVARLRKNLFSHLVNQEIAFFDVTRTGELLSRLSEDTQIIKNAATTNLSEALRNFSTALIGLSFMFATSWKLTLLALAVVPVLSVAVRKFGRYLRELSHKTQAAAAVASSIAEESFGAIRTVRSFAQEDYEVTRYSEKVNETLNLGLKQAKIVGLFSGGLNAASTLSVIIVVIYGANLTIKGSMSSGDLTSFILYSLSVGSSISGLSGLYTVVMKAAGASRRVFQLLDRTSSMPKSGDKCPLGDQDGEVELDDVWFAYPSRPSHPVLKGITLKLHPGSKVALVGPSGGGKSTIANLIERFYDPTKGKILLNGVPLVEISHKHLHWQISIVSQEPTLFNCSIEENIAYGFDGKVNDVDIENAAKMANAHEFISKFPEKYQTFVGERGVRLSGGQKQRIAIARALLMDPKILLLDEATSALDAESEYLVQDAMESLMKGRTVLVIAHRLSTVKTADTVAVISDGQVVERGNHEELLSKNGVYTALVKRQLQTTKAEISV

SEQ ID NO: 7337 - DNA, 1779 bp, Klebsiella pneumoniae subsp. pneumoniae MGH 78578
  CDS (1)..(1779): transl_table=11
atgcgtagctttaccgaactctggccgacgcttaaacgcctgctggcctatggttcaccgtggcgcaagccgttggccatcgcggtggcgatgatgtggattgcggcggcggcggaagtgagcggcccgctgcttatcagctatttcatcgacaacatggtggcgaaacatacgctgccgctgaagctggtggccggcctggcggtagcctatatcggcctgcagctgctggcggcgctcctgcactataaccagtcgctgctgtttaaccgcgccgcggtcggcgtcgtccagcagttgcgcagcgacgtgatggatgccgccctgcatcagccgctcagcgagtttgatacccagccggttgggcagcttatctcacgggtaaccaacgatacggaagtcattcgcgatctgtacgtgacggtggtggctacggtactgcgcagcgccgcgctgatcggcgcgatgctggtggcgatgtttagcctcgactggcggatggcgctggtggcgatcgcgattttcccggcggtgctgatcgtgatgattatctatcagcgctatagcacgccgatcgtgcggcgggtgcgcgcctggcttgccgacatcaacgatggcttcaacgaagtgatcaacggcatgggcgtcatccagcagttccgccagcaggcgcgctttggcgaacggatgcgcgaggccagctatgcccactatctggcgcggatgcagacgctgcgcctggacggttttctgctgcgcccgctgctgagccttttttcctcgctggtgctgtgcgggctgctgatgctgttcggctttagcgcggtgggcacgatcgaggttggggtcctgtacgcgtttatcagctatcttggacgccttaacgagccgcttatcgagctgaccacccagcagtcgatgctgcagcaggcggtggtcgccggcgagcgcgttttcgagctgatggatcgcccgcgccaggcgtggggtagggatgacgcgccgctgagcagcggtcgggtggaaattgaccatctctcctttgcttaccggggggaccgtctggttctccaggatatcacgctggatattccctcccgcagcttcgtggcgttggtcggacataccggcagcggaaaaagtaccctcgccagtctgatgatgggctattacccgttaacccacggcgagatccgcatcgatggtcgaccgctcgcatccctcagccacagcgcgttgcgtcggggcatcgcgatggtgcaacaggatcccgtagtgctggcggataccttctacgccaacgtcgcgctgggtcgggacatcagtgaggcgcaggtttgggaagcgctggaggcggtgcagctggcggcggtggcgcgcagcatgagcgatgggctgtacacccaactgggcgagcagggcaataatctctccgtcgggcagaagcagctgctggcgctggcgcgcgtgctggtggacaccccgcaggtactgattttggatgaggcgacggcaaacatcgactccggtaccgagcaggcgatccagcaggcgctggcgaaggtccgccagcataccaccctcgtggttattgcccatcggctgtcgaccattgtggaggccgataccatcctggttctgcatcgaggtcaggctgtcgagcggggcacccatcagcagctgctggcggcgaaaggccgctactggcagatgtatcagctgcagctggccggcgaagagctggcggccagcgccagagaggagtcgctcagcgcctga

SEQ ID NO: 7338 - protein, 592 aa, Klebsiella pneumoniae subsp. pneumoniae MGH 78578
MRSFTELWPTLKRLLAYGSPWRKPLAIAVAMMWIAAAAEVSGPLLISYFIDNMVAKHTLPLKLVAGLAVAYIGLQLLAALLHYNQSLLFNRAAVGVVQQLRSDVMDAALHQPLSEFDTQPVGQLISRVTNDTEVIRDLYVTVVATVLRSAALIGAMLVAMFSLDWRMALVAIAIFPAVLIVMIIYQRYSTPIVRRVRAWLADINDGFNEVINGMGVIQQFRQQARFGERMREASYAHYLARMQTLRLDGFLLRPLLSLFSSLVLCGLLMLFGFSAVGTIEVGVLYAFISYLGRLNEPLIELTTQQSMLQQAVVAGERVFELMDRPRQAWGRDDAPLSSGRVEIDHLSFAYRGDRLVLQDITLDIPSRSFVALVGHTGSGKSTLASLMMGYYPLTHGEIRIDGRPLASLSHSALRRGIAMVQQDPVVLADTFYANVALGRDISEAQVWEALEAVQLAAVARSMSDGLYTQLGEQGNNLSVGQKQLLALARVLVDTPQVLILDEATANIDSGTEQAIQQALAKVRQHTTLVVIAHRLSTIVEADTILVLHRGQAVERGTHQQLLAAKGRYWQMYQLQLAGEELAASAREESLSA

SEQ ID NO: 7339 - DNA, 4539 bp, Oryza sativa (japonica cultivar-group)
  CDS (1)..(4539)
atggctctcctcctcccggggtggatggccaccacggcgtgctcgccgccgtcaggtggttccttccccgacctgctcgccttcctcttcctctcgccctgcccgcagcgcgcgctcctcggcgccgtcgacctcgtcttcgtcgtcgcgtccctcgtcgtcctcgcccttccccgcggcggcggtggcggcgctggggatggtcccgaacgggaggcgcttctgccgaagcctcgggcgtcgggaaggcctttccgggtcgcggtcgcgctcggggcgtcgggggtgttcgcggcggcgtcggccatcctcctcgcgctcgcgttgttcctcctgccgaacacggtatggagggtttgggaatccgccttcctcgccgtccacttcgtcgcgcacgccgtggcggcgtggaccatcgcgtcgcggaggggagcggccggtggcgccctccctctgcagctccgcgtgttttgggtcgtgacggccctcgtcggcgcgctcttctccgcttcggccgcggtccgctgggccgaggattcgctgcttttccccgacgaccccctcgccttcgccggcctcgccctctcgctgcctctggtgtatgtagccatcaccgcctcatccggcgaggtcgcaggtacgtgcgaacgcgaacccgctgacgtcaccaccgcggcggagccctctacgccgtacgacgcggcgtcgtggctgtcgcgcgcgacgttcagttggatcaatccactggtctccaaggggtacgccagcgactcgctcgccgccgaagacgtcccgccggtgtcgccggcccaccgcgccgaggcgtcgtacgctcggttcgtgtccaactggccggcgcaggggtcgcgctacccggtgggcgtcgcgctgtggctgtccttctggccgcgcgtcctattgacggcggcgctcggccttgtgcgcctcgccgccatgtacgttggcccgtcgctcatcaaccatttcgtcgacttcatcagccatggcggcacgacgtgggagggcctccggcttgtcgccatcctcgtcgccggcaaggcggtgcagacgctggcctcgcaccactacaacttccaggggcagctgctggggatgcgcatccgcggcgcgctgctcacggcgctgtaccgcaagtcgctgcgtctgtccaccggcgcgcgccgcgcgcacggctcgggcgccatcgtcaactacatgcaggtggacgccgggacggtgtcctacgccatgcacggtctccacggcctttggctgatgccgctgcagatcgtggtggcgcttgtcctgctgtacgcctacctcggcccctccgtgctcatgacgcttgccgtgatcaccgcggtcaccgtgatcaccgcgttcgccaacaagctcaacttggcctaccagctcaagttcctcggcgtccgcgacagccgcatcaaggccatcaccgagatgctgaaccacatgcgtgtcatcaagctgcaggcctgggaggagaaattcggtggcaaggtgcgagaactcaggcagactgagatggggtggttgaccaagattgtactcttcatgtgcgccaacaatgtcgtgttctccagcggcccactcgccatgactgtgctggtctttgggacctacctcgccaccggaggagagctagatgccgggaaggtgttcacggccaccgcgttcttctcaatgctcgaggggcctatgcacaacttcccgcagacgatcgtgatgtgtatgcaagcgtttgtgtcacttggcaggctgaacaagttcctgtctgatgccgagattgacagcacggctgtggagcgcattgctagtagcgccggtgatgcagcagcggtgaaagtacagaatggagtgtttgcttgggatgtgccagttgaaggtgcagaggatgcccggcagggccatggtacggagaatggccgagaggaggggccagagatggagatggtgctgaaggggattgaggtggaggtgaggaagggtgagctagctgcggtggttgggacagtgggctctggcaagtcgtcactgctgtcctgcattatgggagaaatgcacaaggtttccggcacggttagcatatgtgggagcacagcttgtgttgctcagacagcttggatccaaaatggaaccattcaagagaacattttatttggacaaccaatgcattcagagaggtacagggaagtcatacatgcttgttgcttagagaaagatttagaaatgatggagtttggagacaagactgaaataggagagagggggatcaacctcagtggtggccagaaacaacgcatccagcttgctagggcagtttatcaagattgtgatatatatctgcttgatgatatctttagtgcagttgatgctcatactggttcagctatcttcaaggaatgtctgaaaggtatactcaagaagaagacagttttgcttgtgactcaccaagtggatttcttaaagaatgtggatacagtattcgtaatgaaagatggggtagtcattcagtctgggagctacaaccagctactaacatcatgctcagatttttcagttcttgttactgctcaccatagttcaatggaggttccaggggcagcagagcaaatgtcccatgatcagaccactgagtattctcaggacaccaccgtaccagcaaaatctcctgtcaagtccaattctagtaatgaaaatggaggtaccagtgttgcaccaagcaaagaagcaggttcatctaaactgatcgaggaagaggaaaaggagagtggccgagtaagttggcaagtgtacaagctatacataacagaagcttggggttggtggggagttctggtcattttagctgtatcagttctgtcggaaggctccagtatggctagtaactactggctctcatatgaaacatctgggggcacaatatttgacacttctgtttttcttggtgtttacgtttcgatagttgctgcttcaattgtatgtgatgcgatcagtactcttttcgtgacattcttggggtttaagtcagcccaggtcttctttaacaagatgtttgacagcattctacgggcaccaatgtcattttttgacaccactccttctgggagaatactaagccgggcatcagcagaccaaatgaaaattgacactgcccttgtattctatgttggttttgctacatcaatgtgcatttccgtggtgagcagcattgctgttacctgccaggttgcatggccgtcagtcatagcagtacttccactagtgcttttaaacatttggtaccggaatcgttacatcgcaacatctcgagagttaactcgtcttcaaggagtaacaagggcacctgttattgatcacttctcagaaacctttttgggtgctccaactgtaaggtgctttgggaaggaggatgagttttaccaaataaacttggacagaatcaattcgaatttgcgcatgtcttttcataattatggagctaatgagtggctgggttttcgcctggagttgattggcacacttctactgtctataactgcttttcttatgatcagcttgcctagcaatttcatcaagaaagagtttgtcggcatgtccctttcgtatggtctatctctcaattcactggtgtactatacaatttcaatgacctgtatgatagaaaatgacatggtcgctgtggaaagggtgaatcagtacagtactcttccttctgaggcagcatgggaagtggcagattgtcttccctcaccaaattggcctagaagaggagatattgacgttaaagatctaaaggttaggtatcgatcaaacacacctctaatcttgaagggcattactattagcattaacagcggagaaaagataggagttgtgggaaggactggcagcggaaagtcaactttagttcaggctttgttcaggcttgtggagcctgtagaagggcatatcatcgttgatggagtagatattggcactttgggccttcatgatctcaggtcgcgctttggtgtgattcctcaagagcctgtgctctttgaaggaaccataagaagcaacatcgacccaattgggcgatattctgaggacgagatatggcaggcccttgagcgttgtcaactaaaagatatagtagctacaaaaccagagaaacttgatgcactagttgccgacatgggggagaactggagcgtaggacagaagcagctcctctgctttggtcgtgttattctgaagcgcagccggatcctgttcatggatgaggcaacagcttccgttgattctcagacagatgcgactatccagaggatcatccgagaagagttcactgattgcactatcatcagcattgcgcaccgcataccgactgtcatggacagtgatagagtcctagtgttggatgcagggttagtgaaggaatttgatgagccgtccaagttgatggggaggccatcactttttcgagcaatggttcaggagtatgcaaatcgctcttacagcacagaggcacgcgattga

SEQ ID NO: 7340 - protein, 1512 aa, Oryza sativa (japonica cultivar-group)
MALLLPGWMATTACSPPSGGSFPDLLAFLFLSPCPQRALLGAVDLVFVVASLVVLALPRGGGGGAGDGPEREALLPKPRASGRPFRVAVALGASGVFAAASAILLALALFLLPNTVWRVWESAFLAVHFVAHAVAAWTIASRRGAAGGALPLQLRVFWVVTALVGALFSASAAVRWAEDSLLFPDDPLAFAGLALSLPLVYVAITASSGEVAGTCEREPADVTTAAEPSTPYDAASWLSRATFSWINPLVSKGYASDSLAAEDVPPVSPAHRAEASYARFVSNWPAQGSRYPVGVALWLSFWPRVLLTAALGLVRLAAMYVGPSLINHFVDFISHGGTTWEGLRLVAILVAGKAVQTLASHHYNFQGQLLGMRIRGALLTALYRKSLRLSTGARRAHGSGAIVNYMQVDAGTVSYAMHGLHGLWLMPLQIVVALVLLYAYLGPSVLMTLAVITAVTVITAFANKLNLAYQLKFLGVRDSRIKAITEMLNHMRVIKLQAWEEKFGGKVRELRQTEMGWLTKIVLFMCANNVVFSSGPLAMTVLVFGTYLATGGELDAGKVFTATAFFSMLEGPMHNFPQTIVMCMQAFVSLGRLNKFLSDAEIDSTAVERIASSAGDAAAVKVQNGVFAWDVPVEGAEDARQGHGTENGREEGPEMEMVLKGIEVEVRKGELAAVVGTVGSGKSSLLSCIMGEMHKVSGTVSICGSTACVAQTAWIQNGTIQENILFGQPMHSERYREVIHACCLEKDLEMMEFGDKTEIGERGINLSGGQKQRIQLARAVYQDCDIYLLDDIFSAVDAHTGSAIFKECLKGILKKKTVLLVTHQVDFLKNVDTVFVMKDGVVIQSGSYNQLLTSCSDFSVLVTAHHSSMEVPGAAEQMSHDQTTEYSQDTTVPAKSPVKSNSSNENGGTSVAPSKEAGSSKLIEEEEKESGRVSWQVYKLYITEAWGWWGVLVILAVSVLSEGSSMASNYWLSYETSGGTIFDTSVFLGVYVSIVAASIVCDAISTLFVTFLGFKSAQVFFNKMFDSILRAPMSFFDTTPSGRILSRASADQMKIDTALVFYVGFATSMCISVVSSIAVTCQVAWPSVIAVLPLVLLNIWYRNRYIATSRELTRLQGVTRAPVIDHFSETFLGAPTVRCFGKEDEFYQINLDRINSNLRMSFHNYGANEWLGFRLELIGTLLLSITAFLMISLPSNFIKKEFVGMSLSYGLSLNSLVYYTISMTCMIENDMVAVERVNQYSTLPSEAAWEVADCLPSPNWPRRGDIDVKDLKVRYRSNTPLILKGITISINSGEKIGVVGRTGSGKSTLVQALFRLVEPVEGHIIVDGVDIGTLGLHDLRSRFGVIPQEPVLFEGTIRSNIDPIGRYSEDEIWQALERCQLKDIVATKPEKLDALVADMGENWSVGQKQLLCFGRVILKRSRILFMDEATASVDSQTDATIQRIIREEFTDCTIISIAHRIPTVMDSDRVLVLDAGLVKEFDEPSKLMGRPSLFRAMVQEYANRSYSTEARD

SEQ ID NO: 7341 - DNA, 3477 bp, Arabidopsis thaliana
  CDS (1)..(3477)
atgctttatgtggcttgtgcatcttgggtgatatgtttccttgaaggatattgttggacaagaacaggggagagacaagcagcaaaaatgagagaaaggtacttaagagcagtgttaagacaagatgtgggttactttgatcttcatgtcacaagcacttctgatattattaccagtgtctctagtgacagccttgtcattcaagacttcctcagtgaaaagttaccaaacattttgatgaatgcatctgcgtttgtcggaagctacatagtgggtttcatgttgctgtggagactcacaatcgtaggcttcccattcatcattctcctcttgatccctggactaatgtacggacgagccctcattggcatctcgaggaaaatacgtgaggagtacaatgaagctggttctatcgccgaacaagccatctcttcggttagaaccgtctatgcatttgttagtgagaagaagatgatagaaaagttctcagatgcgcttcaagggtcggtgaagctagggttgagacaagggctagctaaaggaattgctattgggagcaatggtatagtttatgctatatgggggttcttgacttggtatggaagtcggatggttatgaactatggctacaaaggtggtactgtctccacagtcacagtttgcgtcacctttggtggcacagcacttggtcaagcattgtcgaatcttaaatatttctccgaggcgtttgtggcaggggaacggattcaaaaaatgataaaaagagtccctgatatagattcagacaacttgaatggtcatattttggagactataagaggagaagttgaattcaacaacgtgaagtgcaagtacccgtctagacccgaaaccctaatctttgatgatttatgtctgaaaattccatcagggaaaactgtagctctggttggcggaagtggatcgggaaaatcaacagtgatatcgcttttacaaaggttctatgacccgaacgaaggcgatattctcattgatagtgtgtccattaataatatgcaagtgaaatggttgagatcgcaaatgggtatggttagccaagagccatcgctctttgccacatcgataaaggagaacatattatttggtaaagaggacgcatcctttgatgaagtagtggaagcagccaaggcctcaaatgctcataattttatttcgcaatttcctcatggttaccaaactcaggttggggagagaggagtgcatatgtcgggaggccagaagcagagaatcgcaattgcacgagcgttaatcaaatcaccgataattcttctcctagacgaggcaacaagcgcattggatttagaatctgaaagggtggtccaagaagccttagacaatgcatcagttggtcgtacaactattgttattgcccaccgtctctctaccattcgtaatgctgatattatatgtgttctacataatggttgcattgtagaaactggatcgcacgacaaactcatggagatagatggtaaatacacttctctagttcgcttacaacaaatgaagaatgaagaatcatgtgataacactagcgtaggtgtgaaagagggccgagtctcgagtttaagaaacgatttggattataatccaagagacttggctcatagcatgagttcaagcattgttacgaatctttctgactcgattcctcaagataagaagccgcttgtgccatcgtttaagagattgatggcaatgaatagaccagagtggaaacatgcattatgtggttgcttaagtgcatccttaggtggggccgtacaaccaatttacgcatattcgtccgggttaatgatatcggtatttttcctaaccaaccatgagcagatcaaagagaatacaagaatttacgtgttattattttttggtctagctctattcactttttttactagtatcagtcaacaatatagtttttcctacatgggagaatacctgactaaacgtatccgagaacagatgctctcgaagatactaacgtttgaagtcaattggttcgatgaggaagagaactcaagtggtgcaatttgctccagactagcgaaagatgctaacgtggtaaggtcgctcgttggtgaaagaatgtcattgctggtacaaaccatatcaacagttatggtagcttgcacaattggtttggtcatcgcttggagattcaccattgtgatgatttcagtacaaccagtaattattgtctgctattatattcaacgtgttctgctcaagaacatgtcgaaaaaagccatcattgcccaagatgaaagcagtaaactagctgcagaggctgtctccaacatccgaaccatcacaaccttctcatcacaagaacggatcatgaaattactcgagagagttcaagaaggtccacgaagagaaagtgcccgccaatcatggttagctgggattatgttggggactacgcaaagccttataacgtgcacctcagctttgaatttttggtatggtggtaaattaatcgctgatgggaagatggtatcaaaagcattctttgagttatttttgatctttaagactacaggccgggctattgccgaagctgggacaatgacgacagatctagccaagggctcaaattcagttgactcagtattcacagtgttagatcgtcgaaccaccattgagccggagaatccggatgggtatatcttagaaaaaataaagggccaaatcacatttctcaatgtggacttcgcttacccaacgcgacctaatatggttatattcaacaacttctccatagagatccacgagggaaagtcgacagcgatcgtaggtccaagtcggtcgggtaagtcaactgtaatcgggttaatcgaacggttctatgacccgttacaaggtattgtgaaaatcgatggccgtgatataaggtcgtatcatctaagatcacttcgtcaacacatgtctttggttagtcaagaaccaacattattcgcggggacaatccgagaaaacataatgtatggacgagcatctaacaagatcgacgagtcggagattatcgaggcaggaaagacggcaaacgctcacgagttcattacatcactatcagacggctatgatacgtactgcggagacagaggagtacaattgtctggtggtcaaaaacagaggatagctatcgcccgaacgattttaaagaatccatcaattttgctcctcgatgaagctacaagcgctttggacagccaatcagagcgtgtagtgcaagacgccctcgaacatgtgatggtagggaaaacaagcgttgtgatcgcacataggcttagcacgatccagaactgcgacacgattgctgttttagacaaaggaaaagttgtagaaagtgggacacacgcttccttgttagcaaaaggtcccacaggctcttatttctcattggtcagtcttcagagaaaggtcagatatgtataa

SEQ ID NO: 7342 - protein, 1158 aa, Arabidopsis thaliana
MLYVACASWVICFLEGYCWTRTGERQAAKMRERYLRAVLRQDVGYFDLHVTSTSDIITSVSSDSLVIQDFLSEKLPNILMNASAFVGSYIVGFMLLWRLTIVGFPFIILLLIPGLMYGRALIGISRKIREEYNEAGSIAEQAISSVRTVYAFVSEKKMIEKFSDALQGSVKLGLRQGLAKGIAIGSNGIVYAIWGFLTWYGSRMVMNYGYKGGTVSTVTVCVTFGGTALGQALSNLKYFSEAFVAGERIQKMIKRVPDIDSDNLNGHILETIRGEVEFNNVKCKYPSRPETLIFDDLCLKIPSGKTVALVGGSGSGKSTVISLLQRFYDPNEGDILIDSVSINNMQVKWLRSQMGMVSQEPSLFATSIKENILFGKEDASFDEVVEAAKASNAHNFISQFPHGYQTQVGERGVHMSGGQKQRIAIARALIKSPIILLLDEATSALDLESERVVQEALDNASVGRTTIVIAHRLSTIRNADIICVLHNGCIVETGSHDKLMEIDGKYTSLVRLQQMKNEESCDNTSVGVKEGRVSSLRNDLDYNPRDLAHSMSSSIVTNLSDSIPQDKKPLVPSFKRLMAMNRPEWKHALCGCLSASLGGAVQPIYAYSSGLMISVFFLTNHEQIKENTRIYVLLFFGLALFTFFTSISQQYSFSYMGEYLTKRIREQMLSKILTFEVNWFDEEENSSGAICSRLAKDANVVRSLVGERMSLLVQTISTVMVACTIGLVIAWRFTIVMISVQPVIIVCYYIQRVLLKNMSKKAIIAQDESSKLAAEAVSNIRTITTFSSQERIMKLLERVQEGPRRESARQSWLAGIMLGTTQSLITCTSALNFWYGGKLIADGKMVSKAFFELFLIFKTTGRAIAEAGTMTTDLAKGSNSVDSVFTVLDRRTTIEPENPDGYILEKIKGQITFLNVDFAYPTRPNMVIFNNFSIEIHEGKSTAIVGPSRSGKSTVIGLIERFYDPLQGIVKIDGRDIRSYHLRSLRQHMSLVSQEPTLFAGTIRENIMYGRASNKIDESEIIEAGKTANAHEFITSLSDGYDTYCGDRGVQLSGGQKQRIAIARTILKNPSILLLDEATSALDSQSERVVQDALEHVMVGKTSVVIAHRLSTIQNCDTIAVLDKGKVVESGTHASLLAKGPTGSYFSLVSLQRKVRYV

SEQ ID NO: 7343 - DNA, 1773 bp, Buchnera aphidicola str. APS (Acyrthosiphon pisum)
  CDS (1)..(1773): transl_table=11
atgaaaaaacaggtgaaaaaaatttataacatgaatcatttaattgcgttctggccaattttaaaacgtctactaatttatgtaaaacctcataaaaaaaaattaattttagcgtttatttttcttttaagtggatcaacttcagaagttttaggcccaatcttgatcagttattttattaataatattttatctaaacatcaactacatttattaataattttaactataattacattatttataatattacaaatattatcagtatttttgaattattttcaaagtattttatttaataaaatagcagtagaaagcattaacaaattacgtcaagatgttatgtatgctgcattgcaacaacctattagcgaatttgattctcaacctattggacagatgatttcaaaagtaacgaatgatactgaagcagttaaagaactatatgacacagttggacctacattgtttcgaagtataatattaatttttattatattatttgcaatgtttactcttgaatggcatatggcccttgttgctttatttattttaccattagtcattacaattatgctggtttatcaatattatagtacgccacttttacggaaagtaagatattacttagctgaaattaataataaatttaatgaaacgattaatggaatgaatgtaattcagcaattctgtcagcaacgtagatttcaggaaaaaataaaaaaaagtagtgatttacattacatgtcacgtatgaaaatattaagactagacggttttttattaagaccacttctgagtttattatcttctatgatattatgtaacttcatgttcttatttagtttttttccagttggagcttttgaagtaggtgtactatatgcgtttattacttatcttggacgactaaatgaacctttaattgctattacaatccaacagtcagtattacaacaatctattgttgcaggagaaagaatattttcactaatagattcgccaaaacaaaaatatggaaaaaataaagatttattaaaaagtggaaaaataaatattcaaaatgttagtttttatcataaaaactgcaataaaaatatactagaaaatattaatattaaaatttcctctaaaagttttgttgcatttgtaggacatactggtagtggaaaaagcactttagcaaatttaatcatgggatattatcctctaaaaaatggaaaaatatatttagatgacaagtctattgattcaataagtcatagtgttttaagaagaaatgtattaatggtacaacaagatccaatagttctctctgatacttttttttataatattacattgggaagaaagatacctgaagaaaaagtttggaatatattagatacggttcatctttcagatttagtcaaatcgatgcctaaaggtatttattcccttctaggagaagaaggtaataatttatctgttggtcaaaaacaattattagcgattgctagagtattggttgcatatcctaaagtacttatattagatgaagctactgctaatattgattctggaacagagcaattaattcaaaaaacactattatcgatacgaaaaaactgtactttaataataatagctcatagactttcgactattatcgaagcagattcaattatagttttaaaaaaggggaaaattgttgaatttggtactcatgaacaattattaactaaaaaaagttgttattataaaatgtataaatttcaatcatgtaaattttag

SEQ ID NO: 7344 - protein, 590 aa, Buchnera aphidicola str. APS (Acyrthosiphon pisum)
MKKQVKKIYNMNHLIAFWPILKRLLIYVKPHKKKLILAFIFLLSGSTSEVLGPILISYFINNILSKHQLHLLIILTIITLFIILQILSVFLNYFQSILFNKIAVESINKLRQDVMYAALQQPISEFDSQPIGQMISKVTNDTEAVKELYDTVGPTLFRSIILIFIILFAMFTLEWHMALVALFILPLVITIMLVYQYYSTPLLRKVRYYLAEINNKFNETINGMNVIQQFCQQRRFQEKIKKSSDLHYMSRMKILRLDGFLLRPLLSLLSSMILCNFMFLFSFFPVGAFEVGVLYAFITYLGRLNEPLIAITIQQSVLQQSIVAGERIFSLIDSPKQKYGKNKDLLKSGKINIQNVSFYHKNCNKNILENINIKISSKSFVAFVGHTGSGKSTLANLIMGYYPLKNGKIYLDDKSIDSISHSVLRRNVLMVQQDPIVLSDTFFYNITLGRKIPEEKVWNILDTVHLSDLVKSMPKGIYSLLGEEGNNLSVGQKQLLAIARVLVAYPKVLILDEATANIDSGTEQLIQKTLLSIRKNCTLIIIAHRLSTIIEADSIIVLKKGKIVEFGTHEQLLTKKSCYYKMYKFQSCKF

SEQ ID NO: 7345 - DNA, 1800 bp, Bacillus halodurans C-125
  CDS (1)..(1800): transl_table=11
atgatagatcataaagatcgcgtgttatcaagtaaagaacagcgcactgtctttaaaaggttgctgtcgtatgcggcccattataaaggacagctcatggtcgcttttctgttactgtttattgccacaggtgctcagctactcgggccgatcatcgttaagatttttatcgatgattatttaacgccacgctattttccaacagacgtcctttttctccttggagctggctatcttgtccttcatttgacagctgtcatcatcgattattatcaactatttttgtttcaaaaagttgccttgtccattgttcagcgactgcggattgacgtgttctcgagcgtgcaacggctcggtctttccttttttgaccaaacacctgcaggagggcttgtctccagaataacgaatgacacggagtctattaaagaattgtatgtgacggttttagcgacgtttgtgcaaaatatcatattcttaattggtatttttgccgccatgttttatttaaatgtgaccttggccatttactgtcttgttcttctaccactcatttttgctttaatgcaagtgtaccgaaaatatagttctcggttttatgcagatatgagcgaaaaactaagtctcttaaatggacgaataaacgaatcgattcaagggatggctatcattcaaatgtttcgccaagaacggcggatgcggaaagaatttagcgccattaacgacgagcattttttagcgggaatgaaaagcatgaagctggacggtttattgttacgtccagcggttgatgtcttgtccatcttggcgcttatgttgattttgagttattttgggatcatgtctatggacacagcggttgaaattggtgtcgtttacgccttcgtcaattacttagaccgtttttttgagccggttaatcaaatgatgatgcgactttctatgtttcagcaagcgattgtctcagcggggcgcgtctttaaactgatggatcatcgggagttagctccagatcgtgaggggaatgaacatccagcgatcataggggaaggaaatgtggaattccggaatgtttccttttcctatgacgggaaaacaaacgttttaaaaaacatttcgttcacggtgaaaaaaggagagacagtcgccctagtcggccatacgggtagtggaaaaacatcgatcatcaatgtgctaatgcgattttatccgttgcaggatggggaaattctcatcgatggtaaaccgctcacgtcctttgaaaataatgagctgcgcgctaaggtcgggcttgttttgcaagatccgtttctttatacaggaacgattgcgagcaacattcgtttgtatgatcaagccatttccgatgatcggatcaagcgggctgcctcgtttgttcgggcggatggatttatcgagcggctgtctcatggttatgagacaaaggtgacggagcggggagcaacgttttcaagtggccaacgacaactgctctcctttgctcgtaccatggtccgtgagccggcgattcttattttggacgaggcaacggcaagtgtggatacggagacggaagaagcaatacaagaagcacttgagcgaatgaaacaaggacggacgacgattgcgatcgctcaccgattgtcgacgataaaggatgcagatcaaattctcgttcttcaccaaggagaaattgtagagcggggaactcatgatgaactcattgccaaaaagggactttatcaaaaaatgtatgttttgcaaaaaggggatgaacaaggagaagcactgctgtcctaa

SEQ ID NO: 7346 - protein, 599 aa, Bacillus halodurans C-125
MIDHKDRVLSSKEQRTVFKRLLSYAAHYKGQLMVAFLLLFIATGAQLLGPIIVKIFIDDYLTPRYFPTDVLFLLGAGYLVLHLTAVIIDYYQLFLFQKVALSIVQRLRIDVFSSVQRLGLSFFDQTPAGGLVSRITNDTESIKELYVTVLATFVQNIIFLIGIFAAMFYLNVTLAIYCLVLLPLIFALMQVYRKYSSRFYADMSEKLSLLNGRINESIQGMAIIQMFRQERRMRKEFSAINDEHFLAGMKSMKLDGLLLRPAVDVLSILALMLILSYFGIMSMDTAVEIGVVYAFVNYLDRFFEPVNQMMMRLSMFQQAIVSAGRVFKLMDHRELAPDREGNEHPAIIGEGNVEFRNVSFSYDGKTNVLKNISFTVKKGETVALVGHTGSGKTSIINVLMRFYPLQDGEILIDGKPLTSFENNELRAKVGLVLQDPFLYTGTIASNIRLYDQAISDDRIKRAASFVRADGFIERLSHGYETKVTERGATFSSGQRQLLSFARTMVREPAILILDEATASVDTETEEAIQEALERMKQGRTTIAIAHRLSTIKDADQILVLHQGEIVERGTHDELIAKKGLYQKMYVLQKGDEQGEALLS

SEQ ID NO: 7347 - DNA, 1827 bp, Lactococcus lactis subsp. lactis Il1403
  CDS (1)..(1827): transl_table=11
atggagaaatctactgacaaaatgtctgtcagagaaagttggcaagtttttaaatttattttcaaattcttattacctttcaaaaagtatttcgtttgggcttttgtttttagtgtaattacaactgctctggcttcacttatgccttttgttttgtccgtttttatggattcttatttgacacctatgaaagcgactgaccagattattttctattttgcaggtctttatttgattttagcaataatcaattcaatagctttctttttcaaatggaattatctgcaaaatggttcgatttttgttaatcaatacattcgtaagaaagtttatcgaaaaattcatcagctaggcatgcgatattttgaccaaaaaccgacgggttggttaatcaccagaatcacaaatgacaccgatttatttgatttctggcagactttgtttaatgcattaacaagtttgctttctattatcattgccttcattgctttgtttattattgaccaccaaattgcgcttgtgatgttgttgattcttcccctattgattttggcagtattgatttatcaaaaagtgagtacaaaagtttatcaagccatgcttgctaagcgttcagaattgaatacgaaattaaatgaatacatttctgggatgagaattattcaacaatttcgtcaagagagcagactaggaaatgaatttgaaaaaacaaatgatgaatattatggttatcgaaaacgagtgattcagattaatgggattttgttgagccctttggttaattttttgatggccatctcaattgttgttgtcttgttgatgtattctaatcgaagtctacatgcagtggttgaggctggtttaatttatgctttcatcagtaatgtacaaatttactttaatcctatttcaggattgatggattctttatcaaacttttcaaatggattggtggcctctagtcgcattaagacaatcatggaagaaaaagaatttgcgccacaacaaggaatttcaacttctgtcagtaaaaatgttgatgaaaaatttactgacagaaaatctgtcagcaattctccaatcattcaagaaggaaaaattgaatttcgcaatgtcagtttttcatatgacggagaacatcaagttttgaaaaatatctcattcattgtgaatcctggagaaacgcttgcttttgtaggtcatacaggttcaggaaaatcgagtattattaatgttttcatgcgcttctatgaattcacagaaggtcaagttttgattgatgatcaggacattagaagttattcaaaagaagaacttcggaaaaaaattggtttagtattgcaagattcctttatgtttgttgcgtcagttactgacaatatcaaaatgatgaatccacagattactgaccaagcagccaaagaagcggctcgatttgttcaagctgacaaattcatcaaggatttggaaaatggttacgaaaccaaagtaattgaaggtggagctgccttctcggccggtgaacgtcaattaattaactttgctcgaacgattgtgcgtaatccgaaaattctcttattagatgaagcaacagccaatattgatactgaaactgaagcgcttattcaagaaggtctgataaatatgcgacaaaatcgaacgacaatggcaattgctcaccgtttatcaacgattaaagatgctgaccaaattttagtcttgaacaagggagaaattattgagcgaggaaatcatgaccaacttttagagcttaatggttattatgcagacatgtatcgaattcaaactttacaaaaagaactatga

SEQ ID NO: 7348 - protein, 608 aa, Lactococcus lactis subsp. lactis Il1403
MEKSTDKMSVRESWQVFKFIFKFLLPFKKYFVWAFVFSVITTALASLMPFVLSVFMDSYLTPMKATDQIIFYFAGLYLILAIINSIAFFFKWNYLQNGSIFVNQYIRKKVYRKIHQLGMRYFDQKPTGWLITRITNDTDLFDFWQTLFNALTSLLSIIIAFIALFIIDHQIALVMLLILPLLILAVLIYQKVSTKVYQAMLAKRSELNTKLNEYISGMRIIQQFRQESRLGNEFEKTNDEYYGYRKRVIQINGILLSPLVNFLMAISIVVVLLMYSNRSLHAVVEAGLIYAFISNVQIYFNPISGLMDSLSNFSNGLVASSRIKTIMEEKEFAPQQGISTSVSKNVDEKFTDRKSVSNSPIIQEGKIEFRNVSFSYDGEHQVLKNISFIVNPGETLAFVGHTGSGKSSIINVFMRFYEFTEGQVLIDDQDIRSYSKEELRKKIGLVLQDSFMFVASVTDNIKMMNPQITDQAAKEAARFVQADKFIKDLENGYETKVIEGGAAFSAGERQLINFARTIVRNPKILLLDEATANIDTETEALIQEGLINMRQNRTTMAIAHRLSTIKDADQILVLNKGEIIERGNHDQLLELNGYYADMYRIQTLQKEL

SEQ ID NO: 7349 - DNA, 1860 bp, Deinococcus radiodurans R1
  CDS (1)..(1860): transl_table=11
atgacccagaaggcttccgaatacgacaagggcttcgatgtgggcctcacgcgacgcatcatcggctacctcgggccgtacaagaccctggcggcggcgggcgtgctgctcgcgctgctcacggcggccttgcagcccttgcccacgttgctgcaacgctacgccatcgaccactacctcgtgccgtacaccaacggcagcaacacggacgccgccgcgctctaccaggggctgaccatggtggtgctcggctacgtggcgctgcgggtgctggaatttgtgctgacctacctctcgaccatcacggtggggtacctcggccagaacgtgctgcgcgacatccgcgccgacgtgttcggcaagttgcagcggctgcacctgcgctacttcgaccagaacccggtgggacgcctgattacccgcgtgacgagcgacgtggacgccatcaaccagttcatcaccggcggtctgatctcgatgatgacgagcaccttcctgatcatcgtgttcatgaccgtgatgctgacgatcaactggcgcctcgctttgatcgcctttacggtgctgccggtcctgttctacgcgaccaattttttccggggcaagctgcgcgaggcgttccgggaaacccgcacccagcaggccatcgtgaactccaagctcaacgagaacatcaccgggatgctgacggtgcagctcttcgggcgcgagcggcgcagcgccctcgacttcgaccattccaaccgggcgctgctcacgtcgctggaaaactcggtgaagtggttctcgctgttcatgcccaccgtggcggtgctggggcaggtcgccatcgcgctggtgctgtacttcgcggcgcggcagattctgggcgtagacgtggtcgggaccggcacggcggcggccatttcggtgggcacgctcttcgccttcgtgcagtggacgcagcaactctttcagccgattcaggacctcgccgacgtgttcaacaacctccaggccgccaccgcgagcagcgagcgcatcttcggggtgctcgacaccgaggaagaaatcaccgacaagcctgatgccaagaccctggtgaactttcgcggtcaggtggatttcgaccgggtgtggttcgcctacagcgaggacgtgacggcgcagacgcccgacgaagacgaccgctggattctgcgcgacttcgacctgcacattcagcccggcgagagcgtggcgctggtgggcgcgacgggggcgggcaagacgagcgtgaccgcgctggtgagccgcttttacgacgtgcagcgcggcgcagtgagggtggacggcaccgacgtgcgcgacctccaacaacacgacctgcggcggcatgtcggcgtggtgcttcaggacgtgttcctgttcgccggcaccatcgagagcaacctgacgctcgacaaccccgccattccccacgaccgcgtggtggaggcgtgccagtacgtgggcgtacacgactacatcctctcgctggagaacggctaccagaccgaggtgcgcgagcgcggcgccaccctctccaccgggcaaaagcagctgctcgccttcgcccgcgccctgattcagaatcccgacatcttgctcgtgctcgacgaagcgaccgccaacgtggacactgagaccgagctgcggattcaggacgcgctgaaaaaggtgatgcagggccgcacgtccatcatcatcgcccaccgtctctcgaccatcgagcactgcgaccgcatcatcgtgatgcgccggggccgcatcgtggaacagggcacgcacgcccagctcatcgcgcagggcggctactacgccaagctcaacgccttgcagtacgcgggggcagcagactga

SEQ ID NO: 7350 - protein, 619 aa, Deinococcus radiodurans R1
MTQKASEYDKGFDVGLTRRIIGYLGPYKTLAAAGVLLALLTAALQPLPTLLQRYAIDHYLVPYTNGSNTDAAALYQGLTMVVLGYVALRVLEFVLTYLSTITVGYLGQNVLRDIRADVFGKLQRLHLRYFDQNPVGRLITRVTSDVDAINQFITGGLISMMTSTFLIIVFMTVMLTINWRLALIAFTVLPVLFYATNFFRGKLREAFRETRTQQAIVNSKLNENITGMLTVQLFGRERRSALDFDHSNRALLTSLENSVKWFSLFMPTVAVLGQVAIALVLYFAARQILGVDVVGTGTAAAISVGTLFAFVQWTQQLFQPIQDLADVFNNLQAATASSERIFGVLDTEEEITDKPDAKTLVNFRGQVDFDRVWFAYSEDVTAQTPDEDDRWILRDFDLHIQPGESVALVGATGAGKTSVTALVSRFYDVQRGAVRVDGTDVRDLQQHDLRRHVGVVLQDVFLFAGTIESNLTLDNPAIPHDRVVEACQYVGVHDYILSLENGYQTEVRERGATLSTGQKQLLAFARALIQNPDILLVLDEATANVDTETELRIQDALKKVMQGRTSIIIAHRLSTIEHCDRIIVMRRGRIVEQGTHAQLIAQGGYYAKLNALQYAGAAD

SEQ ID NO: 7351 - DNA, 1890 bp, Agrobacterium tumefaciens str. C58
  CDS (1)..(1890): transl_table=11
atgatggccacgaagaaaaaaaccatttcggcggattccagcaatccgacccagaccctgatcaatctctggccctatatgtggccagagggtcggtgggacctgaagatgcgggtgatctgggcaaccgtgttcctcatcgtcgccaagctggtgctgatcgcggttccctatttcttcaaatgggcgacggatgcgctgaacggcaagctcgacatggcagggctggttccggccttcctgctcggcgcggtggcgctggtcatcgcctataatctgacgcggctgatccaggtcgggctcaaccagctgcgcgattcgctgtttgccagcgtcggccaacatgcggtgcgccagctcgcctatcgtaccttcgtgcacatgcaccggctttcgctgcgtttccatctggagcgcaagaccggcgggctgtcgcgggtcatcgagcgcggcacgaagggcatcgaaaccattgtccgcttcaccattctcaataccgcaccgaccttcatcgaattcctgctgacggccatcatcttctgggcgtcctatggtttttcctatgtgctggtcaccgtcgtcaccgtctgggcctatatctggttcacggtcagggccagcaactggcgtatcggcatccgccgcgccatgaatgacagcgataccgacgccaataccaaggcgatcgattcgctactcaacttcgagaccgtcaaatatttcggcaatgaggaaatggaggcacggcgtttcgacgtcgccatggagcgttacgaaaaatcggcgatctcgatctggacctcgctcggctggctgaactttggccagggcgtgattttcggcatcggctccacgatcatgatggtgatgtcggcactggccgtgcagcgcggcgagcagaccatcggcgatttcgtgttcgtcaatgcgctgctgctgcagctttccgtgccgctcaatttcatcggcttcgtttatcgcgaaatccgccagggcctgaccgacatcgaacagatgttcgatcttctcgaggtggaggccgaagtcaccgacaggccggatgcgaagccgcttgcggccggtcccggcgcgatctccttccgcgacgtgcattttgcctacgaccctgaaagaccgatcctcaagggcgtttccttcgatgtgccggcgggcaagacggtggcgatcgtcggcccttccggtgcgggaaaatcgacgatctcgcggctgctttatcgtttctacgatattcaggagggcgccgttaccatcgacgggcaggatattcgcgacgtgacgcaaaagagcctgcgctcgatgatcggcatggtgccgcaggataccgtgctgttcaacgacaccctcgcctacaatatccgctacggtcgcccctccgccaccgacgaggagctgaaggcagcggcggatgcagcgcagatcagcgccttcatcggcaaactgccggacggttacgccaccatggtcggcgaacggggactgaagctttcgggtggcgaaaagcagcgcgtggcgattgcccggaccattctcaaggcaccgccgatcctgatcctcgacgaggcgacctcggcgctcgatacgcataccgagcaggaaatccagagcgccctcgacatcgtctcgaaaaaccgcaccacgctggtcatcgcccaccgcctctccacggtcatccacgcggacgaaatcatcgtgctgaaggaaggactgatcgccgagcggggaacgcatgcctcgctgatggcgcatgatggcctctacgcctcgatgtggagccgccagcgcgaggcgatccgcgccgaagagatgctgcgccatgttcgcgaaagcgacgatctcggcgtcgtggaccgcggcgaaccggcgcattga

SEQ ID NO: 7352 - protein, 629 aa, Agrobacterium tumefaciens str. C58
MMATKKKTISADSSNPTQTLINLWPYMWPEGRWDLKMRVIWATVFLIVAKLVLIAVPYFFKWATDALNGKLDMAGLVPAFLLGAVALVIAYNLTRLIQVGLNQLRDSLFASVGQHAVRQLAYRTFVHMHRLSLRFHLERKTGGLSRVIERGTKGIETIVRFTILNTAPTFIEFLLTAIIFWASYGFSYVLVTVVTVWAYIWFTVRASNWRIGIRRAMNDSDTDANTKAIDSLLNFETVKYFGNEEMEARRFDVAMERYEKSAISIWTSLGWLNFGQGVIFGIGSTIMMVMSALAVQRGEQTIGDFVFVNALLLQLSVPLNFIGFVYREIRQGLTDIEQMFDLLEVEAEVTDRPDAKPLAAGPGAISFRDVHFAYDPERPILKGVSFDVPAGKTVAIVGPSGAGKSTISRLLYRFYDIQEGAVTIDGQDIRDVTQKSLRSMIGMVPQDTVLFNDTLAYNIRYGRPSATDEELKAAADAAQISAFIGKLPDGYATMVGERGLKLSGGEKQRVAIARTILKAPPILILDEATSALDTHTEQEIQSALDIVSKNRTTLVIAHRLSTVIHADEIIVLKEGLIAERGTHASLMAHDGLYASMWSRQREAIRAEEMLRHVRESDDLGVVDRGEPAH

SEQ ID NO: 7353 - DNA, 1752 bp, Streptococcus pneumoniae R6
  CDS (1)..(1752): transl_table=11
atgcagaataaacaagaacaatggactgtattgaagcgcttgatgtcctatctcaagccttatggactccttacctttttggcactcagttttctcctagcgacgacggtcattaaaagtgtcattccccttgtggcttcccactttatcgaccagtatctcagcaatcttaaccaactagccgtgaccgttttgctggtctactatggtctctacatcctacaaactgtagttcagtatgtcggcaatcttctctttgcgcgcgtgtcttacagtattgttagggatattcgtcgggatgcctttgccaatatggagaaactgggcatgtcttactttgacaagacgccagcaggttctatcgtttctcgtttgaccaacgataccgagacgattagtgatatgttttctgggattttatccagctttatctcagcagtttttatctttctgacaaccctttataccatgttggtgctggattttcgtttgacagcattagtcttgctctttctccccttgattttccttttggtcaatctctatcgaaaaaagtcagtgaaaatcatcgagaaaaccagaagtctcttgtcagatatcaatagtaagctggcagagaatatcgagggaatcaggattattcaggcttttaatcaagagaagcgcctgcaggcagaatttgatgaaatcaaccaagagcacttggcctatgccaaccgttctgtagccttggatgccctctttttgagacctgccatgagtttgttgaaacttctaggttatgctgtcttgatgacctattttggctatcgtggtctttctatcgggataacggccgggaccatgtatgcttttatccagtacatcaaccgcctctttgaccctttgattgaggtgacgcaaaacttttcaacactgcaaacgtctatggtttctgcaggccgtgtctttgccttaatcgatgagaggacctatgagccccttcaagaaaatgggcaagccaaagtcaaagaaggcaatatccgttttgaacatgtgtgtttctcgtatgacggtaaacatccgattctggatgacatttctttctctgttaataagggtgaaaccattgcctttgtaggtcatacaggttcagggaaatcgtctattatcaatgtcctcatgcgcttttatgaattccagtcagggagagttctcttggatgatgtggatatcagggatttcagtcaagaagagctgagaaaaaacatcggtttggttttacaggaacccttcctctatcatggaactattaagtccaatatcgccatgtaccaagaaatcagtgatgagcaggttcaggctgcggcagcctttgtggatgcagattcctttattcaagaacttcctcaggggtacgactcccctgtttccgagcgtggttcgagcttctctactgggcagcgccagcttcttgcctttgctagaacagtcgccagccagcctaaaatcctgattttggatgaagcgacagccaatattgactctgaaacagaaagtttggttcaagcttctctggcgaagatgagacagggccgaacaactattgctatcgctcaccgcctttctactattcaagacgccaactgcatctatgtcttggataagggacgcattatcgagagtggaacccatgaggaactcttgactctgggaggaacctatcacaagatgtatagtttgcaggcaggggccatggcctatactctttga

SEQ ID NO: 7354 - protein, 583 aa, Streptococcus pneumoniae R6
MQNKQEQWTVLKRLMSYLKPYGLLTFLALSFLLATTVIKSVIPLVASHFIDQYLSNLNQLAVTVLLVYYGLYILQTVVQYVGNLLFARVSYSIVRDIRRDAFANMEKLGMSYFDKTPAGSIVSRLTNDTETISDMFSGILSSFISAVFIFLTTLYTMLVLDFRLTALVLLFLPLIFLLVNLYRKKSVKIIEKTRSLLSDINSKLAENIEGIRIIQAFNQEKRLQAEFDEINQEHLAYANRSVALDALFLRPAMSLLKLLGYAVLMTYFGYRGLSIGITAGTMYAFIQYINRLFDPLIEVTQNFSTLQTSMVSAGRVFALIDERTYEPLQENGQAKVKEGNIRFEHVCFSYDGKHPILDDISFSVNKGETIAFVGHTGSGKSSIINVLMRFYEFQSGRVLLDDVDIRDFSQEELRKNIGLVLQEPFLYHGTIKSNIAMYQEISDEQVQAAAAFVDADSFIQELPQGYDSPVSERGSSFSTGQRQLLAFARTVASQPKILILDEATANIDSETESLVQASLAKMRQGRTTIAIAHRLSTIQDANCIYVLDKGRIIESGTHEELLTLGGTYHKMYSLQAGAMAYTL

SEQ ID NO: 7355 - DNA, 2022 bp, Bacillus subtilis subsp. subtilis str. 168
  CDS (1)..(2022): transl_table=11
atgaaaataggaaaaacgttatggagatacgcacttctttatcgaaaattgctgatcacagccgtccttttgctaactgttgccgtcggtgcagaactgactgggccctttattggcaaaaaaatgatagacgaccatatcctcggcattgagaaaacatggtatgaagctgcggaaaaagataaaaatgccgttcagtttcacggcgtctcatatgtcagagaggaccgattgcaggagcctgtttcaaaagcaaaagaagcgcatatttatcaagtgggaatggcgttctattttgttgatcaggctgtcagcttcgacgggaatagaacggtttctgacgggaagctgacgatcacaaacggagacaagagccgggcatatgctgccgaaaagctgactaagcaggaacttttccagttctatcagccggaaataaagggaatggtgttactgatctgcctgtatgggggcttgcttgtgttttcggtattctttcaatacggacagcattatctgctgcagatgagcgccaatcggattattcaaaagatgaggcaggacgtgttttcgcacatacagaaaatgccgattcgctattttgacaaccttccggccggaaaagtcgttgcgcggattaccaatgatacggaggctattagggatttatatgtcacagtgctttcaacatttgtgacaagcggaatctatatgttcgggatattcacggctttgtttctgcttgatgtgaagcttgcgtttgtatgtctggcaattgtgccgattatctggctgtggtcggtcatataccggagatatgcgtcatattacaaccaaaaaatccgctcgatcaacagtgacattaacgcaaaaatgaatgagtcaattcaaggcatgaccattattcaggctttccgccatcaaaaggaaacaatgagagaatttgaggaattaaatgaatcacatttttatttccaaaacaggatgctgaatttaaactccttaatgtcccataatctggtcaatgtcatccgcaatcttgcgttcgtctgtctgatctggcattttggcggtgcgagcctgaatgcggcggggattgtttctatcggtgtgctgtacgcgtttgtcgattatttgaaccggttatttcagccgatcacaggcatcgtcaatcagttttcaaagctggagcttgcaagggtctccgccgggcgtgtttttgaactgcttgaagaaaagaatacggaagaagcgggtgaaccggcgaaggagcgcgcgctggggcgggttgaatttcgtgatgtgtcatttgcgtatcaagaaggtgaagaggtattaaagcatatttcctttactgcgcaaaaaggcgaaaccgtagcgctcgtcggccataccggatcaggaaaaagctcgattttgaatcttctgtttcgtttttatgatgcgcaaaaaggtgatgtcttaattgatggaaaaagcatttacaacatgtcaagacaggaactcagatcccatatgggtattgtgcttcaggacccgtacttattctcgggcacaatcggatctaacgtaagtctggatgacgaaagaatgactgaagaagaaataaaaaatgcactgcggcaagtcggtgctgagcctcttcttaagaagcttccgaagggcattaatgagcccgtgattgaaaaaggcagcacgctatcctctggagagcggcagttaatttctttcgctagagctttggcgtttgatcccgcgatcttgattttagatgaggcaacggcgcatattgatacagagacagaggccgtgatccagaaggcgcttgatgtcgtcaaacaaggacgcaccaccttcgtcatcgctcaccggctttcaacaatcagaaatgctgatcagattttggttcttgataaaggagaaattgttgagagagggaaccacgaggaactgatggcattagaaggccaatattatcaaatgtatgaactgcaaaagggacagaaacattccattgcataa

SEQ ID NO: 7356 - protein, 673 aa, Bacillus subtilis subsp. subtilis str. 168
MKIGKTLWRYALLYRKLLITAVLLLTVAVGAELTGPFIGKKMIDDHILGIEKTWYEAAEKDKNAVQFHGVSYVREDRLQEPVSKAKEAHIYQVGMAFYFVDQAVSFDGNRTVSDGKLTITNGDKSRAYAAEKLTKQELFQFYQPEIKGMVLLICLYGGLLVFSVFFQYGQHYLLQMSANRIIQKMRQDVFSHIQKMPIRYFDNLPAGKVVARITNDTEAIRDLYVTVLSTFVTSGIYMFGIFTALFLLDVKLAFVCLAIVPIIWLWSVIYRRYASYYNQKIRSINSDINAKMNESIQGMTIIQAFRHQKETMREFEELNESHFYFQNRMLNLNSLMSHNLVNVIRNLAFVCLIWHFGGASLNAAGIVSIGVLYAFVDYLNRLFQPITGIVNQFSKLELARVSAGRVFELLEEKNTEEAGEPAKERALGRVEFRDVSFAYQEGEEVLKHISFTAQKGETVALVGHTGSGKSSILNLLFRFYDAQKGDVLIDGKSIYNMSRQELRSHMGIVLQDPYLFSGTIGSNVSLDDERMTEEEIKNALRQVGAEPLLKKLPKGINEPVIEKGSTLSSGERQLISFARALAFDPAILILDEATAHIDTETEAVIQKALDVVKQGRTTFVIAHRLSTIRNADQILVLDKGEIVERGNHEELMALEGQYYQMYELQKGQKHSIA

SEQ ID NO: 7357 - DNA, 1782 bp, Salmonella enterica subsp. enterica serovar Typhi str. CT18
  CDS (1)..(1782): transl_table=11
atgcgtagttttggacagctatggccgacgctgaaacggttgctggcgtatggctcgccatggcgaaaaccgctctctgtcgcggtgatgatgctgtggattgcggtggcggcggaggttagcggtccgctgctgatcagctatttcattgataacatggtggcccgccaccatttaccgttgggcaaggtcgcggggctggcggccgcctatgtggggctacagtttctggcggcgggtctgcattacgcccagtctttattatttaaccgggcggccgttggcgtggttcagtccttgcgcacggacgtcatggatgccgccttgcgccagccgctaagcgccttcgacacgcagcctgtcggacaattaatttcacgcgtgaccaacgatacggaagtcatccgcgatctgtacgtcacggtcgtcgcaacggtattacgtagcgcggcgttgatcggcgccatgctggtcgccatgttcagccttgactggcggatggcgctggtggcggttttgatttttccggcggtattgaccgtgatggtcatttatcagcgctacagcacgccgattgtacgccgcgtgcgggcatacctggcggatattaacgacggctttaacgaaatcatcaatgggatgagcgtaattcagcagtttcgccagcaggcgcgcttcggcgaacgcatgggcgaggccagccgctcgcactacatggcgcggatgcagacgctgcgcttggacggctttttattgcgtccgctgcttagcctcttttccgcgctcattttatgcggtttgttgatgcttttcagctttacgtctgccggcacgattgaggtcggggtgctgtatgcgttcattagctatttgtcacgtctgaacgagccgctcattgaactgaccacccagcaatccatgctacagcaggcggttgtggcgggagagcgtgtttttgaactgatggatcgcccgcgccagcgctatggcagcgacgacaggccgttacaaagcggggcgattgatattgatcatctgtcgtttgcttaccgcgacgataatcttgttttacaggacattacgctatcagtaccgtcccgtagctttgtggcgctggtggggcacaccggcagcgggaagagcacgctcgccagcttattaatggggtattaccccctgacacaaggcgaaattcggctggatgggcgagaaatcgcctctcttaatcatcgcgttttacgccagggcgtggcgatggttcaacaggacccggtagtgatggcggatacctttctggctaatgtgacgctggggcgcgatgtctccgaggcgcaggtgtggcaggcgctggaaacggtacaactggcagatctggcgcgcggcctgagcgacgggctgcatacgcatctcggcgagcagggaaatacgctgtccgtcgggcaaaaacagctattggcgctggcgcgcgtgctggttgacgccccgcaaatattaattcttgatgaagcgacggccagcatcgattccggcactgagcaggcgatacagcaggcgctggcggcgattcgcgagcgcaccacgttggtggttattgcccatcggctatcgacaatcgtggaggcggataccattctggttctctatcgcggccaggcggtggagcgcgggacgcatcaacaattgctggcggcgcaagggcgctactggcaaatgtatcaattacagttagttggcgaggagttagccgccagcgtacacgaagaatccggccctacggcgtaa

SEQ ID NO: 7358 - protein, 593 aa, Salmonella enterica subsp. enterica serovar Typhi str. CT18
MRSFGQLWPTLKRLLAYGSPWRKPLSVAVMMLWIAVAAEVSGPLLISYFIDNMVARHHLPLGKVAGLAAAYVGLQFLAAGLHYAQSLLFNRAAVGVVQSLRTDVMDAALRQPLSAFDTQPVGQLISRVTNDTEVIRDLYVTVVATVLRSAALIGAMLVAMFSLDWRMALVAVLIFPAVLTVMVIYQRYSTPIVRRVRAYLADINDGFNEIINGMSVIQQFRQQARFGERMGEASRSHYMARMQTLRLDGFLLRPLLSLFSALILCGLLMLFSFTSAGTIEVGVLYAFISYLSRLNEPLIELTTQQSMLQQAVVAGERVFELMDRPRQRYGSDDRPLQSGAIDIDHLSFAYRDDNLVLQDITLSVPSRSFVALVGHTGSGKSTLASLLMGYYPLTQGEIRLDGREIASLNHRVLRQGVAMVQQDPVVMADTFLANVTLGRDVSEAQVWQALETVQLADLARGLSDGLHTHLGEQGNTLSVGQKQLLALARVLVDAPQILILDEATASIDSGTEQAIQQALAAIRERTTLVVIAHRLSTIVEADTILVLYRGQAVERGTHQQLLAAQGRYWQMYQLQLVGEELAASVHEESGPTA

SEQ ID NO: 7359 - DNA, 1782 bp, Salmonella typhimurium LT2
  CDS (1)..(1782): transl_table=11
atgcgtagttttggacagctatggccgacgctgaaacggttgctggcgtatggctcgccatggcgaaaaccgctctctgtcgcggtgatgatgctgtggattgcggcggcggcggaggttagcggtccgctgctgatcagctatttcattgataacatggtggcccgccaccatttaccgttgggcaaggtcgcggggctggcggccgcctatgtggggctacaatttctggcggcgggtctgcattacgcccagtctttattatttaaccgggcggccgttggcgtggttcagtccttgcgcacggacgtcatggatgccgccttgcgccagccgctaagcgccttcgacacgcagcctgtcggacaattaatttcacgcgtgaccaacgatacggaagtcatccgcgatctgtacgtcacggtcgtcgcaacggtattacgtagcgcggcgttgatcggcgccatgctggtcgctatgttcagccttgactggcggatggcgctggtggcgattttgatttttccggcggtattgaccgtgatgatcatttatcagcgctacagcacgccgattgtacgccgcgtgcgggcatacctggcggatattaacgacggctttaacgaaatcatcaatgggatgagcgtaatccagcagtttcgccagcaggcgcgcttcggcgaacgcatgggcgaggccagccgctcgcactacatggcgcggatgcagacgctgcgcttggatggctttttattgcgtccgctgcttagcctcttttccgcgctcattttatgcggtttgttgatgcttttcagctttacgtctgccggcacgattgaggtcggggtgctgtatgcgttcattagctatttgtcacgtctgaacgagccgctcattgaactgaccacccagcaatccatgctacagcaggcggttgtggcgggagaacgtgtttttgaactgatggatcgcccgcgccagcgctatggcagcgacgacaggccgttacaaagcggggcgattgatattgatcatctgtcgtttgcttaccgcgacgataatcttgttttacaggacattacgctatcagtaccgtcccgtagctttgtggcgctggtggggcacaccggcagcgggaagagcacgctcgccagcttattaatggggtattaccccctgacacaaggcgaaattcggctggatgggcgagaaatcgcctctcttaatcatcgcgttttacgccagggcgtggcgatggttcaacaggacccggtagtgatggcggatacctttctggctaatgtgacgctggggcgcgatgtctccgaggcgcaggtgtggcaggcgctggaaacggtacaactggcagatctggcgcgcggcctgagcgacgggctgcatacgcatctcggcgagcagggaaatacgctgtccgtcgggcaaaaacagctattggcgctggcgcgcgtgctggttgacgccccgcaaatattaattcttgatgaagcgacggccagcatcgattccggcactgagcaggcgatacagcaggcgctggcggcgattcgcgagcgcaccacgctggtggttattgcccatcggctatcgacaatcgtggaggcggataccattctggttctccatcgcggccaggcggtggagcgcgggacgcatcaacaattgctggcggcacaaggacgctactggcaaatgtatcaattacagttagttggcgaggagttagccgccagcgtacacgaagaacccggccctgcggcgtaa

SEQ ID NO: 7360 - protein, 593 aa, Salmonella typhimurium LT2
MRSFGQLWPTLKRLLAYGSPWRKPLSVAVMMLWIAAAAEVSGPLLISYFIDNMVARHHLPLGKVAGLAAAYVGLQFLAAGLHYAQSLLFNRAAVGVVQSLRTDVMDAALRQPLSAFDTQPVGQLISRVTNDTEVIRDLYVTVVATVLRSAALIGAMLVAMFSLDWRMALVAILIFPAVLTVMIIYQRYSTPIVRRVRAYLADINDGFNEIINGMSVIQQFRQQARFGERMGEASRSHYMARMQTLRLDGFLLRPLLSLFSALILCGLLMLFSFTSAGTIEVGVLYAFISYLSRLNEPLIELTTQQSMLQQAVVAGERVFELMDRPRQRYGSDDRPLQSGAIDIDHLSFAYRDDNLVLQDITLSVPSRSFVALVGHTGSGKSTLASLLMGYYPLTQGEIRLDGREIASLNHRVLRQGVAMVQQDPVVMADTFLANVTLGRDVSEAQVWQALETVQLADLARGLSDGLHTHLGEQGNTLSVGQKQLLALARVLVDAPQILILDEATASIDSGTEQAIQQALAAIRERTTLVVIAHRLSTIVEADTILVLHRGQAVERGTHQQLLAAQGRYWQMYQLQLVGEELAASVHEEPGPAA

SEQ ID NO: 7361 - DNA, 1806 bp, Listeria monocytogenes EGD-e
  CDS (1)..(1806): transl_table=11
atggaagcgatgaatgaacaagatgaaatgttagtgatgtccggtaaggaacatcgcgaggttttaaaaagaatgcttagttataccaaatatcatattccgagtttaatttggaccggtgtgcttgttcttctcgtaacgcttgcggatgtgtttgcaccaatcttgattaaaatatttttggatgattatttaacaccgatgaatttggaaatgcaggctttgctaattcttggtgcgggatatttgggacttacgattgggaaatcagttgtttggtatttccaattgctgttctttcaaaaaatcgcgcttgaaattgtgcaacaaatgcggattgatatttttacaaaacttcattcgctaggaatgcgctacttcgacaaaacgcctgcaggaagcattgtgtcgcgcgtgacaaatgataccgaagcggtgaaagatatgtttattaatgtgctttcaacagcgattcaaagtttgtttatgctcgttgggatttatgcagcgatgtttgcgctcaatgttcaattagcgttatatagtttacttttattcccgcttattgtctttattatttttgtttaccggaaatacagttcacaattttaccgggcgagacgagaaaaattaagtcaattaaatgcaaaaattgctgagtcgatttcaggaatgtcgattgttcaacaatttaatcaagagcgtcgtttagtaaaagaatttgagaaaatcaataaagattactatgacgtcggaatgaaaaatatcaaatttaatgcgctattacttggaccggcgattgatttgatttacgcgttggctgtagtgattattcttagtttctttggtgcagagtcattaataggaccggtagcgattgggacgatttatgcctttattagttactttgatcgttttttagaagcgatttataacgtaatggagcggctggcgatgtaccaagaggcgattacggcggcttcccgagtatttcgtattatggatgaaacggaagaagtgccagcccaattaaacgatccagaggcgaaaatcacgcgtgctaaaattgagtttaaagatgtttcgtttgcttatgaaggtgggcgtgacgttcttaaaaatattagctttacggctgaacctggacaaacggtggcgcttgttggccatactgggagcgggaaaagttccattatcaatttaatgatgcgtttttatgaatttgaacgtggggatattttaattgatggtaagtcgattaagtctcacgaaattacagaactacgtaagaaaactggattagttttgcaagatagttttatgttttatggggatattaatacaaatattcgcctctacgataaaagcattacagatgaacaaattgtggatgctgcgaaatttgttcaagcggatggctttattcaaacattatccgatgagtacaaccataaagtgattgagcgaggtgcttcgttttcaagtgggcaaagacagctgatttcatttgccagaacggttgtaaccaatccacaaattctcgttttagacgaagcaacggcaaatattgatacagaaacagaaagcttaattcaaacggggttaaaacgaatgcgagaaggacgcacgacaattgcgattgcgcatcgactttcgacaattaaggatgccgatttaattttagttttatccaaaggaagaattattgagcgtggtacacatgacagtttgattgcagaagaaggggtatatcattcgatgtatcaattacaaaatagtggaatggatttagacgaagcgctttaa

SEQ ID NO: 7362 - protein, 601 aa, Listeria monocytogenes EGD-e
MEAMNEQDEMLVMSGKEHREVLKRMLSYTKYHIPSLIWTGVLVLLVTLADVFAPILIKIFLDDYLTPMNLEMQALLILGAGYLGLTIGKSVVWYFQLLFFQKIALEIVQQMRIDIFTKLHSLGMRYFDKTPAGSIVSRVTNDTEAVKDMFINVLSTAIQSLFMLVGIYAAMFALNVQLALYSLLLFPLIVFIIFVYRKYSSQFYRARREKLSQLNAKIAESISGMSIVQQFNQERRLVKEFEKINKDYYDVGMKNIKFNALLLGPAIDLIYALAVVIILSFFGAESLIGPVAIGTIYAFISYFDRFLEAIYNVMERLAMYQEAITAASRVFRIMDETEEVPAQLNDPEAKITRAKIEFKDVSFAYEGGRDVLKNISFTAEPGQTVALVGHTGSGKSSIINLMMRFYEFERGDILIDGKSIKSHEITELRKKTGLVLQDSFMFYGDINTNIRLYDKSITDEQIVDAAKFVQADGFIQTLSDEYNHKVIERGASFSSGQRQLISFARTVVTNPQILVLDEATANIDTETESLIQTGLKRMREGRTTIAIAHRLSTIKDADLILVLSKGRIIERGTHDSLIAEEGVYHSMYQLQNSGMDLDEAL

SEQ ID NO: 7363 - DNA, 1806 bp, Listeria innocua Clip11262
  CDS (1)..(1806): transl_table=11
atggaagtgatgaatgaacaagacgaaatgttagtgatgtccggtaaagaacaccgtgcagtattaaagcgaatgcttagttacacaaaatatcatattccaagtttgatttggactggaattcttgttcttcttgtaacgcttgcagatgtattcgcgccaattttaattaaaatattcttggatgattatttaacgccaatgaatttagaaatgcaagctttgttaattttaggagcggggtatttagggctgacaattgggaaatccattgtgtggtacttccaattgctttatttccaaaaaatcgcgcttgaaattgtgcagcaaatgcggattgacatttttacgaagcttcattcactcggcatgcgttattttgataaaacgcctgctgggagtatcgtttcgcgtgtgacaaatgatacggaagctgtgaaagatatgtttattaatgtgctttcaactgcgattcaaagtttgtttatgctcgtagggatttatgcggcgatgtttgcgctcaatgttcagttagcgctttatagcttgctgttattcccacttattgtctttattatttttgtttaccggaaatatagttcccagttttaccgggcaagacgagaaaaattaagccaattaaatgcgaaaattgctgagtcgatttcagggatgtcgattgtgcaacaatttaatcaagagcgccgtttagtaaaagaattcgagcacatcaacaaagactattatgatgttggaatgaaaaacattaaatttaatgcgctattacttgggccagccattgacttgatttacgcgctagcagttgtgattattcttagctttttcggggctgaatctttaactggtcctgtagctatcgggacaatttatgcgtttgttagttattttgatcggtttttagaagcgatttataacgtaatggaacgtttggctatgtatcaagaagccatcacagcagcgtctagagtatttcgtattatggatgaaacagaagaagtcccagctcaattaaatgatccagaagcaaaaattactcgtgcaaaaattgagtttaaagatgtttcgtttgcgtatgaaggcggacgtgatgtacttaaaaatattagctttacagcagaacctggtcaaacggtggctttagttggtcatacagggagtggtaaaagttcgattatcaatttaatgatgcgcttttatgaattcgagcgtggcgatattttaattgatggtaagtcgattaaatcccatgaaattgctgaattgcgtaagaagacgggacttgtcttacaagatagttttatgttttatggcgatattaacacgaatattcgtctttatgataaaaacattacggatgagcaaattgtggatgccgcgaaatttgttcaagcagatggttttattcaaacgttatccgatcaatatcaacataaagttattgagcgaggtgcttcattttcaagtgggcaaaggcagttgatttcttttgctagaacagttgtgacgaacccacaaattcttgtgttagatgaagcgacggcaaatattgatacagaaacagaaagcttaattcaaactgggttaaaacgaatgagagaaggacgtacaacgattgcgattgcgcatcgactttcgacaattaaggatgccgatttaattttagttttatctaaagggcgaattattgagcgtggtacacatgattcattaattgcagaacaaggtgtatatcactcaatgtatcaattacaaaatagcggaatggatttagacgaagcgctttaa

SEQ ID NO: 7364 - protein, 601 aa, Listeria innocua Clip11262
MEVMNEQDEMLVMSGKEHRAVLKRMLSYTKYHIPSLIWTGILVLLVTLADVFAPILIKIFLDDYLTPMNLEMQALLILGAGYLGLTIGKSIVWYFQLLYFQKIALEIVQQMRIDIFTKLHSLGMRYFDKTPAGSIVSRVTNDTEAVKDMFINVLSTAIQSLFMLVGIYAAMFALNVQLALYSLLLFPLIVFIIFVYRKYSSQFYRARREKLSQLNAKIAESISGMSIVQQFNQERRLVKEFEHINKDYYDVGMKNIKFNALLLGPAIDLIYALAVVIILSFFGAESLTGPVAIGTIYAFVSYFDRFLEAIYNVMERLAMYQEAITAASRVFRIMDETEEVPAQLNDPEAKITRAKIEFKDVSFAYEGGRDVLKNISFTAEPGQTVALVGHTGSGKSSIINLMMRFYEFERGDILIDGKSIKSHEIAELRKKTGLVLQDSFMFYGDINTNIRLYDKNITDEQIVDAAKFVQADGFIQTLSDQYQHKVIERGASFSSGQRQLISFARTVVTNPQILVLDEATANIDTETESLIQTGLKRMREGRTTIAIAHRLSTIKDADLILVLSKGRIIERGTHDSLIAEQGVYHSMYQLQNSGMDLDEAL

SEQ ID NO: 7365 - DNA, 1881 bp, Nostoc sp. PCC 7120
  CDS (1)..(1881): transl_table=11
atgagcatctaccaactttcccaaaaatcttacaaacgaaaccgttggcgtaacaatgactggcggctgttttcccgtttggttccttacgcccggcgtaatactaaactcctaattctggcaatggtactgctattaccacttgctttggctaatgccgtacaacccttgttaattggacaagctgtatccttaattcgtaaggaatctagcgcatacgagtttttgagaaatcgccccttgtcccaagggctacatataattgagggagtcttactctttacaattgttgttcgtttagcgttgacgggttaccaaggctatttgttacagaagttagggcaaaaaattacagccgctattcgccaagacttatttcatcatgtaacttctctggcagtccgtttcttcgaccgtacacccgttggtaaactaattacccgactcaccagtgatgtagaagtattgggagacgtattttccactggtgctattggcatcgtctctgacgtagttttgatggtggtcattactggtttaatgttttctatccagtggcaacttgcttctttgctcctggtgatgttgttaccagttacttggttaattatttacttccaacaagagtaccgcaaagctaattacaaagcgagggaagaactctctttattgaattcccagctacaagagaatgttttggggattaacgtagtccagttattccgccgggaaaagtttaatgctgagttatttcggactactaaccaacgctataccaaacaggtagatcaaactatcttttttgattcggctgtttccgcaactctggaatggattggcttaattgcgatcgctggtgtattgtgggtgggtggatggttactttcagacaatcaagttgattttgggactttatcgacctttattttatacgcccaacgcttattcgaccctttacgagattttgcggaaaaattcaccgtgattcaatctggatttacggccattgaacgggttagcgacattttagatgaaccgatagaaataagcgatcgctccaactctcgtttttccgtttttgatgctaaatttggttacattgatgaaattgtggctgatttggaatctcaaaatatcagcgacactccaaacatgggagaaatacgttttgaacacgtttggtttgcctataaagacgatgattacgtcatcaaagacttagactttattattcgtcctggcgaaaaagttgcattagtagggcctactggcgcaggtaaaagttctatcatccgtcttttatgtcgtctctacgaacccacccaaggacgtatcttagtcgatggaattgatatccgcgagttacctcaagcagaattacgccgttatatggcggtaattttacaagagggttttttatttgctggtaatgtcaaaagcaacattactttaggtgattactatacttttgaggaaattcaagcagccgcacaacaaacaaatattgccgaatttatcgaagaactacccttaggttacgatactaaattgcgagaacggggtacaaatctttctagtggacaaaagcaactgttagcttttgctcgtgcagctattcgcaatcctcaaattttggttctagatgaagccactgcaagtctcgatgttggtacagaagccttagtgcaggaagcattaaacgaattattaattgggcgaactgccatcattattgcccaccgcctgtctacaattcgcaacgtagatagaatttttgtgttaaaacgtggtgaattagtggaacaaggtagccatgaggaactgttaaattcaggagggctttattctactctgcataatctccaaatgctgggaacctag

SEQ ID NO: 7366 - protein, 626 aa, Nostoc sp. PCC 7120
MSIYQLSQKSYKRNRWRNNDWRLFSRLVPYARRNTKLLILAMVLLLPLALANAVQPLLIGQAVSLIRKESSAYEFLRNRPLSQGLHIIEGVLLFTIVVRLALTGYQGYLLQKLGQKITAAIRQDLFHHVTSLAVRFFDRTPVGKLITRLTSDVEVLGDVFSTGAIGIVSDVVLMVVITGLMFSIQWQLASLLLVMLLPVTWLIIYFQQEYRKANYKAREELSLLNSQLQENVLGINVVQLFRREKFNAELFRTTNQRYTKQVDQTIFFDSAVSATLEWIGLIAIAGVLWVGGWLLSDNQVDFGTLSTFILYAQRLFDPLRDFAEKFTVIQSGFTAIERVSDILDEPIEISDRSNSRFSVFDAKFGYIDEIVADLESQNISDTPNMGEIRFEHVWFAYKDDDYVIKDLDFIIRPGEKVALVGPTGAGKSSIIRLLCRLYEPTQGRILVDGIDIRELPQAELRRYMAVILQEGFLFAGNVKSNITLGDYYTFEEIQAAAQQTNIAEFIEELPLGYDTKLRERGTNLSSGQKQLLAFARAAIRNPQILVLDEATASLDVGTEALVQEALNELLIGRTAIIIAHRLSTIRNVDRIFVLKRGELVEQGSHEELLNSGGLYSTLHNLQMLGT

SEQ ID NO: 7367 - DNA, 1887 bp, Agrobacterium tumefaciens str. C58
  CDS (1)..(1887): transl_table=11
atggccacgaagaaaaaaaccatttcggcggattccagcaatccgacccagaccctgatcaatctctggccctatatgtggccagagggtcggtgggacctgaagatgcgggtgatctgggcaaccgtgttcctcatcgtcgccaagctggtgctgatcgcggttccctatttcttcaaatgggcgacggatgcgctgaacggcaagctcgacatggcagggctggttccggccttcctgctcggcgcggtggcgctggtcatcgcctataatctgacgcggctgatccaggtcgggctcaaccagctgcgcgattcgctgtttgccagcgtcggccaacatgcggtgcgccagctcgcctatcgtaccttcgtgcacatgcaccggctttcgctgcgtttccatctggagcgcaagaccggcgggctgtcgcgggtcatcgagcgcggcacgaagggcatcgaaaccattgtccgcttcaccattctcaataccgcaccgaccttcatcgaattcctgctgacggccatcatcttctgggcgtcctatggtttttcctatgtgctggtcaccgtcgtcaccgtctgggcctatatctggttcacggtcagggccagcaactggcgtatcggcatccgccgcgccatgaatgacagcgataccgacgccaataccaaggcgatcgattcgctactcaacttcgagaccgtcaaatatttcggcaatgaggaaatggaggcacggcgtttcgacgtcgccatggagcgttacgaaaaatcggcgatctcgatctggacctcgctcggctggctgaactttggccagggcgtgattttcggcatcggctccacgatcatgatggtgatgtcggcactggccgtgcagcgcggcgagcagaccatcggcgatttcgtgttcgtcaatgcgctgctgctgcagctttccgtgccgctcaatttcatcggcttcgtttatcgcgaaatccgccagggcctgaccgacatcgaacagatgttcgatcttctcgaggtggaggccgaagtcaccgacaggccggatgcgaagccgcttgcggccggtcccggcgcgatctccttccgcgacgtgcattttgcctacgaccctgaaagaccgatcctcaagggcgtttccttcgatgtgccggcgggcaagacggtggcgatcgtcggcccttccggtgcgggaaaatcgacgatctcgcggctgctttatcgtttctacgatattcaggagggcgccgttaccatcgacgggcaggatattcgcgacgtgacgcaaaagagcctgcgctcgatgatcggcatggtgccgcaggataccgtgctgttcaacgacaccctcgcctacaatatccgctacggtcgcccctccgccaccgacgaggagctgaaggcagcggcggatgcagcgcagatcagcgccttcatcggcaaactgccggacggttacgccaccatggtcggcgaacggggactgaagctttcgggtggcgaaaagcagcgcgtggcgattgcccggaccattctcaaggcaccgccgatcctgatcctcgacgaggcgacctcggcgctcgatacgcataccgagcaggaaatccagagcgccctcgacatcgtctcgaaaaaccgcaccacgctggtcatcgcccaccgcctctccacggtcatccacgcggacgaaatcatcgtgctgaaggaaggactgatcgccgagcggggaacgcatgcctcgctgatggcgcatgatggcctctacgcctcgatgtggagccgccagcgcgaggcgatccgcgccgaagagatgctgcgccatgttcgcgaaagcgacgatctcggcgtcgtggaccgcggcgaaccggcgcattga

SEQ ID NO: 7368 - protein, 628 aa, Agrobacterium tumefaciens str. C58
MATKKKTISADSSNPTQTLINLWPYMWPEGRWDLKMRVIWATVFLIVAKLVLIAVPYFFKWATDALNGKLDMAGLVPAFLLGAVALVIAYNLTRLIQVGLNQLRDSLFASVGQHAVRQLAYRTFVHMHRLSLRFHLERKTGGLSRVIERGTKGIETIVRFTILNTAPTFIEFLLTAIIFWASYGFSYVLVTVVTVWAYIWFTVRASNWRIGIRRAMNDSDTDANTKAIDSLLNFETVKYFGNEEMEARRFDVAMERYEKSAISIWTSLGWLNFGQGVIFGIGSTIMMVMSALAVQRGEQTIGDFVFVNALLLQLSVPLNFIGFVYREIRQGLTDIEQMFDLLEVEAEVTDRPDAKPLAAGPGAISFRDVHFAYDPERPILKGVSFDVPAGKTVAIVGPSGAGKSTISRLLYRFYDIQEGAVTIDGQDIRDVTQKSLRSMIGMVPQDTVLFNDTLAYNIRYGRPSATDEELKAAADAAQISAFIGKLPDGYATMVGERGLKLSGGEKQRVAIARTILKAPPILILDEATSALDTHTEQEIQSALDIVSKNRTTLVIAHRLSTVIHADEIIVLKEGLIAERGTHASLMAHDGLYASMWSRQREAIRAEEMLRHVRESDDLGVVDRGEPAH

SEQ ID NO: 7369 - DNA, 2079 bp, Drosophila melanogaster
  CDS (1)..(2079)
atgctgttaaactgtacgaggctcacacacctctgcacgactctccgggtcaggaaaagcagccaaataaggttgtccacatcatataatcaccatttgggcaggtgcctccaccatcgaaccgcccggtcgcttcaacacagccttccaccgccgaaccgttaccatagccacctgcacccaacactccgcatgccgtggtggtgcatgcgacgtggatttgcacagagcagcaagtggttagccaggaatgcaaaggcgaacttaccaactgcagttggagccggaatcgtgcccgcccccgtcaaaatgggcagatcccagtacggccgcctgctcagcctgactaaatcggagaaatgggtgctgacagcgggcattggctgtctggtagtttcttcagctatcaccatgtcggttcctctgttcctgggcaaggtcattgatgtagtctttaataaatcgggcatggatagcgcagccatggccaaattgggcgagtactcggtgctgctcttcgggatcttcgtgctgggcggattcgccaactttgcccgcgtccatctgtttgggaatgcggctctccgaatagtgcgcagtctaagatcccggctatacagatctatgcttatgcaggaggtgggttggttcgataccaagggcactggagaactaataaatcggctgagcaacgataccttaatggtgggcacctcgttgagccagaacgtatcggatggtctgcgatctgtagccatgatcggcgtcggcacaggcatgatgatctacacctccccccagttggctgccgtgagtgccttggtggttcccgcgatggcgggcatggccatcgtgtacggacgctacgtaaggcggatcaccaaagtagaactagacaagtacgccgagattatgaagtttgcggaggagcgatttggtaatgttaaaacggttaagaccttctgccgagaacaacaggaagtagctgccttcgatggcaaactggatgaagctctccagattggctacaaagagacacgtgccagagctattttctttggattgactggcttctgtggcaacttcatcattatttcagtgctgtattatggaggaaccttggtattacaagactcgctgacgattggagccctcacagccttcatgctgtacgccggttatgtggccatctcaatgaatgggttgtccaacttctatagccaactgaacaaaggcattggagcctcggagcgtatttgggagatcctggacagggagtgttctatacccattgacaaaggtgtcgtgccgttggagaagccggtgggcgaagttggattccagaatgtattctttacgtttccaactagacctgaatcggccgtcctcaccgacttttcgctaaatttgatgccgggaacaaccacagcggtagtgggtcgttcaggatctggaaagacgacgatagctctgctaatgctccgactatatgacccccaagggggaacagtgcatttggatggcatagatttgcgaacagtgaatccacagtggttgcgaaataacattggtgccgtcagtcaggagccggtgctcttctcgtgctccattcgagagaatattctttatggcgctaatcctggcgaaacaccgagcccggagcgactgcagcaggttattgaagatgcaaatgtcagccagttcaccgaccaactgccggatggactagacacgctcgtcggccaacggggaatgatgctcagtggcggacaaaagcaaagagtagccattgccagggctctaattaagaaccccgctatcctgattttggatgaagctaccagtgcgttggacgccgtttcggaaaatctggtgcagaatgccttagacaatcttatccagggacgcaccgtactgacaattgcccatcgactcagtacaattcgaaatgcggatcaaatcgccgtcttaagcgacggaaaaattgtagagcagggcagctacaacgagcttatgggcatccaggagggcgtcttccgggaactggtggccagccaagcgttcggcagccgaaactaa

SEQ ID NO: 7370 - protein, 692 aa, Drosophila melanogaster
MLLNCTRLTHLCTTLRVRKSSQIRLSTSYNHHLGRCLHHRTARSLQHSLPPPNRYHSHLHPTLRMPWWCMRRGFAQSSKWLARNAKANLPTAVGAGIVPAPVKMGRSQYGRLLSLTKSEKWVLTAGIGCLVVSSAITMSVPLFLGKVIDVVFNKSGMDSAAMAKLGEYSVLLFGIFVLGGFANFARVHLFGNAALRIVRSLRSRLYRSMLMQEVGWFDTKGTGELINRLSNDTLMVGTSLSQNVSDGLRSVAMIGVGTGMMIYTSPQLAAVSALVVPAMAGMAIVYGRYVRRITKVELDKYAEIMKFAEERFGNVKTVKTFCREQQEVAAFDGKLDEALQIGYKETRARAIFFGLTGFCGNFIIISVLYYGGTLVLQDSLTIGALTAFMLYAGYVAISMNGLSNFYSQLNKGIGASERIWEILDRECSIPIDKGVVPLEKPVGEVGFQNVFFTFPTRPESAVLTDFSLNLMPGTTTAVVGRSGSGKTTIALLMLRLYDPQGGTVHLDGIDLRTVNPQWLRNNIGAVSQEPVLFSCSIRENILYGANPGETPSPERLQQVIEDANVSQFTDQLPDGLDTLVGQRGMMLSGGQKQRVAIARALIKNPAILILDEATSALDAVSENLVQNALDNLIQGRTVLTIAHRLSTIRNADQIAVLSDGKIVEQGSYNELMGIQEGVFRELVASQAFGSRN

SEQ ID NO: 7371 - DNA, 2286 bp, Drosophila melanogaster
  CDS (1)..(2286)
atgctgcgcctactcgtgtccaattgcggcaggagcagcgacatatttagtcgccacctgctgcagcccacgcagcagccactgccacgcctccagaatgccgcccgcctgatgcgccaacatttgcgtggaacgaacgctccccaaccgcccgcgataccgcccacaaatgccagccgcctgctgcagacgacacgcctgcttgtgtggggcggtggtagtttagctatcggtctgggcgcccgttcctggtgggcggggcatcgcggagcgatcgttcattgcgaaggcagccggctggccattcgaaaggaggaggaggaggaggacactgcgtcggagcagcacttcgactggaagcgtttgtggacctacttggagccacatctctgggagctgatcggggccgtatgcgccgccctgatagtggcttatatcaacatacgcatcccaaatcttctcggtgacctggtaaacacactggccagatatgccaacacgtacgtgatggatccgattaacaactcgttcgtaaaggacgtgagcaaaccggccagcaatctgctgagcctatacatgctgcaatctggtttcacctttatgtacatctacctgttgagccgcgtcggtgagcagatggcagccaagatgcggcaggatctgttcacgcagattgtcgtccaggacatcgcattcttcgatgagaatcgaacgggcgagctggtcaatcgactaaccgccgatgtacaggacttcaagacctcgttcaagcagttcgtctcccagggactgcgaagtgctgcccagctgattggcggcagtatatcgctcttcatgatttcaccgcacatggccgccattgcgctggccagcgttccgtgcgtggttatgttcatgacgtatttgggcaagaaactgcgctctctaagcaaaagctcacaggcgcaggcggaacgagcgacgggtgtctgcgaggaggcgctgtccaacatccgaacggttagatccagtgcctgtgaataccgcgagatgcagctgttcgaggcggagaccaatgaggcggctcgcctggcgcagaaactcggctacggcatcgcaatcttccagggcctgaccaacttcttcctcaatacactagtcctatctacgctctttatgggcggccacctcatgtctacggagagtctgtcgccgggtgctctgatggccttcctggtcgcttcgcagggtgtgcagcgatcccttgcccagggatccatcctgctgggcaccatgatcagaggcatgtcggccggcagtcgagtcttcgagttcctatcgctgcagccacaggtggaattgctgcgcggctacatcatcccgcaggagcggctgcacggcgagattcgattcgagaacgtctcattcgcatatcccatgcaacccgatcatctggtgctcaaggactttagcctgacgctccgcccgggccagacggtggccctggtgggagccagtggatcgggcaagtcgacgatagcgtcgctggtggaacgcttctacgaaccatcggcgggcaatatcaaactggacggctacaagctgtcggacatatcgccctattggctgcggtccaatgtcctcggtttcatcgaacagcagccggtgctgtttggcacatcgatattggagaacatccgatatggtaaaccagatgcgggcgaggaggatgtgtatgcggcagcgcgtctatcacaatcgcacgactttgtgaccgccctgcccgatggatatgcgacgcatgtgggcgaacggggcacccagttgagcggcggtcagcggcaacgcatcgccattgcacgggcgctgctcaagaatccgcgcatcctcatcctcgacgaggcgacgagtgccttggacgccaccagcgaggcggaagtgcagaaggcactcgatacagtggtccagaatcgcaccactctggtgattgcccatcgcttgtccacgatacgaaacgctgacctcattgtcgtccttgatcagggacgcgtcgtggagaccggcaaacatgacgaactgatgggcaagcggggcctgtactttgagctggtgcgtcagcaggaacgacgggacatccaggagcaagtccaggcggtggaggacgttgtggccgtcaaggagcagcaggcaactgcaacagaaacttcaacagccgcaacaattgcaactgccgcagaaacttccgcagcaacagtgacagtggggagcagcagcttcggtggcagggcaaacgcagcgcaaggatag

SEQ ID NO: 7372 - protein, 761 aa, Drosophila melanogaster
MLRLLVSNCGRSSDIFSRHLLQPTQQPLPRLQNAARLMRQHLRGTNAPQPPAIPPTNASRLLQTTRLLVWGGGSLAIGLGARSWWAGHRGAIVHCEGSRLAIRKEEEEEDTASEQHFDWKRLWTYLEPHLWELIGAVCAALIVAYINIRIPNLLGDLVNTLARYANTYVMDPINNSFVKDVSKPASNLLSLYMLQSGFTFMYIYLLSRVGEQMAAKMRQDLFTQIVVQDIAFFDENRTGELVNRLTADVQDFKTSFKQFVSQGLRSAAQLIGGSISLFMISPHMAAIALASVPCVVMFMTYLGKKLRSLSKSSQAQAERATGVCEEALSNIRTVRSSACEYREMQLFEAETNEAARLAQKLGYGIAIFQGLTNFFLNTLVLSTLFMGGHLMSTESLSPGALMAFLVASQGVQRSLAQGSILLGTMIRGMSAGSRVFEFLSLQPQVELLRGYIIPQERLHGEIRFENVSFAYPMQPDHLVLKDFSLTLRPGQTVALVGASGSGKSTIASLVERFYEPSAGNIKLDGYKLSDISPYWLRSNVLGFIEQQPVLFGTSILENIRYGKPDAGEEDVYAAARLSQSHDFVTALPDGYATHVGERGTQLSGGQRQRIAIARALLKNPRILILDEATSALDATSEAEVQKALDTVVQNRTTLVIAHRLSTIRNADLIVVLDQGRVVETGKHDELMGKRGLYFELVRQQERRDIQEQVQAVEDVVAVKEQQATATETSTAATIATAAETSAATVTVGSSSFGGRANAAQG

SEQ ID NO: 7373 - DNA, 1971 bp, Corynebacterium glutamicum ATCC 13032
  CDS (1)..(1971): transl_table=11
atgagtaatactgcaggcccccgcgggcgttcccatcaggcagacgccgcgccgaatcaaaaggcacagaatttcggaccatctgccaaaaggcttttcggaattctaggccatgaccgtaacaccttaatttttgttatcttcctagccgtcctgagcgttggacttaccgtcttgggcccatggttgctgggtaaagccaccaacgtggtgtttgaaggattcctatctaagcgcatgccggctggtgcgtcaaaggaagatatcatcgcgcagttgcaggctgcaggtaaacataatcaggcttccatgatggaagacatgaaccttgttccaggctcaggcattgattttgaaaaattagccatgatcctcggactggtgatcggtgcttatctcatcggtagcctgttgtcgttgttccaggcgcggatgctcaaccgcatcgtgcaaagtgccatgcaccggctgcgcatggaggtggaggaaaaaatccaccgcctaccgctgagctatttcgattccatcaaacgtggtgatctgcttagccgtgtgaccaacgatgtggataatatcggtcaatccctgcaacaaaccttgtcacaggcgatcacttccctactgaccgtcatcggtgtgttggtgatgatgtttatcatctccccactgctcgcactcgtggcgctggtatccattccggtcaccatcgtggtcactgtggtggttgcgagccgttcccagaaactctttgcggaacagtggaagcagaccggtattttgaatgcgcgcgtggaggaaacctactctggccacgccgtggttaaggttttcggacaccaaaaggatgttcaagaagcattcgaggaagaaaatcaggctgtgtataaggccagctttggtgcccagttcatctctggcatcatcatgcccaccatgatgtttgtgggtaacttgagctacgtggccatcgcagtcgttggcggcttacaggttgcctctggatcactatccatcggtggcgtgcaatcctttatccaatactcacgccaattcacccaaccgctgtcgcaattgggttccatggccaacttgctgcagtccggcgtggccagcgccgagcgcgtttttgagcttatcgacgaagacgaacaggacagtgatcctgcgcagcccaacaccgttgctgctggcgcgaaccgtctggaattcaaagatgtgtccttcggctactcggaggatcgtccactgatcaacaacttggatctggaagttcgttccggcagcaccattgccatcgtgggtcccaccggtgcgggcaagaccacattggtgaatttgatcatgcgtttctacgacatcaacagcggttccatcactcttggtgaaacagcacaagacgccgtggatatccgcaccatggctagagaagatctgcgatcacgaaccggcatggtgttgcaggatacgtggctgtttgccggaaccatcagggataacattctttacggtagacctgaagcaactgaggaagaaatgcttgctgcgtccaaggccgcctacgtggatcgttttgtccgttccctgccagaaggctacgacaccgtacttgatgatgaagccatgaacctatcggtgggtgaacgccagctgatcaccatcgcgcgtgcattcttggctaatccccgactgctgattctggatgaagccacctcatcggtggatacgcgtaccgaattgttgattcagcgcgccatgtccaagctgcgccaagaccgcaccgccttcgtcatcgcgcaccggttgtccacgattcgtgatgccaacctgattttgatgatgaaagacggcgagatcgtggagcagggcaatcaccgtgagttgatggccctggagggcgcatattgggagttgtataactcccaattcaacgcccccgcgaaagaagaattacaggctgacggagatcactga

SEQ ID NO: 7374 - protein, 656 aa, Corynebacterium glutamicum ATCC 13032
MSNTAGPRGRSHQADAAPNQKAQNFGPSAKRLFGILGHDRNTLIFVIFLAVLSVGLTVLGPWLLGKATNVVFEGFLSKRMPAGASKEDIIAQLQAAGKHNQASMMEDMNLVPGSGIDFEKLAMILGLVIGAYLIGSLLSLFQARMLNRIVQSAMHRLRMEVEEKIHRLPLSYFDSIKRGDLLSRVTNDVDNIGQSLQQTLSQAITSLLTVIGVLVMMFIISPLLALVALVSIPVTIVVTVVVASRSQKLFAEQWKQTGILNARVEETYSGHAVVKVFGHQKDVQEAFEEENQAVYKASFGAQFISGIIMPTMMFVGNLSYVAIAVVGGLQVASGSLSIGGVQSFIQYSRQFTQPLSQLGSMANLLQSGVASAERVFELIDEDEQDSDPAQPNTVAAGANRLEFKDVSFGYSEDRPLINNLDLEVRSGSTIAIVGPTGAGKTTLVNLIMRFYDINSGSITLGETAQDAVDIRTMAREDLRSRTGMVLQDTWLFAGTIRDNILYGRPEATEEEMLAASKAAYVDRFVRSLPEGYDTVLDDEAMNLSVGERQLITIARAFLANPRLLILDEATSSVDTRTELLIQRAMSKLRQDRTAFVIAHRLSTIRDANLILMMKDGEIVEQGNHRELMALEGAYWELYNSQFNAPAKEELQADGDH

SEQ ID NO: 7375 - DNA, 1806 bp, Thermoanaerobacter tengcongensis MB4
  CDS (1)..(1806): transl_table=11
atggaataccagcaagaagaaatcatggcaaagccttttgactggaaaataatgaaacgtctccttacctatgcaaagccttattggttttatatactaataggagtcatagcaattttacttgtaaccgtctcaaacctcttaaggccttaccttgtacagcaagcaatagataactacataaacaatccccacatctccaaagaacaggcgatacaaggtgtaataagaattggaagtctgtacatagtaataataacagtagcatttttgataaattatgggcaggtgtacctcatccaatacacaggtcaaaaaataatatttaacttaaggcagcaaatttttgaacacctgcaaaaactctccctatcattttttgatagaaaccctgttggtaggttagtaactcgcgtaacaaatgatacagacactttaaatgaaatgtacacaagtgtcataacaaacctatttaatgatgtgttcataatcgcgggaatcgtcatagccatggtgagttacaacttaaagcttgcatttatcgctctatctaccactcctttgatactgacaggaatgtacatttacagaaagcttgcttctcaggcatatcgccttgtgagagtgagacttgcccggataaatgcctttctttcagaacacataagcggcatgaaaatagttcagctttttgtgacggaaaacaaaaaaatggaggagtttaaaaaaatcaacaaagagtactacgacgccaacatgagacagcttacaatatttgctatattccgcccttctatggacgtcatttactctctcactctagccctcttgatatggtatggaggcagagatataatcgctgggaaaatagaatttggcgtgctgtacgcttttgtaaattaccttcaacagctttttcagcccatattcgacatatctgaaaaatacgacatacttcagtcagcaatggcatctgcagagagaatattcattctcttagatactaaagaggaagttaaagaccctgaagaccccattccccttgaggaagttaaagggaaaattgagtttaaaaacgtgtggttttcttacaatggcaaagagtgggtgctaaaagatgtatcttttgaagtaaatcccggagaaacagtggcttttgttggagctacaggtgcaggtaaaacttctataataaaccttttgtgcagattttacgacattcaaaaaggagaaatattaattgacggaattgacataagaaaagtaaggcagcaagacttgagaaaacacatcggcatagtccttcaggatgtattcctgtttacaggagacataaagtcaaacataaggctaaataacaaaaacataactgacaacgacatatacagagtagcgaagtacgtaaatgcccatcagttcataaaaaaactcccagaaggatataactcaaaggtcacagaaagagggtcaaccctttcagcaggtcagaggcagcttttagctttcgctagagctttagcatttaaccccaagatattagttttagatgaagctacagcaaacatagacacagaaacagaaaggctgatacaggacgctcttgaaaaattgacaaaagggcgcactacgcttgtcatcgcccataggctttccacaatacagcacgctgacaaaataatagtccttcacaaaggccgcataagagaaataggaactcatcaggaacttcttcagaaaaaaggcctttactacaacctctatatgctgcagtataaagatcagctgtcagaaagtaaaatcagctag

SEQ ID NO: 7376 - protein, 601 aa, Thermoanaerobacter tengcongensis MB4
MEYQQEEIMAKPFDWKIMKRLLTYAKPYWFYILIGVIAILLVTVSNLLRPYLVQQAIDNYINNPHISKEQAIQGVIRIGSLYIVIITVAFLINYGQVYLIQYTGQKIIFNLRQQIFEHLQKLSLSFFDRNPVGRLVTRVTNDTDTLNEMYTSVITNLFNDVFIIAGIVIAMVSYNLKLAFIALSTTPLILTGMYIYRKLASQAYRLVRVRLARINAFLSEHISGMKIVQLFVTENKKMEEFKKINKEYYDANMRQLTIFAIFRPSMDVIYSLTLALLIWYGGRDIIAGKIEFGVLYAFVNYLQQLFQPIFDISEKYDILQSAMASAERIFILLDTKEEVKDPEDPIPLEEVKGKIEFKNVWFSYNGKEWVLKDVSFEVNPGETVAFVGATGAGKTSIINLLCRFYDIQKGEILIDGIDIRKVRQQDLRKHIGIVLQDVFLFTGDIKSNIRLNNKNITDNDIYRVAKYVNAHQFIKKLPEGYNSKVTERGSTLSAGQRQLLAFARALAFNPKILVLDEATANIDTETERLIQDALEKLTKGRTTLVIAHRLSTIQHADKIIVLHKGRIREIGTHQELLQKKGLYYNLYMLQYKDQLSESKIS

SEQ ID NO: 7377 - DNA, 1929 bp, Streptomyces coelicolor A3(2)
  CDS (1)..(1929): transl_table=11
atggccgggcctgcgggtcgcatgatggccgggggcggccccgaccagcgatcgatggacttcaaggggtcgagcaaacggctcgtctcccagttccgcccggagcgggcgacgctgttcacgctgctggcgtgcgtcgtcgtcagcgtcggtctcaacgtggtcgggccgaagatcctcggccgggccaccgacctggtcttcgcgggcatcgtcgggcgggacatgccgtccggggccacgaaggagcaggttctggccaccatgcgcgagcacggtgacggcaacgtcgccgacatgctccgcagcacggacttcgtcccggggcagggcatcgacttcggcgcggtgggcgaggtgctgctgctcgcgctggcgacgttcgcggtggccggtctgctgatggcggtggccacccgcctggtgaaccgggcggtgaaccggacgatgttccggctgcgcgaggacgtccagaccaagctgtcccggctgccgctgtcctacttcgacaagcgccagcggggcgaggtgctcagccgcgccaccaacgacatcgacaacatcgggcagacgctccagcagtcgatgggccagctcatcaactcgctgctcaccatcatcggcgtgctcgcgatgatgttctacgtctcctggatcctggcgctggtcgccctggtgaccgtgccgctgtccttcgtggtggccacgcgggtgggcaagcggtcgcagccgcagttcgtgcagcagtggcgctcgacggggcagctgaacgcgcacatcgaggagatgtacaccgggcacgcgctggtgaaggtgttcgggcgccaggaggagtcggcgaagcagttcgccgagcagaacgacgcgctgtacgaggccgggttcaaggcgcagttcaacagcggcatcatgcagccgctgatgatgtgcgtgtccaacctgaactacgtgctggtcgcggtggtcggcgggctgcgggtggcctcgggccagctgtccatcggcgacgtgcaggccttcatccagtactcccggcagttctcgatgccgctgacgcaggtcgcgtcgatggcgaacctggtgcagtcgggcgtggcgtcggcggagcgggtgttcgaactcctcgacgccgaggagcagtcggccgaccccatcccgggcgcccggcccgaggacctgcgcgggcgggtggaactggagcacgtctccttccgctacgacccggagaagccgctgatcgaggacctgtcgctgaaggtggagcccggccacacggtcgccatcgtcggcccgacgggcgcgggcaagacgaccctggtcaacctgctgatgcggttctacgaggtctccggcgggcggatcaccctggacggcgtcgacatagcgaagatgtcccgggacgagctgcgggccggcatcggcatggtgctccaggacacctggctgttcggcggcaccatcgcggagaacatcgcgtacggcgcctcgcgggaggtcacccgcggggagatcgaggaggccgcgcgggccgcgcacgccgaccggttcgtacggacgctgccggacggctacgacacggtgatcgacgacgagggcacgggggtgagcgcgggtgagaagcagctgatcaccatcgcgcgggcgttcctgtccgacccggtgatcctggtcctcgacgaggcgacgtcgtccgtggacacgcgcaccgaggtgctgatccagaaggcgatggcgaagctcgcgcacgggcggacgtcgttcgtgatcgcgcaccggctgtcgacgatccgggacgcggacacgattctggtgatggaggacggggcgatcgtggagcagggggcgcatacggagctgctgaccgcggacggcgcgtacgcgcggttgtacaaggcgcagttcgcggaggctgtggccgaggtggggtga

SEQ ID NO: 7378 - protein, 642 aa, Streptomyces coelicolor A3(2)
MAGPAGRMMAGGGPDQRSMDFKGSSKRLVSQFRPERATLFTLLACVVVSVGLNVVGPKILGRATDLVFAGIVGRDMPSGATKEQVLATMREHGDGNVADMLRSTDFVPGQGIDFGAVGEVLLLALATFAVAGLLMAVATRLVNRAVNRTMFRLREDVQTKLSRLPLSYFDKRQRGEVLSRATNDIDNIGQTLQQSMGQLINSLLTIIGVLAMMFYVSWILALVALVTVPLSFVVATRVGKRSQPQFVQQWRSTGQLNAHIEEMYTGHALVKVFGRQEESAKQFAEQNDALYEAGFKAQFNSGIMQPLMMCVSNLNYVLVAVVGGLRVASGQLSIGDVQAFIQYSRQFSMPLTQVASMANLVQSGVASAERVFELLDAEEQSADPIPGARPEDLRGRVELEHVSFRYDPEKPLIEDLSLKVEPGHTVAIVGPTGAGKTTLVNLLMRFYEVSGGRITLDGVDIAKMSRDELRAGIGMVLQDTWLFGGTIAENIAYGASREVTRGEIEEAARAAHADRFVRTLPDGYDTVIDDEGTGVSAGEKQLITIARAFLSDPVILVLDEATSSVDTRTEVLIQKAMAKLAHGRTSFVIAHRLSTIRDADTILVMEDGAIVEQGAHTELLTADGAYARLYKAQFAEAVAEVG

SEQ ID NO: 7379 - DNA, 1848 bp, Streptomyces coelicolor A3(2)
  CDS (1)..(1848): transl_table=11
atgacgagcacgcagaccagggagcgaccgcccgcccggaagaccggcgcgaagaacgcgccggagcccggaccgcccgccccgccggtccgcaaggtcgggctgcgctccctgttcccctatctccagggctactggccgacgctggggatcgtcgcggtgctctccctggtggtcaccctgctgaccctcagccagccggtgctgacccgggacgtactggccgacatcgaggcggacaggccggtggggcggctggtggccctgctcatcggcgtcctcgtggtggtggccgtgctcggcggggtccgcgactacctgctccagcgggccgccgaagggctcgtgctgaccgcccgccgccggctggtggcccggctgctgcggctgcccatcaccgagtacgaccagcgccgcaccggcgacatgctctcccgggtcggcgccgacaccaccatgctgcgcgcggtggtcacctccggcctcttcgacaccgtgaccaacgtcgtcatggtcggcggctccgcgctcatgatgtgcctgatcgaccccaccctgttcgcggccaccgccctcggcctcggactcggcgtcctcgccgtcgtcgggctctcccggcgggtgcggggcgcctcccgcgacgcccaggaccggatcggcgagatgacctccgccgtcgagcgcgccatctccgccgtgcgcaccatccgcgccagcggcgccgaggaacgcgagggcaaggccgtcgacgggtacgcgcagcaggcctaccacgccgggatgcgcatcgcccggctccaggcgatgatcaacccgatcacctcgaccaccatccaggtggcgttcctcgtcgtcctcggcctcggcggcgcccgggtggccagcggcgccatccaggtcggcgacatggtcgccttcgtgctcttcctgttcatgctgtggttcccgctcggccgcgcgctgaccgcctactcccggctccagtccgggctgggcgccctccagcgcatcgaggagatggtggacctgccgcaggagaccgacgccgtcgcgggaccgctcacggtgcgcgaacgcacccggcccgggaccgagcccgccgacgcggaaccgcggccgcccgcgatcgagttcgagggcgtcagcttcggctacggcgacggcgagacggtcctgcgggacgtctccctcgccgtcccccgcggcacccgcaccgcgctcgtcggcccctccggagcgggcaagtccaccctcctgtcgctggtggaacggttctacgacgtcacctccggcaccgtccgggtcggcggcaccgacgtacgcgacctgccccgccgcgaactgcgcggacgcctcggctacgtcgagcagtcggcgccggtcctcgccggcaccgtccgcgacaacctctccctcgccgcgcccgacgccaccgacgacgacatgcgggaggtgctgcgctcggtcaacctcatgggcgtgatcgagcgggcgccgcagggcctggacaccgaggtcggcgagggcggcgtcctgctgtccggcggcgaacggcagcgcctggcgctggcccgcaccttcctggccgcgccgccgatcatgctgctcgacgaggcgaccagcaacctcgacgcccgcaacgaggccctgatgcgggaggccatcggcaccgtcaccgccgaccggacgctgctcgtggtcgcccaccggctgtccaccgtcgtggacagcgaccagatcgtcgtcctggagcacggccgggtcgtcgccgcgggccggcacgaggaactcaccggcaccagccccctctaccgggagctggccagccaccaactgctcatccagtag

SEQ ID NO: 7380 - protein, 615 aa, Streptomyces coelicolor A3(2)
MTSTQTRERPPARKTGAKNAPEPGPPAPPVRKVGLRSLFPYLQGYWPTLGIVAVLSLVVTLLTLSQPVLTRDVLADIEADRPVGRLVALLIGVLVVVAVLGGVRDYLLQRAAEGLVLTARRRLVARLLRLPITEYDQRRTGDMLSRVGADTTMLRAVVTSGLFDTVTNVVMVGGSALMMCLIDPTLFAATALGLGLGVLAVVGLSRRVRGASRDAQDRIGEMTSAVERAISAVRTIRASGAEEREGKAVDGYAQQAYHAGMRIARLQAMINPITSTTIQVAFLVVLGLGGARVASGAIQVGDMVAFVLFLFMLWFPLGRALTAYSRLQSGLGALQRIEEMVDLPQETDAVAGPLTVRERTRPGTEPADAEPRPPAIEFEGVSFGYGDGETVLRDVSLAVPRGTRTALVGPSGAGKSTLLSLVERFYDVTSGTVRVGGTDVRDLPRRELRGRLGYVEQSAPVLAGTVRDNLSLAAPDATDDDMREVLRSVNLMGVIERAPQGLDTEVGEGGVLLSGGERQRLALARTFLAAPPIMLLDEATSNLDARNEALMREAIGTVTADRTLLVVAHRLSTVVDSDQIVVLEHGRVVAAGRHEELTGTSPLYRELASHQLLIQ

SEQ ID NO: 7381 - DNA, 1884 bp, Streptomyces coelicolor A3(2)
  CDS (1)..(1884): transl_table=11
atgaccgcgcccacggccaccgcgccgggcagggaacagccggagcgccccgggcccggggacccggccgaggcggggaccggcaccgccgccgacgacggcttcgaccaggacgtcctgcccagcccgccgggtgcgaccggcgccctgctgcgctccctgctgatgcccatgaaggcccgggtcgccctcaccgtcctcctcctgctgctccagcaggcggccgtgcaggcgggcccgctgctggtggcgtacgccatcgaccacgccgtgccggcgctgcgggacgacgaccacggcccgctgatcgcggtgggcgccggctacctgctgtgctcgctggcggcgggcggactccagtacgccttcatcgcggcggcggcccgcgtcagccaggacgtgctgctcgacctgcgcgggcgcatcttccggcacgcgcaggcgctgagcgtcgacttccacgagcgctacacctcgggccgcctcatctcgcgttccaccacggacgtggagtccctgcgcgagctgctcgacgaggggctccaggagctggtgacggtcatcctgtccttcgtctacatcgccgcgctgctgctctggctggacctgggcctgggcgccgtggcggtggcgtcgttcgtgccgctgtacgcgctggtccggctctaccagcggcgcgcggggcgggtgtaccggcagcggtccacggcgatcgcggcggtgatcgtgaagttcgtggagacgatgaacggcatccggccggtgcgctccttccgccgggaggccgccaatgacgccgacttcgcggtgctgaaccaccggcacgagcggaccaacggcgacgcgctgctggagatggcgcgttacgtggtcggttcccgcctggtcgccaacacggccgtcgcgggcatcgtgctgtggggcgcctaccgggtcgcggacggcacgctggcgctcggggtgctggcggcggcggtgctgtacctgcgccggctgtacgacccgatcgaccggctgggcatgttcctcaactcgtaccagtcggcggccgcctcgctggagaagatcgccgggctgctggcccagacgccgtcggtgccggagccgaccgcgccgaaggagctgccgccgctggagtcggagcaccccggccgcgaggtcgtcttcgactcggtgagcttcggctaccgcaccggcggtgaggtcctgccgcgcttcgggctgacgctcccggccggtcagacggtcgccgtcgtgggctcgaccggcgccggcaagtcgacgctggccaagctgctcgcccggttctacgacccctccgcagggcgggtcctgctggacggcaccgacctgcgcgacctggccgtgcccgaactgcggcgcggggtggtgatggtgacgcaggaggcgttcctgttctccggcacggtcgccgacaacatcgccatcggccgtccggaggcgacgcgggaggagatcgagcgggccgcgaaggcgatcggcgcccacgacttcatcgccgcgctgccggacggctacgacaccgacgtacgcaagcggggcggccgtatctccgccggtcagcggcagctcgtggcgttcgcgcgggcgctgctcgccgacccggcggtgctgatcctggacgaggcgaccagttcgctggacatccccggggagcgggcggtgcagcgggcgatgacgacggtgctgaagggccgtacggcggtcgtcatcgcgcaccggctctccaccgtggagatcgccgaccgggtgctggtgatggagcacggccggatcgtcgaggacggcgcgccggacgaactcatcgccggtacgggccggttcgcggatctgcaccgcgcctggcgggacagcctggcgtga

SEQ ID NO: 7382 - protein, 627 aa, Streptomyces coelicolor A3(2)
MTAPTATAPGREQPERPGPGDPAEAGTGTAADDGFDQDVLPSPPGATGALLRSLLMPMKARVALTVLLLLLQQAAVQAGPLLVAYAIDHAVPALRDDDHGPLIAVGAGYLLCSLAAGGLQYAFIAAAARVSQDVLLDLRGRIFRHAQALSVDFHERYTSGRLISRSTTDVESLRELLDEGLQELVTVILSFVYIAALLLWLDLGLGAVAVASFVPLYALVRLYQRRAGRVYRQRSTAIAAVIVKFVETMNGIRPVRSFRREAANDADFAVLNHRHERTNGDALLEMARYVVGSRLVANTAVAGIVLWGAYRVADGTLALGVLAAAVLYLRRLYDPIDRLGMFLNSYQSAAASLEKIAGLLAQTPSVPEPTAPKELPPLESEHPGREVVFDSVSFGYRTGGEVLPRFGLTLPAGQTVAVVGSTGAGKSTLAKLLARFYDPSAGRVLLDGTDLRDLAVPELRRGVVMVTQEAFLFSGTVADNIAIGRPEATREEIERAAKAIGAHDFIAALPDGYDTDVRKRGGRISAGQRQLVAFARALLADPAVLILDEATSSLDIPGERAVQRAMTTVLKGRTAVVIAHRLSTVEIADRVLVMEHGRIVEDGAPDELIAGTGRFADLHRAWRDSLA

SEQ ID NO: 7383 - DNA, 1983 bp, Streptomyces coelicolor A3(2)
  CDS (1)..(1983): transl_table=11
atgcccacgaaacctgcacccgccacggatctcgtcccggacgccgccccggacgccgccgagaagcgttccaccgtacgtgccctgctgcggctgtggccctatgtgcgaccggtgcgcgcgcggttggggacggccgcggtcatagcgatcctcgcctcctgcgtgggtctggtgatcccgctggtcctgaagtggatggtggacgggccggtcgccgacggtgatccggcgggcgtgtggctcggggcgctgtacctgctgctcctcgggctggcggaggcgctgctgttcggtgtgcggcggtggctggtggccaggccgctggcgggtgtcgaggcgggcatgcgggcggatctctaccggcgtctgcaacgcctgccggtggccttccacgaccgctgggcctcggggcagttgctgtcgcgcgggacgaccgacctgatgctgctccgcatgttcctcgccttcccgctgacgttcctgctggtcaacggcgtgacgatcctggtcggcgtgggcatcatgctggtccaggactggacgctcgggctggtcatcctggggcccgccatcccggtgatgatcacctgcgggatcttcgagaagaagtactccgcggtggcgcggcgcgcgcaggaccaggtcggggatctgacgaccgtggtcgaggagagcgtgctcggcatccggatcgtcaagggcttcggccggcaccgcagccaggcccgcgccttccacgaactgtcgcacacactgcgcggcacggagctgcgcaaggcgcggctgctcgcggccatctgggcggtcatcgtgacgctgcccgaggtggcgatcggtgcggcgctggtggtcggggcggtccaggtggcggacggggcgctgtcggcggggacgctggtggcgttcctgtccacggcgctggcgctgcggtggccggtggagtccatcggcttcctgctggcgatgagccaggaggcggcgacggccacggaccggtacttcgaggtgatggacgcggaggtggaagccgacccggctgcgggcggtcgtgccgccggggcgatgggggtccccccgctcgagcgaagccgagagcgggggagggtggacgatgggggtacctcccaggccgtccgggcaccgggggaggcaccgtccagcgagcagcgccccctccccgaggtcagcgccaacgccggtcgtccacaaggcctgcgcttcgagcacgtccggttccggtatcccgacgccgctcccgactccacgccgctcctgacggacgtcgacctgcacatccgtcccggcgagtccatggccctggtcggtgccaccggcagtggcaagacgacgctgaccgcgctcgtcccgcgcctgcacgaggtgaccgagggccggatcacgctggacggcgaggacatcaccgccctgtcccgcgaggagctgcgttcgatggtcgccgtggccttcgaggagcccaccctcttctcggccaccgtcggtgagaacgtgctgatgggtgcgggtgagggcgccgacgacgaggcgctggaccgcgcgctcgccgtcgcgcaggccgacttcgcgcacgcgctcccgcagggcaccggcacccaggtcggcgagcagggcctcagcctctccggcggccagcgtcagcgcctcgcgctcgcgcgggccgtggtgggcagaccgaggttcctcgtcctggacgacccgctgtccgcgctggacgtgcacacggaggccgccgtcgaggccgccctgcggcaggtcctcgcggacaccaccgcgctgatcgtggcccaccgcccttccaccgtcctgctcgccgaccgcgtcgccctgctgtccgagggccgcatcgccgccgtcggcacccatcacgaactgctgcgcaccagccccgagtacgcccatctgatgtccgggtccgacgggcacgagggcgacgaggggccccaggaaggagacggccgatga

SEQ ID NO: 7384 - protein, 660 aa, Streptomyces coelicolor A3(2)
MPTKPAPATDLVPDAAPDAAEKRSTVRALLRLWPYVRPVRARLGTAAVIAILASCVGLVIPLVLKWMVDGPVADGDPAGVWLGALYLLLLGLAEALLFGVRRWLVARPLAGVEAGMRADLYRRLQRLPVAFHDRWASGQLLSRGTTDLMLLRMFLAFPLTFLLVNGVTILVGVGIMLVQDWTLGLVILGPAIPVMITCGIFEKKYSAVARRAQDQVGDLTTVVEESVLGIRIVKGFGRHRSQARAFHELSHTLRGTELRKARLLAAIWAVIVTLPEVAIGAALVVGAVQVADGALSAGTLVAFLSTALALRWPVESIGFLLAMSQEAATATDRYFEVMDAEVEADPAAGGRAAGAMGVPPLERSRERGRVDDGGTSQAVRAPGEAPSSEQRPLPEVSANAGRPQGLRFEHVRFRYPDAAPDSTPLLTDVDLHIRPGESMALVGATGSGKTTLTALVPRLHEVTEGRITLDGEDITALSREELRSMVAVAFEEPTLFSATVGENVLMGAGEGADDEALDRALAVAQADFAHALPQGTGTQVGEQGLSLSGGQRQRLALARAVVGRPRFLVLDDPLSALDVHTEAAVEAALRQVLADTTALIVAHRPSTVLLADRVALLSEGRIAAVGTHHELLRTSPEYAHLMSGSDGHEGDEGPQEGDGR

SEQ ID NO: 7385 - DNA, 1875 bp, Streptomyces coelicolor A3(2)
  CDS (1)..(1875): transl_table=11
atggagaccacggcgtggacgcagctgtacagcgtcatgaacgccaaagacgagcgccgccccttcgcccgtgccacgatgcgccgcatcggcgcgttcgcccgcccgcaccgccgccgcatcgtccgtttcgtgctgctcggggtggcgaccgcactgctcgccgtcgccacccccgtcctggccggaaaggtcgtcgacgcgatcgtgtcggacggcgacgagggcacggtcgtgcgcctcgccctgctcatcgcgctcatcgccgtcgcggaggcggtgctcggcatcttctcccgcaggctctcggcgacgctcggggagggactcatcctcgacctgcggacggccgtgttcgatcatgtgcagcgcatgccggtcgcgttcttcacgcgtactcgtacgggagcgctcgtctcccgtctcaacaacgacgtcatcggcgcccagcgcgccttcagcaacaccctttccggcgtggtcagcaacgtggtcaccctgctgctcaccctcgcggtgatgctgaccctgtcctggcagatcaccctgctcgccctggtgctgctcccggtgttcgtgctcccggcgcgccggatgggccgccgcatggcccgcatgcagcgcgaggccgccgccctcaacgccgccatgggcacccggatgaccgagcgcttctccgcacccggcgccaccctgatcaagctgttcggccgccccgaggaggagtccgccgagttcgccgaccgggcccgccgcgtcgccgacatcggcgtgcgcaccgccaccgcccaggccgccttcatcaccgcgctcaccctggtctccgcgctcgccctggccctcgtctacggcctcggcggcttcttcgccctgcgcggcaccctggacgcgggcgccgtcgtggcgctggccctgctgctgacccgcctgtacgccccgctcaccgcgctcgccggagcccgggtggaggtcatgagcgccctcgtcagcttcgagcgggtcttcgaggtgctggacctggccccgctcatcgacgagaagcccgatgcccgcccggtccccgacggccccgtggccgtcgagttcgacgacgtccgcttcggctacccgtccgccgacaaggtgtccctcgcctccctcgaagaggtggccaccctggacacccgcggcggcgaagaggtcctgcacggcctctccttccgcgcggaaccgggccagaccatcgcgctggtcggatcgtccggcgccggcaagtccaccatcgcccagctgctgccgcgcctgtacgacaccgacggcggcaccgtccgcgtcggcggcgtcgacgtgcgcgagctgagcgcgcggtcgctgcgcgacaccgtcggcatggtcacccaggacggccacctcttccacgacaccgtccgggccaacctgctcctcgcccggccggacgccaccgaggacgacctctgggaggcgctgcgccgcgcccgcctggccgacctcgtacggtccctgccggacgggctcgacaccgtggtcggcgagcgcggctaccggctctccggcggcgaacgccagcgcatgaccatcgcccggctgctgctggcccgccagcgcgtcgtcatcctcgacgaggccaccgcccacctcgacaacacgtccgaggcggccgtccaggaagccctcaccgaagccctccagggccggaccgccgtggtgatcgcgcaccggctgtccacggtccgggcggccgaccgcatcctggtcgtcgaagccggccgcatcgtggagagcggcacccacgaggaactcctcgcggtcgacggccgctacgcccaactgcaccgcacccagttcgagcgcccggccctcgacaaggccgcgtag

SEQ ID NO: 7386 - protein, 624 aa, Streptomyces coelicolor A3(2)
METTAWTQLYSVMNAKDERRPFARATMRRIGAFARPHRRRIVRFVLLGVATALLAVATPVLAGKVVDAIVSDGDEGTVVRLALLIALIAVAEAVLGIFSRRLSATLGEGLILDLRTAVFDHVQRMPVAFFTRTRTGALVSRLNNDVIGAQRAFSNTLSGVVSNVVTLLLTLAVMLTLSWQITLLALVLLPVFVLPARRMGRRMARMQREAAALNAAMGTRMTERFSAPGATLIKLFGRPEEESAEFADRARRVADIGVRTATAQAAFITALTLVSALALALVYGLGGFFALRGTLDAGAVVALALLLTRLYAPLTALAGARVEVMSALVSFERVFEVLDLAPLIDEKPDARPVPDGPVAVEFDDVRFGYPSADKVSLASLEEVATLDTRGGEEVLHGLSFRAEPGQTIALVGSSGAGKSTIAQLLPRLYDTDGGTVRVGGVDVRELSARSLRDTVGMVTQDGHLFHDTVRANLLLARPDATEDDLWEALRRARLADLVRSLPDGLDTVVGERGYRLSGGERQRMTIARLLLARQRVVILDEATAHLDNTSEAAVQEALTEALQGRTAVVIAHRLSTVRAADRILVVEAGRIVESGTHEELLAVDGRYAQLHRTQFERPALDKAA

SEQ ID NO: 7387 - DNA, 1962 bp, Chlorobium tepidum TLS
  CDS (1)..(1962): transl_table=11
atgagaatgggcgcaggagcggcatcgggattccgcacgcagcaggacgaaaccctcggcaatcggaaaaagggttccgttgaccgctatattatcaagcagctgctcggctacatcaagcccttcaaggggctggtggcgggcgcggtggcgctgaccgccttcggcgcgatcctgacgccgctgcgcccctggctgacccgcatcgccatcgacgaccacatcgccaagggcgaccacaagggccttgccgtcatcagcctgttgatgctgctcgtaatcgtgctcgacggcgtcaagcagtacgccgccacctggctgacacagctcatcggccagaaagcggtctatgccatccgcctcgacatcttccgccacttgcagcgcctgccgatccgctacttcgaccgaaacccggtggggcgcatcatcacccgcaccaccaacgacgtcgaggcgctcaacgaaatgttgtcaagcagcctcatcaccatcatcggcgacatgctgcaactgctcttcatcgtggcgatgatgttcctgaccgactggcggctgacgctggtcgtgctgagcattttgccggtgatgatctactcgaccatctttttcaagaacaagatgcgccaggcgtttctcgatgtccggacgcatctggcccgcctgaacgcctttttccaggagcacatcaccggcatgaaggtggtgcagctcttctcgcgcgaagaggccgagttcatgaagcactccgccatcaacgccgaccaccgcgacgccaacatcaaaacggtcttctacttttcgatctactccccgctgatcgagttcctcagctcggcggcggcgggtctggtggtctggttcagcgcgacgcgcatcatgcagaccgatctgtcggtgggcgtggtagtgtcattcgtgcagttcatctggctcttcttccgcccgttgcagcacctctccgaccagttcaacattatgcagaccgccatcaccagctccgaccgtatcttccggctgctcgaagagccgctcgatgccgaaccgacggagagcgctcactcactcgattcttttcgggatcggatccgtttcgacaaggtgtggttcgcctacgacgaggagcactgggtgctgcgcgacatttcgctggagatcaaggcgggcgaaaccgtggccatcgtcggcgcaaccggcagcggcaagaccacactcatcaacattctttcgagattttatccctacgcaaagggttcagtgaccatcgacggcatcgagctgagcgacattccccgccacgatctgcgcaagctcgtaggagtagtgatgcaggatgtggtgctcttcaccggttcgatccgtgagaatctctcgttcggcgatccatcgatttcggacgaaacgattcacgaggcggcacgcatcgtaggcgctgaccgtttcatcgaaaagctgccggacggctacgactaccgcatccgcgagaacggctccggcctctcggcgggccagaagcagcttctcgccttcgtgcgggcgctgctctacaacccggacattctcgtgctcgacgaagccaccagctcggtcgacaccgaaaccgagtcgctcatcgaacaggcaaccgaccggctgatgaagcaccgaacctcgatcatcatcgcccaccgcctctcgacgatccagcacgccgacaaaatcgtggtgctgcacaaaggcaccatccgcgaaaccggcacccaccaggagctgctcgcccagcgcggtttgtactacaagctgtatttattgcagcacccggagcgcggcagaatggaaggcgcgggggtgaagaattcgccaggtcagtcggataagtccgagccggccgatcttccctctacaaattgctctcccgcaacaccgtcaccggctccagccttgctgcccggagcgaaggaatcgctgccgcaatcgtgctga

SEQ ID NO: 7388 - protein, 653 aa, Chlorobium tepidum TLS
MRMGAGAASGFRTQQDETLGNRKKGSVDRYIIKQLLGYIKPFKGLVAGAVALTAFGAILTPLRPWLTRIAIDDHIAKGDHKGLAVISLLMLLVIVLDGVKQYAATWLTQLIGQKAVYAIRLDIFRHLQRLPIRYFDRNPVGRIITRTTNDVEALNEMLSSSLITIIGDMLQLLFIVAMMFLTDWRLTLVVLSILPVMIYSTIFFKNKMRQAFLDVRTHLARLNAFFQEHITGMKVVQLFSREEAEFMKHSAINADHRDANIKTVFYFSIYSPLIEFLSSAAAGLVVWFSATRIMQTDLSVGVVVSFVQFIWLFFRPLQHLSDQFNIMQTAITSSDRIFRLLEEPLDAEPTESAHSLDSFRDRIRFDKVWFAYDEEHWVLRDISLEIKAGETVAIVGATGSGKTTLINILSRFYPYAKGSVTIDGIELSDIPRHDLRKLVGVVMQDVVLFTGSIRENLSFGDPSISDETIHEAARIVGADRFIEKLPDGYDYRIRENGSGLSAGQKQLLAFVRALLYNPDILVLDEATSSVDTETESLIEQATDRLMKHRTSIIIAHRLSTIQHADKIVVLHKGTIRETGTHQELLAQRGLYYKLYLLQHPERGRMEGAGVKNSPGQSDKSEPADLPSTNCSPATPSPAPALLPGAKESLPQSC

SEQ ID NO: 7389 - DNA, 1815 bp, Thermosynechococcus elongatus BP-1
  CDS (1)..(1815): transl_table=11
atgacagcagcaacacgctccacggattggcaacttttgcaacgactgcttccttacctcaagccctatcgctggggactggtgggaagtggcttgcttttgattcccttggcggcagccgcagcattacaaccgatcatcattgggcaggcgatcgccctcctgaagggggaagagagtacctacggctttttgaaaaccttaacgctgacccaagggattgatctactgagcatggcgctgttggtaaccgtggtgctgcgctttggggtgcaggcagcccaggggtactggattcaaaaaattggtcaaaacattactgccgatcttcgccatgacttatttgaccacgtgctgcggttatcctcccgcttctttgaccgcactcccgtcggtaagctcattacccgcttgaccagtgatgtggatgccttaggggatgtgtttgccactggcgctgtgggggttctcagtgatgtcttctcgatgctggtggtcatcctgacgatgtttttcattgaccgcctgttggcaacactgctgctggccttggttctgccgatcgctgccctgattatctattttcaacattgctatcgcgtcgccaactacaagtcccgcgaggagctgtcgctactgaatgccgatcttcaggaaaacattgttggtattacggtggtgcaattgtttcgccgtgaggccttcaatagtcaactgtttcggcggcgcaatcagcgctacatcaaagaggtcgatcggacgattttctatgattcagcggtatcagcgaccttagagtggattgcctttgtggcgatcgcgggggttctctggctcggcggcgccttagtgcagcagcgcacgattgactttggcaccttagccacgtttatcctcttttcacagcgcgtctttgatccactgcggcagttggcggagaaatttaccacagtgcaagcgggcttaaccgccattgagcgcatccatgatctgctctcagaacccattgaaattcacgatcccgatcgcacctttttgcgtttgccccagatagaaaatacagcccctgccgttgagtttcgtgatgtctggctggcctacaaagacgatgactatgtcctcaagcagctttcctttcaaattcatgctggcgagaaggtggccattgttggccccacgggtgcaggcaaaagttcgattattcgcttgctctgtcgtctttatgagccaacgcgcggtgaagtcctcattggtggtcgcaatgtgcgcgactttacccaagcagaactgcggcagcacattggtgtgattttacaggagagctttctcttctctggggatgtcaaaggcaacattgcccttggcgacaactacacccttgccgaaattcagcgagtggccgcagaaatgaacattgctgagttcattgagcagttgccccaaggctatgacacagccctgcggcagcggggcacaaacctctcggcggggcagcgacaacttttggcctttgcgcgggtcgccattcgcaatccagaaattcttgtccttgatgaggcaacggccaatttggatgtgggcaccgaggcactgattcaggaggccttgaaccgtctcttggtgaatcgaaccgcaatgattattgcccaccgcctcgccacaatccgccatgtggatcgcatttttgtgctcaaacggggacaactggtggagcagggcagccacagtgaactgttggctcgcaatggcgtgtacgcccatctctaccggttgcaggcactcaccaaagacgtagcccctcaacaggatgcctaa

SEQ ID NO: 7390 - protein, 604 aa, Thermosynechococcus elongatus BP-1
MTAATRSTDWQLLQRLLPYLKPYRWGLVGSGLLLIPLAAAAALQPIIIGQAIALLKGEESTYGFLKTLTLTQGIDLLSMALLVTVVLRFGVQAAQGYWIQKIGQNITADLRHDLFDHVLRLSSRFFDRTPVGKLITRLTSDVDALGDVFATGAVGVLSDVFSMLVVILTMFFIDRLLATLLLALVLPIAALIIYFQHCYRVANYKSREELSLLNADLQENIVGITVVQLFRREAFNSQLFRRRNQRYIKEVDRTIFYDSAVSATLEWIAFVAIAGVLWLGGALVQQRTIDFGTLATFILFSQRVFDPLRQLAEKFTTVQAGLTAIERIHDLLSEPIEIHDPDRTFLRLPQIENTAPAVEFRDVWLAYKDDDYVLKQLSFQIHAGEKVAIVGPTGAGKSSIIRLLCRLYEPTRGEVLIGGRNVRDFTQAELRQHIGVILQESFLFSGDVKGNIALGDNYTLAEIQRVAAEMNIAEFIEQLPQGYDTALRQRGTNLSAGQRQLLAFARVAIRNPEILVLDEATANLDVGTEALIQEALNRLLVNRTAMIIAHRLATIRHVDRIFVLKRGQLVEQGSHSELLARNGVYAHLYRLQALTKDVAPQQDA

SEQ ID NO: 7391 - DNA, 3666 bp, Arabidopsis thaliana
  CDS (1)..(3666)
atgaagagttttggaagcgtaagatcaatattcatgcatgcgaacagtgtggatttagtgctgatgggattaggtttaatcggagccgtcggtgatggcttcatcactcctataatatttttcatcaccgggctgctactcaacgacatcggtgattcctcattcggtgataaaaccttcatgcatgccatcatgaagaatgccgtagctttgctttatgtcgctggtgcatctttggtgatatgtttcgttggggagagacaagcatcaagaatgagagagaagtacttaagagcagtgttaagacaagatgtgggttactttgatcttcatgttacaagcacttctgatgttatcaccagtgtctctagtgacaccctcgtgatccaagacgtccttagtgaaaagttaccaaattttttgatgagtgcatcggcgtttgtcgcaagctacatcgtgggtttcatcatgctgtggagactaacaatagtaggtttcccgttctttatcctcctcttgatccctggactgatgtgcggacgagccctcatcaacatctcgagaaaaatacgtgaagagtataatgaggctggttctattgccgagcaagccatctcgttggtgcgaaccgtctacgcatttggtagtgagaggaagatgatatcgaaattctcagctgcgcttgaaggctcagtgaagctagggttgagacaaggaatagctaaaggaatcgccattgggagcaatggtgtcacttacgccatttgggggttcatgacttggtacggaagtcggatggttatgtaccatggagctaaaggcggtactatcttcgcagtcatcatatgcatcacctatggtggcacatcacttggtcgaggtttgtcgaatctcaaatatttctccgaggcggttgtagcaggggaaaggattattgaagtgataaaaagagttcccgatattgattcggacaacccgagaggtcaagttcttgagaatattaaaggagaagtccagtttaagcatgtgaagttcatgtactcatcaagacccgagacaccaatctttgatgatttatgtctaagaatcccatctggtaaatctgttgctctggtgggtggaagcggatcaggaaaatcaactgtgatatcgcttttacaaagattttatgaccccatcgtaggagagattcttatcgatggtgtgtctattaaaaagttgcaagtgaaatggttgagatcacaaatgggtctagttagccaagagccagcactcttcgccacatcgatagaggagaacatattatttggtaaagaggacgcatcctttgatgaagtagtggaagctgcaaagtcctcaaatgctcatgatttcatttctcagttccctcttggttacaaaactcaggttggggagagaggagtgcaaatgtcagggggtcagaagcaaaggatttcaattgcacgtgcgataatcaaatcaccgacacttctactgctagacgaggcaacaagcgcattagattcagaatccgaaagagtagtccaagaagccttagacaatgccactattggtcgtacaactattgttattgctcaccgcctctctactattcgtaatgttgatgttatatgtgtattcaaaaatggtcagattgtagaaactggatcacacgaagagctcatggagaatgtagatggtcaatacacttctctagtccgcttacaaatcatggaaaatgaagaatcaaatgataacgttagcgtaagtatgcgagagggtcaattctcaaatttcaacaaagacgtgaagtatagttcaagactttctattcaaagtcggtcttcccttttcgcaacttcaagcattgatacaaatcttgctggttcaattccaaaggataagaagccatcttttaagagattgatggcgatgaataaaccagagtggaaacatgcattgtatggttgcttaagtgcagtcttgtatggagccttacacccaatttatgcatatgcttcaggatcaatggtgtcagtgtattttctaacgagtcatgatgagatgaaggagaaaacaaggatctatgtgttgcttttcgttggtctagctgttttatgtttcttgatcagtatcattcaacaatatagttttgcttacatgggtgaatacctaacgaaacgtatacgagaaaatattctctcaaagctattgacctttgaggtaagctggttcgatgaagacgagaactcgagcggatcaatttgctctagactagccaaagacgcaaacgtggtgagatcgcttgttggtgaacgagtgtcgttgttggtacaaactatatcagcagtgagtgtagcttgcacacttggtttggccatttcttggaaattatccattgtgatgattgcaatacaaccagtggttgttggatgcttctacactcaacgcattgtactcaaaagcatatcgaaaaaagccattaaagcacaagatgagagcagcaaactagcggcagaagctgtatccaacatccgaaccataacagcattttcgtcacaagaacggatcctaaaattactcaaaatggttcaagaaggaccacaaagagaaaatatccgtcaatcgtggttagcagggattgtgctagcaacttctagaagtctcatgacatgcacttcagctttgaattactggtacggtgctagacttattattgatgggaagatcacgtcaaaagcattctttgagttgtttatactctttgtgagtacgggtcgggttattgcggacgcgggagcaatgacgatggatctagccaagggctcggatgcggtcggatcagtatttgcggtgttagatcgttacacaaacattgaaccggagaaaccggatggtttcgtcccacaaaacataaagggacaaataaagtttgtcaatgtggactttgcgtacccaacacgccctgatgtgattatatttaagaacttctccattgatattgacgagggaaagtcgacagcgatagtgggtccaagcgggtcaggtaaatcaactataatcgggttaatcgaacggttttatgacccgttaaagggtattgtaaagatcgatggtcgtgatataaggtcttatcatttgagatcacttcgtcaacacataggtttggttagccaagagccaatattatttgctgggacaatccgagagaacatcatgtatggaggagcatctgacaagattgacgagtcagagattatcgaggcggccaaggcagccaacgctcatgatttcatcgtaacattatcggacggctatgatacgtactgtggagacagaggagtacaactatctggtggtcaaaaacagaggatcgcgattgctcgtgcggttttgaagaacccatcagtgttgcttcttgatgaagctacgagcgctcttgacaaccaatcagagcgcatggtgcaggatgcactcgggcgtttgatggttggaaggacaagtgttgtgatcgctcataggcttagcaccattcaaaactgtgacacgataactgttttagacaaagggaaagttgtcgaatgtggaacacactcttccttgttagctaaaggtcctacgggtgtatatttctctctggtcagtctccaaagaactcgttactga

SEQ ID NO: 7392 - protein, 1221 aa, Arabidopsis thaliana
MKSFGSVRSIFMHANSVDLVLMGLGLIGAVGDGFITPIIFFITGLLLNDIGDSSFGDKTFMHAIMKNAVALLYVAGASLVICFVGERQASRMREKYLRAVLRQDVGYFDLHVTSTSDVITSVSSDTLVIQDVLSEKLPNFLMSASAFVASYIVGFIMLWRLTIVGFPFFILLLIPGLMCGRALINISRKIREEYNEAGSIAEQAISLVRTVYAFGSERKMISKFSAALEGSVKLGLRQGIAKGIAIGSNGVTYAIWGFMTWYGSRMVMYHGAKGGTIFAVIICITYGGTSLGRGLSNLKYFSEAVVAGERIIEVIKRVPDIDSDNPRGQVLENIKGEVQFKHVKFMYSSRPETPIFDDLCLRIPSGKSVALVGGSGSGKSTVISLLQRFYDPIVGEILIDGVSIKKLQVKWLRSQMGLVSQEPALFATSIEENILFGKEDASFDEVVEAAKSSNAHDFISQFPLGYKTQVGERGVQMSGGQKQRISIARAIIKSPTLLLLDEATSALDSESERVVQEALDNATIGRTTIVIAHRLSTIRNVDVICVFKNGQIVETGSHEELMENVDGQYTSLVRLQIMENEESNDNVSVSMREGQFSNFNKDVKYSSRLSIQSRSSLFATSSIDTNLAGSIPKDKKPSFKRLMAMNKPEWKHALYGCLSAVLYGALHPIYAYASGSMVSVYFLTSHDEMKEKTRIYVLLFVGLAVLCFLISIIQQYSFAYMGEYLTKRIRENILSKLLTFEVSWFDEDENSSGSICSRLAKDANVVRSLVGERVSLLVQTISAVSVACTLGLAISWKLSIVMIAIQPVVVGCFYTQRIVLKSISKKAIKAQDESSKLAAEAVSNIRTITAFSSQERILKLLKMVQEGPQRENIRQSWLAGIVLATSRSLMTCTSALNYWYGARLIIDGKITSKAFFELFILFVSTGRVIADAGAMTMDLAKGSDAVGSVFAVLDRYTNIEPEKPDGFVPQNIKGQIKFVNVDFAYPTRPDVIIFKNFSIDIDEGKSTAIVGPSGSGKSTIIGLIERFYDPLKGIVKIDGRDIRSYHLRSLRQHIGLVSQEPILFAGTIRENIMYGGASDKIDESEIIEAAKAANAHDFIVTLSDGYDTYCGDRGVQLSGGQKQRIAIARAVLKNPSVLLLDEATSALDNQSERMVQDALGRLMVGRTSVVIAHRLSTIQNCDTITVLDKGKVVECGTHSSLLAKGPTGVYFSLVSLQRTRY

SEQ ID NO: 7393 - DNA, 2031 bp, Oceanobacillus iheyensis HTE831
  CDS (1)..(2031): transl_table=11
atgaaagggagtacagaaaaaaggttattaaaatatgcgttattatataaaaaaggaattgttattgggctagtctgcttgatcattgctgttgctttagaattagcaggtccattgattgcaaagcgagtcattgatgaacatatcgttggtgtagaaggctactggatagaagtctctgaacaagaaaccgattcagttgaatataataatcagtattttaaaagagaggatcgcgtagaaggtagtaatttatctagtactgatactatcacacttttacaagtaggtttatcttattatgtttttgatgaagagttacctttaactggaaagcgatcggtaaatgataatgaaataacgattgaatcaggtgaaggagaaattactgcgattggggataaattatcagcttcagaagcatatccttttttcgaacctgaaaaacgaccgattattatgttgcttgtactttatatggttttactagttattgctggtgtatttcaattctttcaaacattcttgttgcaaaagtcagcaaatcaaattgtaaaacaaatgcgaacagacttattccaacatacgcaacgaattccaattcgctattatatagatcaaccagctggttctgttgtcgctcgtattactaatgatactgaagctatacgagatttatatgaaagggtattatcgattgttgttacgagtctaatctatatgggtggtatttttgtagcattatttattttagatccaactttagcagctatgtgtctatttattatcccgttattatatatttggatgagagtctacaagtattttgggactaaatataataaagtagttcggaaaaccataagtgaaattaatgggaatatcagtgaagcaattcaaggaatgacaatcatccaggcatttaatcgtcaaaagaagacaaaagaagagtttgaagtgctaaataatcgtaattataaatatcagaaaaaattaattaaattaagtgcattaacttcctataatcttgtgacagtaattaagaatttaacgttagttggattcatctggtatttcgggtcagcatcttttgatatgacgagtgttatttccattggtatgctttatgcattcgtagattatattaatcgattatttgaacctgcttcagatatagtcaaccaattaccgttattagaacaggcaagagtagctggaactcgagtatttgaattgctagatcagaatggggaacaagtcgaagttcaatcgatccctcgttataaagggaatattgaatttgatcaagtcatctttgcgtataaagagaatgaaaatgtattgcataatctttctttttccgttcactcaggtcaaacagttgcatttgttggtcacaccggatcaggaaaaagttcgataatgaacctattatttcgcttttatgaccctcaagcaggaacgatacgaatcgatgggattgacacgaaagatttatcccgacaacaagttcgcagccatatgggaatcgtattacaagatccatttctttttacaggcaccatcgtgtcaaacgtaacgatgaacgatcctaatgtatcaagagacgacgccattcaagctttacaagctgttggtgcatcttcctttattgagagattaccaaagggatatgatgagccagtgactgaaagtggcaccacgtattcattaggggagagacaattgatttcttttgctagagcgttagcatttaaccctgctatccttatattggatgaagcaactgcaaatatagataccgagacagaacaagttattcaacgagctttagaagttctaaaaaaaggtcgaacaacgctcgtgattgcccatcgtttatccacaattcagcaggcggatcatataattgtgttggatcacggaactattaaagaacagggaaatcatgatacactgattaaagagaaaggttattattacgaaatgtatcaaatgcagcaaggatcactgagagcaaacgtttcttaa

SEQ ID NO: 7394 - protein, 676 aa, Oceanobacillus iheyensis HTE831
MKGSTEKRLLKYALLYKKGIVIGLVCLIIAVALELAGPLIAKRVIDEHIVGVEGYWIEVSEQETDSVEYNNQYFKREDRVEGSNLSSTDTITLLQVGLSYYVFDEELPLTGKRSVNDNEITIESGEGEITAIGDKLSASEAYPFFEPEKRPIIMLLVLYMVLLVIAGVFQFFQTFLLQKSANQIVKQMRTDLFQHTQRIPIRYYIDQPAGSVVARITNDTEAIRDLYERVLSIVVTSLIYMGGIFVALFILDPTLAAMCLFIIPLLYIWMRVYKYFGTKYNKVVRKTISEINGNISEAIQGMTIIQAFNRQKKTKEEFEVLNNRNYKYQKKLIKLSALTSYNLVTVIKNLTLVGFIWYFGSASFDMTSVISIGMLYAFVDYINRLFEPASDIVNQLPLLEQARVAGTRVFELLDQNGEQVEVQSIPRYKGNIEFDQVIFAYKENENVLHNLSFSVHSGQTVAFVGHTGSGKSSIMNLLFRFYDPQAGTIRIDGIDTKDLSRQQVRSHMGIVLQDPFLFTGTIVSNVTMNDPNVSRDDAIQALQAVGASSFIERLPKGYDEPVTESGTTYSLGERQLISFARALAFNPAILILDEATANIDTETEQVIQRALEVLKKGRTTLVIAHRLSTIQQADHIIVLDHGTIKEQGNHDTLIKEKGYYYEMYQMQQGSLRANVS

SEQ ID NO: 7395 - DNA, 1833 bp, Oceanobacillus iheyensis HTE831
  CDS (1)..(1833): transl_table=11
atggcgaaaaataaggataatttaaaatcagaaagtaaacatttacaacgatttcattacacaatcgatcaagcgattgaaaaaccgtttaactggcaacaaatgtggagactgttgcaatttttaaaaccatattcgaagacttatttaccaggagcagtcctggctatgatggtatcaacagcaatccgcttagctataccgattttaattggtaaagtagcattcgatgtagctattgcaaataaagatactacgttgttaacctatttagttatcggtattgcggttctttatagtataagttttgtcgcaaatacatttcgaatcaagtgggtaaatatcttaggacaaaatgttatctatgatttgcgacaaaagttattttcccacgtgcaacgattgtcacaccgattttttgatagtcgttcagcaggttctattttagttcgaattctcaatgatataaattctctgcaggaattatttacgaatggaatcatcaacttattaatggatttattaatgttatcggggattttagtaattttatttgtactaagcccaccacttgctttagcagtaattattattattccattgatgtttttaatatcaaccacattacgtcgtaaaatacgtcgttcatggcaagtagtaagattacatcaatccagaatgaactcacatttaaatgaaggcattcaagggatgcgtattacccaatctttctcacaagagaaagagaacgcggagttttttgacggtgtaaattctggatttttccagagttttcgtgatgcagctaagaagagtgctatgtttcgtccgcttgtagatatttgtgatgctgcaggtacaattatacttatttcttatggtgcatacttaatattaaatggaaccataactgtaggtacatttgtctcttttgcttttttcttgggaatgttttgggaacctatatcacgtcttgggcagatgtataatcagctcttaatggcaatggcatcatctgagcgaatttttgaattcctggatgaacgcccaaacgtagcagaaaagaacaatgcgcttcaaatggaagagatgcgcggagaaatcgaatttgataaagttgaattctcatacaataaagacagaattgcattgaaaaaactatccattcatattcatgctggagagaccatagctctagtcggtcatacaggaagtggtaagtctacaattgcgaatttaataagtaggttttatgatcctacttctggtgcagtaaaaattgatggaagtgatttgcgagatgttaccattgatagtttgcgacaaaaaattagtgttgtattacaagatacatttattttttcgggtacaataatggaaaatattcgttttggaagacctaatgcaacagatgaagaagttattgatgctgctaaggtagtaggggcggatgattttattcagcgccttgcagacgggtatcagacagaagtggaagagagaggaaatattctttcagctggagaaagacagttattatcgtttgcaagagctctgttagcaaatccaagtattattattcttgatgaagcaactgccagtattgatacagaatcagaagtgaagatacagcaggcattaaaacgattattaaaaggaagaacttctatcattattgcgcatagattgtctacaattcgagaagcagataatatttttgttcttgaacaaggagaagttttggagcaaggaaatcatcaatcgttaatacaacaaaaaggaaaatattacgaactggtgaagtcacagtttactatgttagatgcaatgtaa

SEQ ID NO: 7396 - protein, 610 aa, Oceanobacillus iheyensis HTE831
MAKNKDNLKSESKHLQRFHYTIDQAIEKPFNWQQMWRLLQFLKPYSKTYLPGAVLAMMVSTAIRLAIPILIGKVAFDVAIANKDTTLLTYLVIGIAVLYSISFVANTFRIKWVNILGQNVIYDLRQKLFSHVQRLSHRFFDSRSAGSILVRILNDINSLQELFTNGIINLLMDLLMLSGILVILFVLSPPLALAVIIIIPLMFLISTTLRRKIRRSWQVVRLHQSRMNSHLNEGIQGMRITQSFSQEKENAEFFDGVNSGFFQSFRDAAKKSAMFRPLVDICDAAGTIILISYGAYLILNGTITVGTFVSFAFFLGMFWEPISRLGQMYNQLLMAMASSERIFEFLDERPNVAEKNNALQMEEMRGEIEFDKVEFSYNKDRIALKKLSIHIHAGETIALVGHTGSGKSTIANLISRFYDPTSGAVKIDGSDLRDVTIDSLRQKISVVLQDTFIFSGTIMENIRFGRPNATDEEVIDAAKVVGADDFIQRLADGYQTEVEERGNILSAGERQLLSFARALLANPSIIILDEATASIDTESEVKIQQALKRLLKGRTSIIIAHRLSTIREADNIFVLEQGEVLEQGNHQSLIQQKGKYYELVKSQFTMLDAM

SEQ ID NO: 7397 - DNA, 1782 bp, Shigella flexneri 2a str. 301
  CDS (1)..(1782): transl_table=11
atgcgtagttttagccaactgtggccgactctcaagcgcctgttagcgtatggttcgccgtggcgtaaaccgctggggattgcggtcctgatgatgtgggttgcggcggcggcagaagtcagtgggccgctgcttatcagctattttatcgacaatatggtagcgaaaaataacctgccgttgaaagtggttgcagggctggctgcggcgtatgttgggctacaactgtttgccgccgggctacattacgcgcagtcgctgctgtttaatcgggcggcagtaggcgcagtgcaacagttgcgtaccgacgtgatggatgctgcgttacgccagccattaagcgagtttgatacccaacccgtcgggcaggtgatttcccgcgtcactaatgacactgaagtgatccgcgatctctacgttaccgtagtggcaactgtcctgcgcagtgccgcactggtgggcgcgatgctggtggcgatgttcagcctcgactggcgaatggcgctggtggcgataatgattttcccggtggtgctggtggtaatggtgatataccagcgttacagcacgccgattgtccgccgtgtgcgcgcctatctggcggatatcaacgacggctttaacgaaatcatcaatggcatgagcgttatccagcagtttcgtcagcaggcgcgatttggcgaacgtatgggggaggccagtcgttcacactatatggctaggatgcaaaccctgcgcctcgacggttttctgctgcgtccgctgctgagtctgttttcatcgctcattctttgtggcttattgatgctgtttggcttctccgccagcggcaccattgaagtgggcgtgttgtatgcgtttatcagctatcttgggcgacttaacgaacccttaatcgaactgaccacgcaacaggcgatgctgcaacaggctgttgttgctggtgagcgcgtgtttgaactgatggacggaccgcgccagcaatatggcaatgatgattacccgttacagagtggcaccatcgaagtcgataacgtgtcatttgcttatcgcgatgacaatctggtgctaaagaacattaatctctctgtgccttcgcgtaactttgtggcgctggtcgggcataccggcagtggtaaaagtaccctcgccagtttattgatgggctattacccgctaacggaaggtgagattcaccttgatggtcgtccattaagttcgctaagtcatagcgcgctgcgccagggcgtggcaatggtgcagcaagatccggtggtgctggcggataccttcctcgctaatgtgacgctggggcgggatatctccgaagaacgcgtctggcaggcgctggaaaccgtgcaactggcggagctggcgcgcagcatgagtgattgtatttatacgccgctgggcgagcagggaaataatctctcagtcgggcaaaagcaactgctggcactggcgcgcgtgctggtggagacgccgcaaatcctgatccttgatgaggcaaccgccagcattgactccggtactgaacaggcgattcaacatgctctggcggcggtgcgtgaacataccacgctggtggtgattgctcaccgcttatcaactattattgatgccgacaccattctggtgcttcatcgtgggcaagccgtggagcagggcactcaccagcaactgctggcggcccagggacgctactggcagatgtatcaactgcaacttgcgggcgaagagctggcagccagcgtgcgtgaagaggaatcattgagcgcctga

SEQ ID NO: 7398 - protein, 593 aa, Shigella flexneri 2a str. 301
MRSFSQLWPTLKRLLAYGSPWRKPLGIAVLMMWVAAAAEVSGPLLISYFIDNMVAKNNLPLKVVAGLAAAYVGLQLFAAGLHYAQSLLFNRAAVGAVQQLRTDVMDAALRQPLSEFDTQPVGQVISRVTNDTEVIRDLYVTVVATVLRSAALVGAMLVAMFSLDWRMALVAIMIFPVVLVVMVIYQRYSTPIVRRVRAYLADINDGFNEIINGMSVIQQFRQQARFGERMGEASRSHYMARMQTLRLDGFLLRPLLSLFSSLILCGLLMLFGFSASGTIEVGVLYAFISYLGRLNEPLIELTTQQAMLQQAVVAGERVFELMDGPRQQYGNDDYPLQSGTIEVDNVSFAYRDDNLVLKNINLSVPSRNFVALVGHTGSGKSTLASLLMGYYPLTEGEIHLDGRPLSSLSHSALRQGVAMVQQDPVVLADTFLANVTLGRDISEERVWQALETVQLAELARSMSDCIYTPLGEQGNNLSVGQKQLLALARVLVETPQILILDEATASIDSGTEQAIQHALAAVREHTTLVVIAHRLSTIIDADTILVLHRGQAVEQGTHQQLLAAQGRYWQMYQLQLAGEELAASVREEESLSA

SEQ ID NO: 7399 - DNA, 1743 bp, Streptococcus mutans UA159
  CDS (1)..(1743): transl_table=11
atgaagaataatgaacaccaaggccatgttttttggcgtctgatgtcttatcttaagccctataaatggttgactttcttcgccttgcttttccttttgtcaacaacagtgattaaaagtttcgtccccttagtggcctcttattttattgatcattttttgactcatttcaatcagacagcagcttcacttttgctgggctactacttgctctatgttttgcagacgattttacaatattttggcaatcttctttttgcgcgtgtttcttttagtgttgttcgcgacattcgtagggatgcctttgccaatatggaaagattgggaatggcctatttcgataaaacgccagcaggttcgattgtatcgcgcttaaccaatgatacagaaagtattagtgacatgttttcaggcatcttatctagttttatttcagctatttttatttttagtgttaccctttataccatgttaatgctgaattatcgcctaacctttcttgtcatgctttttttgccttttatttttattttggtcaatctctatcgtaaaaagtctgttaaggttattgctaaaacgaggagtttattgagtgatatcaataccaatttatctgaaagtattggaggtatcaatattattcaagcttttggacaagaagagcgtttaaaagcagaatttgaggcaatcaatgaagaacattttcattatgccaatcgttctatggccttggacagtcttttcctacgtccagctatgtcgcttttgaagcttttggcttatgctcttttgatggcttattttggatttaattggcagactattggtatttcagctgggatgatgtatgcctttattcaatatgttaatcgcctctttgaccctttaattgaagtgactcagaatttctcaaccttgcaaacttctatggtctcagctggacgtgtttttgatctgatagatgaaagggattatgaaccacatcaagatgatagtgacattagcatttcagctggtaatattgaatttagggatgtttctttctcatatgatggtcagcatcaaattttagatcatatttcttttaaagtcaatcaaggtcaaacgattgcttttgttggtccaacagggtcaggcaagtcttctattattaatgttttcatgcgcttttatgaatttcaaaaaggtcaagttaccattgatggacatgatatccgtaactatagccaagaagaattacgcaaaaatgttggtctggttttgcaagagcccttcctttatcatgggacaatcaagtctaatataaaaatgtatcaggatttgacagatgcggatattgaagctgcggcaaaatttgtggatgctgatcaatttattcaaaaattggctcataaatatgaggaacctgttagtgaaggtggttcaagtttttcaactggtcagcgtcagctaatggcttttgccagaacggtagcaagttcgcctaaaattttaattcttgatgaagcgacagctaatattgactcagaaacagaacaattggttcaaaattctttggctaaaatgcgtagaggacggacaaccattgcgattgcccatcgtttatcaaccattcaagatgccaactgtatttatgttcttgataagggtaaaattattgagtcgggaactcatgaggaacttctagcgaaaaaaggaacctatcacaaaatgtatcaactccaagcaggtatgatggattga

SEQ ID NO: 7400 - protein, 580 aa, Streptococcus mutans UA159
MKNNEHQGHVFWRLMSYLKPYKWLTFFALLFLLSTTVIKSFVPLVASYFIDHFLTHFNQTAASLLLGYYLLYVLQTILQYFGNLLFARVSFSVVRDIRRDAFANMERLGMAYFDKTPAGSIVSRLTNDTESISDMFSGILSSFISAIFIFSVTLYTMLMLNYRLTFLVMLFLPFIFILVNLYRKKSVKVIAKTRSLLSDINTNLSESIGGINIIQAFGQEERLKAEFEAINEEHFHYANRSMALDSLFLRPAMSLLKLLAYALLMAYFGFNWQTIGISAGMMYAFIQYVNRLFDPLIEVTQNFSTLQTSMVSAGRVFDLIDERDYEPHQDDSDISISAGNIEFRDVSFSYDGQHQILDHISFKVNQGQTIAFVGPTGSGKSSIINVFMRFYEFQKGQVTIDGHDIRNYSQEELRKNVGLVLQEPFLYHGTIKSNIKMYQDLTDADIEAAAKFVDADQFIQKLAHKYEEPVSEGGSSFSTGQRQLMAFARTVASSPKILILDEATANIDSETEQLVQNSLAKMRRGRTTIAIAHRLSTIQDANCIYVLDKGKIIESGTHEELLAKKGTYHKMYQLQAGMMD

SEQ ID NO: 7401 - DNA, 1740 bp, Streptococcus agalactiae NEM316
  CDS (1)..(1740): transl_table=11
atgaagtctaatcaatggcaagtctttaagagattaatctcctatttacgcccttataaatggtttacagtattagctctatctctcttattgttgacgactgttgttaaaaatattattcctttaattgcttcacattttattgatcactatctgacaaatgttaatcaaacagcagttcttattttagtgggatattattcaatgtatgtcttgcagaccttaattcaatattttgggaatctcttttttgcgcgtgtttcttatagtattgttagagatattcgtagagatgcttttgctaatatggaaaggctaggcatgtcttattttgataggacaccggcaggatctattgtgtcacgtattactaatgatactgaagcaatatctgatatgttttcgggtattttatcaagttttatctcggcgatatttatttttacagttactctgtacactatgttgatgctagacattaaactaacaggactcgtcgctcttttgttacctgttatctttatattagtgaatgtctatcggaaaaaatcagtcactgtcattgctaaaacgagaagtttacttagtgatatcaacagtaaattatcagaaagtattgaaggaattcgcattgtacaggcttttggtcaagaagagcgcttgaagactgaatttgaggaaattaacaaagagcatgttgtgtatgccaatcgttctatggctcttgatagtctcttcttaagaccggcgatgtctcttttaaaactcctagcatatgctgttcttatgtcttattttggatttacaggagttaaaggaggtcttacggcaggattaatgtatgcttttattcagtacgttaatcgtctatttgaccctttaattgaagtaacgcaaaatttttcaaccttacaaacatcaatggtatcagcagggcgtgtgtttgatctgattgatgaaacaggttttgaaccaagccaaaaaaatacagaagcttttgtgagagaaggaaatatcgaatttaaaaatgtatcattctcatatgatggaaaaaaacaaatccttgataatgtttcttttagtgttaaaaaaggtgaaactattgcttttgtaggagcgacaggttctggaaaatcatctattattaatgtctttatgaggttttacgaatttcaatctggacaagttttattagatgggaaggatattagggattactcacaagaacaattgcgaaagaatattggactcgtcttacaagacccctttttatatcatggcactattaaatctaatatcaaaatgtaccaagacatcaccgatcaagaggtacaggacgcagcagagtttgttgatgctgatcaatttattcagaagttgccagataagtacgattcagctgtttcagaacgtgggtcaagtttttcaactggacaacgccaactattagcgtttgccagaactgtggctagtaaacctaaaattttaatcttagatgaggcgacagcaaatattgattcggaaacagagcagattgtacaagattcgttagcaaaaatgcgtcaaggtcgaacaacaattgccattgctcaccgcttatcaaccattcaagatgctaattgtatctatgttcttgatagaggaaagataattgaaagtgggaatcacgagtctttattagaccaaaaagggacttattatcgtatgtaccaattacaagccggcatgatggaggtctag

SEQ ID NO: 7402 - protein, 579 aa, Streptococcus agalactiae NEM316
MKSNQWQVFKRLISYLRPYKWFTVLALSLLLLTTVVKNIIPLIASHFIDHYLTNVNQTAVLILVGYYSMYVLQTLIQYFGNLFFARVSYSIVRDIRRDAFANMERLGMSYFDRTPAGSIVSRITNDTEAISDMFSGILSSFISAIFIFTVTLYTMLMLDIKLTGLVALLLPVIFILVNVYRKKSVTVIAKTRSLLSDINSKLSESIEGIRIVQAFGQEERLKTEFEEINKEHVVYANRSMALDSLFLRPAMSLLKLLAYAVLMSYFGFTGVKGGLTAGLMYAFIQYVNRLFDPLIEVTQNFSTLQTSMVSAGRVFDLIDETGFEPSQKNTEAFVREGNIEFKNVSFSYDGKKQILDNVSFSVKKGETIAFVGATGSGKSSIINVFMRFYEFQSGQVLLDGKDIRDYSQEQLRKNIGLVLQDPFLYHGTIKSNIKMYQDITDQEVQDAAEFVDADQFIQKLPDKYDSAVSERGSSFSTGQRQLLAFARTVASKPKILILDEATANIDSETEQIVQDSLAKMRQGRTTIAIAHRLSTIQDANCIYVLDRGKIIESGNHESLLDQKGTYYRMYQLQAGMMEV

SEQ ID NO: 7403 - DNA, 1833 bp, Pseudomonas putida KT2440
  CDS (1)..(1833): transl_table=11
gtgcttgatgtaccagggtcacccgacccggtaccgggcaagccatacactgcgggcgatcgactgagctgggcggaaatccgccgcctggccttgcatcacaagaaaaacctctggtccgccaacctcattgcgttactggcggcgtgttgcagtgtgcccattccgctgctgctgccgctgttggtggacgaagttctgctcggccatggcgatgctgcgctgaagtggatgaaccatctgctgccgtccagctggcaggtggcagccggctacatcggcctgatgctggcgctcaccctgtgcctgcgcctggctgcactggcgttcaacgttatccagtccaagctgttcgccgggctggccaaggacatcgtctaccgcctgcgcatccgcctgatcgagcgcctcaagcgtatttcgctgaaagagtacgaaagcctgggcagcggcacggtgaccacccacctggtcaccgacctggacaccctcgacaagttcgttggcgaaaccctcagccgcttcctggtggccatgctgacactgaccggcacggcggccatcctgatctggatgcactggcagctggccttgctgatcttgctgttcaacccgctggtgatctacttcaccgtgcagttgggcaagcgcgtcaagcacctgaaaaagctcgaaaacgacagcaccgcgcgctttacccaggcgctagcggaaaccctcgatgccatccaggaaatccgcgccggcaaccgccagggctacttccttggccgcctgggcttgcgtgcccgcgaggtgcgcgattacgccgtggactcgcaatggaaaagcgatgccagtggccgtgccagtggcctgctgttccagttcggcatcgacatcttccgcgcggcggccatgctgaccgtgctgttttccgacctgtcgatcggccagatgctggcggtgttcagctacctgtggttcatgatcggtccggtggagcaactgcttaatctgcaatatgcctactacgccgcaggcggtgcgctgagccgcctcaacgagctgctggcgcgtgccgacgagccgcaatacccggccgccagcgacccgttcgccgggcgcgaaacggtgggcattgaagtgcgcgacctgcgctttgcctatgccgacgagccggtgctcgagcacctcgacctgtccatcgctgcgggtgagaaggtggcgattgtcggtgccagcggcggcggcaagagcacgctggtgcagctactgctgggcctttacagcgcccaggccgggaccatccgctttggcggggccagcctgcaggaaatcggcctggaaaccctgcgcgagaacgtcgcggtggtgttgcagcacccgtcgctgttcaacgacagcgtgcgggccaacctgaccatgggccgcgactgcagcgatgatgcgtgctggcaggcgctgcgcatcgcccagctggatgccaccatcgccgccttgccgcagggcctggacagcgtggtagggcgttcaggcgtgcgcttgtccggtggccagcgccagcgcctggccattgcccgcatggtactggctgagcccaaggtggtgatcctcgacgaggccacctcagccctggatgccgccaccgagtacaacctgcatcaggccttggcgtgcttcctcagcggccgcaccacgctgatcatcgcccaccgcttgtcggcggtgaaacaggccgaccgggtgctggtgttcgatggcgggcacgtggccgaagacggcgaccatcagcagctgattgccgagggtgggttatacgccaagctgtatgggcatctgcagcagagctga

SEQ ID NO: 7404 - protein, 610 aa, Pseudomonas putida KT2440
MLDVPGSPDPVPGKPYTAGDRLSWAEIRRLALHHKKNLWSANLIALLAACCSVPIPLLLPLLVDEVLLGHGDAALKWMNHLLPSSWQVAAGYIGLMLALTLCLRLAALAFNVIQSKLFAGLAKDIVYRLRIRLIERLKRISLKEYESLGSGTVTTHLVTDLDTLDKFVGETLSRFLVAMLTLTGTAAILIWMHWQLALLILLFNPLVIYFTVQLGKRVKHLKKLENDSTARFTQALAETLDAIQEIRAGNRQGYFLGRLGLRAREVRDYAVDSQWKSDASGRASGLLFQFGIDIFRAAAMLTVLFSDLSIGQMLAVFSYLWFMIGPVEQLLNLQYAYYAAGGALSRLNELLARADEPQYPAASDPFAGRETVGIEVRDLRFAYADEPVLEHLDLSIAAGEKVAIVGASGGGKSTLVQLLLGLYSAQAGTIRFGGASLQEIGLETLRENVAVVLQHPSLFNDSVRANLTMGRDCSDDACWQALRIAQLDATIAALPQGLDSVVGRSGVRLSGGQRQRLAIARMVLAEPKVVILDEATSALDAATEYNLHQALACFLSGRTTLIIAHRLSAVKQADRVLVFDGGHVAEDGDHQQLIAEGGLYAKLYGHLQQS

SEQ ID NO: 7405 - DNA, 1896 bp, Escherichia coli CFT073
  CDS (1)..(1896): transl_table=11
gtggcaatcatgatgagctggcgcaacaaagtggctggtatcgcgatatgtatcgctatcaacaactggaggcggcgctcgacgacgctccggaaattcgcgaggaggccatcgatgcgtagttttagccaactgtggccgactctcaagcgcctgttagcgtacggttcgccgtggcgtaaaccgttggggattgcggtcctgatgatgtgggttgcggcggcggcagaagtcagtgggccgctgcttatcagctattttatcgacaatatggtagcgaaaaataacctgccgttgaaagtggttgcagggctggctgcggcgtatgttgggctgcaactgtttgccgccgggctacattacgcgcagtcgctgctgtttaatcgggcggcagtaggcgtagtgcaacagttgcgtaccgacgtgatggatgctgcgttacgccagccattaagcgagtttgatacccaacccgtcgggcaggtgatttcccgcgtcactaatgacactgaagtgatccgcgatctctacgttaccgtagtggcaactgtcctgcgtagcgccgcactggtgggcgcgatgctggtggcgatgttcagcctcgactggcgaatggcgctggtggcgataatgattttcccggtggtgctggtggtaatggtgatatatcagcgttacagcacgccgattgtccgtcgtgtgcgcgcttatctggcggatatcaacgacggctttaacgaaatcatcaatggcatgagcgttatccagcagttccgtcagcaggcgcgatttggcgaacgtatgggtgaggccagtcgttcacactatatggcgaggatgcaaaccctgcgcctcgacggttttctgctgcgtccgctgctgagtctgttttcatcgctcattctttgtggcttgttgatgctgtttggtttctccgccagcggcaccattgaagtgggcgtgttgtatgcgttcatcagttatttggggcgacttaacgaacccttaatcgaactgaccacgcagcaggcgatgctgcaacaggctgttgttgctggtgagcgcgtttttgagctgatggacggaccgcgccagcaatatggcaatgatgatcgcccgttgcagagcggcaccatcgaagtcgataacgtgtcatttgcttatcgcgatgacaatctggtgctaaagaacattaatctctctgtgccttcgcgcaactttgtggcgctggtcgggcataccggcagtggcaaaagcaccctcgccagtttattgatgggctattacccgctaacggaaggtgagattcgccttgatggtcgtccattaagttcgctaagtcacagcgcgctgcgccagggcgtggcaatggtgcagcaagatccggtggtgctggcggataccttcctcgccaacgtgacgctggggcgtgatatctccgaagaacgcgtctggcaggcgctggaaaccgtgcaactggcggagctggcgcgtagcatgagcgacggtatttacacgccgcttggcgagcaggggaataatctctcagtcgggcaaaagcaactgctggcactggcacgcgtgttggtggagacgccgcaaatcctgatccttgatgaggcaacagccagcattgactccggtactgaacaggcgattcaacatgctctggcggcggtgcgtgaacatactacgcttgtggtgattgctcaccgcttatcaactattgttgatgccgacaccattctggtgcttcatcgtgggcaagctgtggagcagggcactcaccagcaactgctggcggcccagggacgctactggcagatgtatcaactgcaacttgcgggcgaagagctggcagccagcgtgcgtgaagaggaatcattgagcgcctga

SEQ ID NO: 7406 - protein, 631 aa, Escherichia coli CFT073
MAIMMSWRNKVAGIAICIAINNWRRRSTTLRKFARRPSMRSFSQLWPTLKRLLAYGSPWRKPLGIAVLMMWVAAAAEVSGPLLISYFIDNMVAKNNLPLKVVAGLAAAYVGLQLFAAGLHYAQSLLFNRAAVGVVQQLRTDVMDAALRQPLSEFDTQPVGQVISRVTNDTEVIRDLYVTVVATVLRSAALVGAMLVAMFSLDWRMALVAIMIFPVVLVVMVIYQRYSTPIVRRVRAYLADINDGFNEIINGMSVIQQFRQQARFGERMGEASRSHYMARMQTLRLDGFLLRPLLSLFSSLILCGLLMLFGFSASGTIEVGVLYAFISYLGRLNEPLIELTTQQAMLQQAVVAGERVFELMDGPRQQYGNDDRPLQSGTIEVDNVSFAYRDDNLVLKNINLSVPSRNFVALVGHTGSGKSTLASLLMGYYPLTEGEIRLDGRPLSSLSHSALRQGVAMVQQDPVVLADTFLANVTLGRDISEERVWQALETVQLAELARSMSDGIYTPLGEQGNNLSVGQKQLLALARVLVETPQILILDEATASIDSGTEQAIQHALAAVREHTTLVVIAHRLSTIVDADTILVLHRGQAVEQGTHQQLLAAQGRYWQMYQLQLAGEELAASVREEESLSA

SEQ ID NO: 7407 - DNA, 1776 bp, Vibrio vulnificus CMCP6
  CDS (1)..(1776): transl_table=11
atgaaaaagaccacgttgaaacgtttatttgcttatccattggcgcaaccaaaacccatgataacgggtttagtctttttgttgattgcggctgtcagcaatgcgggtggcccttggctcatccaacactttattgacgagcacattaccaaagacgattacactcaacagacacttatcttacttgctagtggctatattggcctgctgctttgctcagctttgtttcaatatctccaaggtttgcaatttaacattgtcgcgacaggcatcattaaaaccattcgcaagcaggcatttaatcgtgtgatcaagcaacctttgtcggctttcgattacacccctactggcaagctggtctcaagactcaccaacgacacggaatctctgcagcagttctacgagcttcttattgcgtcggtggttaagaatcttgtgatgattttagtcatgctgggagtgatgttgatcttaagctggcaactgaccttagttgtactgattctcttgcctgtggtggtggcttttatggccttgttccaaaagttgagcactcacgcctatcgcgttatgcgtgatttgctcactgacatcaatggcaatatgagcgaatcgatccaagggatgagcgtgatccaactgatgcgccaagaaaaacgcttcaaccagcagtttaatcaactgactgagcagcatttcaaagcgggtcgtaaagtcatcaagctgaatggtattttacttcgacccttgatggatttattggcgggcatcgctttactcaccctcgttgccatttttggtttcagtggtaccgagctcattggtgttggtgtactgtacgcgtttatcagctaccttggccgtattaccgaaccattaattgaaatgacgcaacagctagcgctactgcaacaagctttagtggccagcgagcgtatttttgaaatgatggatgcaccggagcaaagctatggtcatgatcagcagccacttaaaagtggttccatcgccatagagcaactgagctttagctacgatggtaagcagcaggtattgaaaaagatcgacattgacgtggaacaccagcagttcgtcgctttggtcggccacacgggtagcggaaaaagtaccctcgcttcgctattgatgggcttttacccagtaagccaaggcaaactgaaactggatggacgccctattgcttcattggcaaaatcggtgctgcgaaaagacgtggcgatggttcaacaagatccacatattctgccaacctcggtcagagaaaatattgccttgggaagagaagtctcagacgacatcatttggcaatctttagaacaagtaggtttggctgagcagatcaaacgctaccctcaattgctggacacccaactgggccaaggagaaaccaacctctctgctggacaaaaacagttgttggccatggcccgagtgcttatcgctaagccgaaaattttaatcctcgacgaagcgacggcaaacatcgattcagggactgaggcgctgatacagcgcagtttgaatgccctacgccatgatatgacgctagtggtgattgcacaccgcctttccaccattatggaggccgacaaaattgtggttttacaccacggagatttggttgaaatgggcagtcacaaacaactgcttgcccagcaagggcgctacgcacagatgtaccagttgcaacaagcaggccagcatatcaaggaaattgaacagcaggaggagcaagaactggaacaagccagctaa

SEQ ID NO: 7408 - protein, 591 aa, Vibrio vulnificus CMCP6
MKKTTLKRLFAYPLAQPKPMITGLVFLLIAAVSNAGGPWLIQHFIDEHITKDDYTQQTLILLASGYIGLLLCSALFQYLQGLQFNIVATGIIKTIRKQAFNRVIKQPLSAFDYTPTGKLVSRLTNDTESLQQFYELLIASVVKNLVMILVMLGVMLILSWQLTLVVLILLPVVVAFMALFQKLSTHAYRVMRDLLTDINGNMSESIQGMSVIQLMRQEKRFNQQFNQLTEQHFKAGRKVIKLNGILLRPLMDLLAGIALLTLVAIFGFSGTELIGVGVLYAFISYLGRITEPLIEMTQQLALLQQALVASERIFEMMDAPEQSYGHDQQPLKSGSIAIEQLSFSYDGKQQVLKKIDIDVEHQQFVALVGHTGSGKSTLASLLMGFYPVSQGKLKLDGRPIASLAKSVLRKDVAMVQQDPHILPTSVRENIALGREVSDDIIWQSLEQVGLAEQIKRYPQLLDTQLGQGETNLSAGQKQLLAMARVLIAKPKILILDEATANIDSGTEALIQRSLNALRHDMTLVVIAHRLSTIMEADKIVVLHHGDLVEMGSHKQLLAQQGRYAQMYQLQQAGQHIKEIEQQEEQELEQAS

SEQ ID NO: 7409 - DNA, 1788 bp, Lactobacillus plantarum WCFS1
  CDS (1)..(1788): transl_table=11
atggcagcacgtcagtcggtatgggcacgttccatgcctgttaaggaacaactcacggttattcggcgactattgccgtatgcgaaaccgttcaaatggttttttattgcggccatcgttttttccggtctgattagtgtggttaatatctatctgccgcgtgtattacagacctttattgatcattatctcaaaacaggacacgccacggtaccggtcatgtggtactttgcgggcctgtatttcttcggcatggttgtgcgcgcgttgatgcagttcgtacagaacttcagtagtacgatgggggcagaatatatgcttgaaaatgtccgccgacaaatgttcgccaagttgcatcggatgggcatgcgctactttgatcaagtccctggtggctcaattttgtcacgcctgactaacgatacgatgtcgttttccaatttttgggcgttgtttaatacattatttaccgccttttttgcggtgatttcgtcgtttgtcgcgatgtatctcaccgatgcgcagattgccttgtggttattggttttcatgccttttttggctgtaacgatttggtattatcaacggtatagctcacgggtttaccggcgaatgcgggaacggctcagtgagttgaataccaagttgagtgaagcaattactggaattagtgttattcagcaatttcgacaagaacaccgtatcaatggtgaatttgatcataccaatgatgcctattttaagacccgccaagcgatgatccggacgaactcattattattaagtccactgatcgacttgttttatgcgttagggacggtcatggttctgggaatcttcggggttcgtggactcaatggttatgtggctgccggggtcgtttatgcgttcatcacgtacctgaataacttctataatccgatgacgtcgatgatggataatttgtcagactttcaagatggcgtcgtcgccggatcacgggttttacgggtcatggatgatccaacgattgccccggcccaacacgccgatcctacggctaagattacgcgcggtaagattgaatttcggcacgtcacctttgcctatgacggccagcatccggtcttaaaagacgtttcattcgtggctgaaccaggccaaacggtggcactagttggtcagacggggagtggaaaaacgtcgacgattaatgttttgatgcggttttatgagtttcagtcaggagaagttttaattgatgatcgcgacattcgtgagtatccggctgaggaattgcgacagaagatggggttggtcttgcaagaaccgtttatgttttatggtgatattaattccaacatccgaatgtttaacgatcagatttcagatgaacaagttcaagcagcggcacggtttgtaaaggccgatgacttcatcaacgatttacctgagaattatcagtcacgcgtcattgagcgcggggccagttattcttcaggacagcggcaattgatttcatttgcgcggacgattgtgactgaccctaagattttaatcttggacgaagccacggcgaacgtcgatactgagaccgaagagatgattcagactggtttggatcggattcaggagaaccgcacgacgattgcgattgcccaccgcttgtccacgattcaaaatgctgatttgatcctggtcttaaatcaggggcaaatcgttgaacgcgggtccaacgacgagctattgcaacagcatggttactactatgatatgattcagttgcaaaattccgctcacgtcgattaa

SEQ ID NO: 7410 - protein, 595 aa, Lactobacillus plantarum WCFS1
MAARQSVWARSMPVKEQLTVIRRLLPYAKPFKWFFIAAIVFSGLISVVNIYLPRVLQTFIDHYLKTGHATVPVMWYFAGLYFFGMVVRALMQFVQNFSSTMGAEYMLENVRRQMFAKLHRMGMRYFDQVPGGSILSRLTNDTMSFSNFWALFNTLFTAFFAVISSFVAMYLTDAQIALWLLVFMPFLAVTIWYYQRYSSRVYRRMRERLSELNTKLSEAITGISVIQQFRQEHRINGEFDHTNDAYFKTRQAMIRTNSLLLSPLIDLFYALGTVMVLGIFGVRGLNGYVAAGVVYAFITYLNNFYNPMTSMMDNLSDFQDGVVAGSRVLRVMDDPTIAPAQHADPTAKITRGKIEFRHVTFAYDGQHPVLKDVSFVAEPGQTVALVGQTGSGKTSTINVLMRFYEFQSGEVLIDDRDIREYPAEELRQKMGLVLQEPFMFYGDINSNIRMFNDQISDEQVQAAARFVKADDFINDLPENYQSRVIERGASYSSGQRQLISFARTIVTDPKILILDEATANVDTETEEMIQTGLDRIQENRTTIAIAHRLSTIQNADLILVLNQGQIVERGSNDELLQQHGYYYDMIQLQNSAHVD

SEQ ID NO: 7411 - DNA, 1779 bp, Vibrio parahaemolyticus RIMD 2210633
  CDS (1)..(1779): transl_table=11
atgaaacaaaccagtacatttaagcggttgttgtcttatccattgtctcagccgaagccaatgataaaaggcttagctttgctgtttatcgcggcgttagcgagtgcgagtggcccttggttgatccagtattttattgatgaacacattgccaaaggtgactactctcgtaacgtattgattgctttagcgttgggctacgtgtcacttcaagtcatttcggcaacgttccaatatcttcaatcgttgcaatttagcatggtggcaacgaacacgatcaaaaccattcgcaagcaagtgttttcgggagtgatcaaacagccactttctgcgtttgacttcacgcctgctggtaagcttgtttctcgaatcacgaatgatacagaatcacttcagcagttttacgagttgttaatcgcgaccatggttaagaacgttgtgatgatcgtggtgatgttgggtgtcatgttcttcatgagttggaagttgacgctggttgttctcgtcctgttaccgatcgtaattggttttatgtatctgtttaaacaactcagtaccgagagttatcgtagaatgcgtgacttgctcacggacattaacgccaacttaagcgaatcaatccaaggaatgagcgtgattcagcttatgcaacaagaggggcgctttaataaacagtttaacaaactcactgctgagcatttggtcgcgtccaaaaaagtgattcgcttaaacgggtatctgctgcggcctctcatggatctgttggctggccttgccctactctgcttagttgccatctttggctttaatggtgtcgagttgattggtgtcggtgtactttatgcattcatcagttatttggcgcgtgtgaccgaacctctgattgaaatgacccaacaacttgcacttttacaacaagcgttggtgtcgagtgaacgtgtttttgagttgattgatgcgaagccacaaacttacggtgacgatcataaaccacttaaaacgggctcaattgagctaagtaatctgacgttcagttatgatggtaagcaagatgtattgaaagacatctccttgaaagccgctcatcaagattttatcgcgctggtcggccatacgggcagcggcaagagcacgttagcatctttgctcatgggcttttatccaaccaatgtgggcgagttattaattgatgggcggccacttaatacattgggtaaagacgtacttcgcaaagacgtagcaatggttcaacaagatccgcacattctcccagcctctgtacgtgagaacatttctcttagccgagtagtgagcgatgagcagatatgggatgcgttagataaggtaggtttatcggtgcaaattcgccgctatccaaacggcttagacactcaactcggccaaggtgaaaccaacctttcggcaggtcaaaagcaattacttgcgttagcccgagtgttagtggcgaaaccaaaaatcttaattttggatgaggcaacggcgaacatcgattccggaactgaggctctcattcaaaaaagcttaaaagttttgcgccaaaacatgacgttagtggtcattgctcaccgactgtccaccatattggatgcagaccaaattgtggttctacaccatggtgacttggtcgaacaaggcacgcataaagccttattgcaacaaaatggtcgctacgctcaaatgtaccagttacaacaagcgaatagacaccttcaacagattgagcaagaagatgctaaacaactagaagaagctgtttaa

SEQ ID NO: 7412 - protein, 592 aa, Vibrio parahaemolyticus RIMD 2210633
MKQTSTFKRLLSYPLSQPKPMIKGLALLFIAALASASGPWLIQYFIDEHIAKGDYSRNVLIALALGYVSLQVISATFQYLQSLQFSMVATNTIKTIRKQVFSGVIKQPLSAFDFTPAGKLVSRITNDTESLQQFYELLIATMVKNVVMIVVMLGVMFFMSWKLTLVVLVLLPIVIGFMYLFKQLSTESYRRMRDLLTDINANLSESIQGMSVIQLMQQEGRFNKQFNKLTAEHLVASKKVIRLNGYLLRPLMDLLAGLALLCLVAIFGFNGVELIGVGVLYAFISYLARVTEPLIEMTQQLALLQQALVSSERVFELIDAKPQTYGDDHKPLKTGSIELSNLTFSYDGKQDVLKDISLKAAHQDFIALVGHTGSGKSTLASLLMGFYPTNVGELLIDGRPLNTLGKDVLRKDVAMVQQDPHILPASVRENISLSRVVSDEQIWDALDKVGLSVQIRRYPNGLDTQLGQGETNLSAGQKQLLALARVLVAKPKILILDEATANIDSGTEALIQKSLKVLRQNMTLVVIAHRLSTILDADQIVVLHHGDLVEQGTHKALLQQNGRYAQMYQLQQANRHLQQIEQEDAKQLEEAV

SEQ ID NO: 7413 - DNA, 1785 bp, Enterococcus faecalis V583
  CDS (1)..(1785): transl_table=11
atggaagaaaagtatcaatccgaatggtccagagaattaccgatgaaagaacaattaacgattgttcagcgtttgtttcgttttgccaaaccgtttcgacgcatgttttacacagctattctctttgcatttggcttatcaattatcaatattcttttgcctagagtcattcaagtttttatggataattatttaacgcctaaaactgctacaatgcaagtgattctaacttttgctgctatttatttctttggtgtcattgtcaaaagtattgtttggtttttccaatggtatttgtattcgatggcttctttaaaaacgtatcaatatatacgagtgaaattatttgaaaaattacacactttaggtatgcgttattttgatcaaacaccagcgggttcgacggtgtctcgtgttacaaatgacacagaaacattgtttgaattctggtatgtattcctaatggtgattacaggaatttttgccgtaatctcgtcattttttgcaatgtttcaactcagtccagaaatctcattttattgtctaattttcttgccgattttattagttgtgatttggtattaccaaaaatttagttcaaaattatatcgcagtatgcgggaaaaattaagtcaattaaacaccaaactaaatgaatacatctctggtatgcaaatcattcaacaatttcgccaagaaaagcgtttggaaaaagaatttgaggaaaccaatgatgattatttaaaaacacgagtagcaatgattcgtatgaattcgttattattaagtcccatcattaatttgttgtatacgttggcgattgcattggccttaactatgtttggcatcgatgctttacattcacctgttgaagcggggatgatttatgcttttgtaacgtatgtccaagctttttttaatccgatgacgcaaatgatggacttcctaagtatctttacagatgggattgtcgcaggtagccgtattttaaaaattatggatacggaagaattaacgccgcaacaatcagtaggtgcgaatggggaaattattcgcgggaaaattgaatttcgcaatgttactttttcttatgacggcaaaaacgaagtattgaaaaatattagctttgtcgcaaatcccggggaaaccgtcgctttagtcggtcatacaggaagtggtaaaagttcaattattaatgtactcatgcgtttctatgaattttatgaagggcagattttaattgatgatcgtgacattcgtgattttcccatgacagaattacgggaaaagatgggcttagtattacaggacgctttcatgttttatggagatattgctggaaatatccgtttactgaatcccaatattacagatgagcaaattaaacaggctgcggaatttgttcaggcagataaatttattcacacgttacccaatacctatcatgcgaaagtcattgaacgaggagcgagttattctagcgggcaacgtcaattaatttcgtttgcacgaacgattgtgactgatcccaaaattttagttttagatgaagcaaccgctaatattgatacagaaacagaaggattgattcaagaaggattagccaaaatgcgtcaagggagaacgacaattgcgattgcgcatcgcctttcgacgattcgtgacgcaaacttgattttagttttagacaaagggcagattgtagaacgaggaacgcacgaaacgttactggcagaaggtggcctttatgcggatatgtatcagttacaaagtacggaagtttaa

SEQ ID NO: 7414 - protein, 594 aa, Enterococcus faecalis V583
MEEKYQSEWSRELPMKEQLTIVQRLFRFAKPFRRMFYTAILFAFGLSIINILLPRVIQVFMDNYLTPKTATMQVILTFAAIYFFGVIVKSIVWFFQWYLYSMASLKTYQYIRVKLFEKLHTLGMRYFDQTPAGSTVSRVTNDTETLFEFWYVFLMVITGIFAVISSFFAMFQLSPEISFYCLIFLPILLVVIWYYQKFSSKLYRSMREKLSQLNTKLNEYISGMQIIQQFRQEKRLEKEFEETNDDYLKTRVAMIRMNSLLLSPIINLLYTLAIALALTMFGIDALHSPVEAGMIYAFVTYVQAFFNPMTQMMDFLSIFTDGIVAGSRILKIMDTEELTPQQSVGANGEIIRGKIEFRNVTFSYDGKNEVLKNISFVANPGETVALVGHTGSGKSSIINVLMRFYEFYEGQILIDDRDIRDFPMTELREKMGLVLQDAFMFYGDIAGNIRLLNPNITDEQIKQAAEFVQADKFIHTLPNTYHAKVIERGASYSSGQRQLISFARTIVTDPKILVLDEATANIDTETEGLIQEGLAKMRQGRTTIAIAHRLSTIRDANLILVLDKGQIVERGTHETLLAEGGLYADMYQLQSTEV

SEQ ID NO: 7415 - DNA, 1908 bp, Streptomyces avermitilis MA-4680
  CDS (1)..(1908): transl_table=11
atgagtatggagaccaccgcctggacccagttgcacagcgtcatgaacgcgcagcgggagacccgccccttcgcccgtgcgacgctgcgccgcatcgccgcgttcgcccgcccgcaccgccgccgtatcgcgcagttcgtcgtgctcagcgtggtgaccgcgctgctcgccgtcgcgacaccggtgctcgccggacgcgtcgtcgacgcgatcgtgtcgggtggcgacgagagcacggtcgtacgcctggccgtcctcatcgcggtcatcgcgctcgccgaggccggactcggactcgtcagccgcctgctgtcggcgaccctcggagaagggctcatcctcgatctgcgcacggctgtgttcgatcatgtgcagcgcatgccggtcgcgttcttcacacgtactcgtacgggcgcgctggtcagtcgtctcaacaacgacgtgatcggcgcccagcgcgcgttcagcaacaccctgtccggagtcgtcggcaatgtggtgaccctgctgctcaccctcgccgtgatgctcaccctgtcctggccgatcaccctgctcgcgctggcgctgctgccggtcttcgtgctgcccgcccggcggatgggcagccggatggcgaagctccagcgggaggccgcggacctgaacgcggccatggggacccggatgacggagcggttctcggcgccgggtgccacgctggtgaagctcttcggccggcccgacgaggagtccgccgagttcgcggcgcgggcccggcgggtgcgggacatcggggtgcgtacggcgatggcgcagtgggcgttcatcacggcgctgacgctcgtttccgccctggccctcgcccttgtctacggcctcggtggctggttcgccctgcgcggccgcctcgagccgggcgccgtcgtctcgctcgccctcctgctgacccgcctctacgcgccgctgacctccctcgcgggggcgcgcgtcgaggtcatgagcgccctggtgagcttcgagcgcgtcttcgaagtgctggatctgaagccgctcatcgaggagaaggcggacgcgcgcgcggtgccggacggcccggcgtcggtggagttcgacaacgtccgcttcggctacccggcggcggacaaggtgtccctcgcctcgctggaggaagtggccgccctggacacccgcggcggcgcggaggtcctgcacggcgtctccttccgtgccgaacccgggcagacggtggcgctggtcggctcgtccggcgccggcaagtcgaccatcgcccagctgctgccgcggctgtacgacgccgacgagggcaccgtacgcatcgggggcgtcgacgtacgcgacctgagcgcgccgtcgctgcgggccacgctcgggatggtcacccaggacgggcacctgttccacgactcggtacgggcgaacctgctgctggcgcgcccctcggccgccgaggacgaactgtgggacgtcctgcgccgggcccgcctcgacgagctcgtacgctccctgcccgacggcctcgacaccgtggtcggcgagcgcggctaccggctctccggcggcgagcgccagcgcatgaccatcgcccgtctgctgctcgcccgccagcgcgtggtgatcctcgacgaggcgaccgcccatctcgacaacacctccgaggcggccgtccaggaggcgctcgccgaggcgctcgcggggcgcacggccgtggtcatcgcgcaccgactgtccacggtgcgggccgcggacgtgatcctggtcgtcgaggccggccggatcgtggagcggggcacgcacgagcaactgctcgcggcggacgggcggtacgcggaactgcaccgcacacagttcgggaagcccgtgccgggggcggcggaggtcgccgaggcgggggaggcggtggcctag

SEQ ID NO: 7416 - protein, 635 aa, Streptomyces avermitilis MA-4680
MSMETTAWTQLHSVMNAQRETRPFARATLRRIAAFARPHRRRIAQFVVLSVVTALLAVATPVLAGRVVDAIVSGGDESTVVRLAVLIAVIALAEAGLGLVSRLLSATLGEGLILDLRTAVFDHVQRMPVAFFTRTRTGALVSRLNNDVIGAQRAFSNTLSGVVGNVVTLLLTLAVMLTLSWPITLLALALLPVFVLPARRMGSRMAKLQREAADLNAAMGTRMTERFSAPGATLVKLFGRPDEESAEFAARARRVRDIGVRTAMAQWAFITALTLVSALALALVYGLGGWFALRGRLEPGAVVSLALLLTRLYAPLTSLAGARVEVMSALVSFERVFEVLDLKPLIEEKADARAVPDGPASVEFDNVRFGYPAADKVSLASLEEVAALDTRGGAEVLHGVSFRAEPGQTVALVGSSGAGKSTIAQLLPRLYDADEGTVRIGGVDVRDLSAPSLRATLGMVTQDGHLFHDSVRANLLLARPSAAEDELWDVLRRARLDELVRSLPDGLDTVVGERGYRLSGGERQRMTIARLLLARQRVVILDEATAHLDNTSEAAVQEALAEALAGRTAVVIAHRLSTVRAADVILVVEAGRIVERGTHEQLLAADGRYAELHRTQFGKPVPGAAEVAEAGEAVA

SEQ ID NO: 7417 - DNA, 1626 bp, Bacillus cereus ATCC 14579
  CDS (1)..(1626): transl_table=11
gtgtataaagcgaaagcattaacgaaagaagaagtgtttgcattttataaaccagaaataaaccgtctattattacttggtggtggctatttcgctttattagtagtcgtgtcattatttgcatacggaaagcagttcttcttgcagaaggcagcgaacaaaattattcaaattatgagggaagatgttttttctcatattcaaacgttgccaattcggtactttgatcatttaccggcggggaaaattgtttcgcgtgtgacgaatgatacagaggccattcgtgatttatatgtaacggtgctggcaacattcgtttctagtatcatctatattattgggatattcgctgcgttatttttattagatgtgaagctcgcttcattatgtttattaattatcccaattttaattgtttgggcgattctttatagaaaatatgcgtctgtatacaatcataaaatgcgctctcgcttatctgatattaacggaacagtgaatgaatccattcaagggatgccaattattcaagcgtttcgtcaagagcgtgaaacgaaaaaagaatttgaagaattaaatggcgattattttaagtatcaaaataaaattttaaatttaaatgcagcaacttcgcataacttagtagccgtattaagaaatatcgctttcacaggagtaatttggtatttcggcggtgcgtcattaagtgctacaggtattatttcacttggggtactgtatgcgttcgtcgattatttaacacgattattctcgccaattacgaatatggtgaaccagcttgcaaacttagagcaagcgcgcgttgcatcagaacgtgtctttgaattgttagaggaaaaaggggaaccggtagaagaagaacgtatgcctcgtttaaaaggaaatgtaaaatttgataatgtatcattttcttataatggaaaagatgaagtgttaaaaaatatttcttttgaagcgaaacaaggcgagacagtggcacttgtcggtcatactggatcaggaaaaagttctatcatgaatgtactctttcaattttatgagtttgaaaaaggaaagcttacgattgatggtcacgatgtaaaagagatgccgaaacaagcaacccgtgaacatatgggaatcgtactgcaagacccgtttctttttagcgggacggtcgcttccaatgtaagcttagaaaatgaaaaaatttcaaaagagcgtatcataaaagcattgcatgatgttggtgctgaaagatttgcgaataatataaatgaagaaattacagaaaagggaagtacgctttccactggagaacgtcagcttatttcatttgctagggcgcttgcttttgatccagctatcttaattttagatgaagcaacgtctagtattgatacagaaacagaggcgatgattcaacaagcactagaagttgtaaaaaaaggaagaacgacatttattatcgctcaccgcctttcaacgattaaaagcgcagatcaaattattgtgctcgatagaggaaccattttagaaaaaggctctcatgatgaactcatgaaaaagcgggggcgttattacgatatgtataaaacgcaaatggaaggcaatcagagtgcttaa

SEQ ID NO: 7418 - protein, 541 aa, Bacillus cereus ATCC 14579
MYKAKALTKEEVFAFYKPEINRLLLLGGGYFALLVVVSLFAYGKQFFLQKAANKIIQIMREDVFSHIQTLPIRYFDHLPAGKIVSRVTNDTEAIRDLYVTVLATFVSSIIYIIGIFAALFLLDVKLASLCLLIIPILIVWAILYRKYASVYNHKMRSRLSDINGTVNESIQGMPIIQAFRQERETKKEFEELNGDYFKYQNKILNLNAATSHNLVAVLRNIAFTGVIWYFGGASLSATGIISLGVLYAFVDYLTRLFSPITNMVNQLANLEQARVASERVFELLEEKGEPVEEERMPRLKGNVKFDNVSFSYNGKDEVLKNISFEAKQGETVALVGHTGSGKSSIMNVLFQFYEFEKGKLTIDGHDVKEMPKQATREHMGIVLQDPFLFSGTVASNVSLENEKISKERIIKALHDVGAERFANNINEEITEKGSTLSTGERQLISFARALAFDPAILILDEATSSIDTETEAMIQQALEVVKKGRTTFIIAHRLSTIKSADQIIVLDRGTILEKGSHDELMKKRGRYYDMYKTQMEGNQSA

SEQ ID NO: 7419 - DNA, 1719 bp, Bacillus cereus ATCC 14579
  CDS (1)..(1719): transl_table=11
atgaagccatataaagggttactatctttagcatttatctttttagttggtgcgacagtaacggaaatgatgggtccttttttaattaaacaattcctcgatgaacacctagtaccgcgggattttgaacgatcagcgctcgttactttatttgtaatttacatagttgctcatttattaaaagtactatttacgtatttaaatctattgtactttcagaacattgcttttaagattgttcaagatatgcgagttgaagtatatgaacatgttcaaaagctgtcattaagtttctttgatcgtacgccgattggtacacttgtatcgcgtataacaaatgatacggaagcgattaaagatttttatgtcagtgtattatcaacatttgtaaaaaatgtagtctttttagtaggtattttagtagcgatgtttttattagatgtaaaattagcgctattttctctcgtattaattccgataatgtttgcgattatggtattatatcgccggaaaagtgcagctttttatttagaagtacgtaatcaactaagcgtgttaaatgcaaagttgaacgagtccatacaaggaatgaatattgttcaagtgttcagacaagaaaaacgtatgagaaaagagtttgaagaagtgaataataaacattatagtgcagggcgacgtactttgaagttagacgcattacttttacgaccagctacggatttagtacatattgtagctattgcgttagtactaggtttatttgggattgatgctttaaagagccctgttgaagtaggagttttatatgcttttgttaactatatacatcgtttcttccaacctgtaaatgagatgatgatgaaattgtccttcttccaacaggcacttgtttcgtcatcacgtgtatttcatttaatggacgagaaagatttagcaccggttcaaaaaggtaatgagaatcctcaaatcgtggatggagatattgaatttaaaaatgttactttttcatatgatggaaagcgtgacgttttaaaaaatgtatcatttcacgtgaaacaagggcaaacggttgcttttgttgggcatactggtagcggaaaaagtacgattatgaatttgttaatgcgattttataatattaagtcaggaaatattgtaatagacggtgtagatttagaaaaatttgaagaacgagaaattagaaagaaaataggactcgtattgcaagatgcatttttatttgctggaaatgtaaagcaaaatattcgtatgtataatgaagaaattacggatgaagaagtaaaagaagctgctcgatttgtgcaagcgaatacgtttattgaaaagttaccaaaacagtatgaaacagaagtagtagaaagaggtgcagcattttcaagcggtcaacgacaattaattgcttttgctagaacgatagcaacgaatccgaaagtattagtattagatgaagcaacagctaatatcgatacagaaacagaagaggctattcaaacagcgttgcaacaaatgcgaaaaggtagaacgacgatagccattgcgcataggttatctacaattcaagatgcggatcaaatttttgtgatgcatgatggagagatagtagagagagggacacatcaagaattattaagtgagcaaggtttgtattataatatgtatttgctacaaaataaagtgagtttgcaaaaggccttgtaa

SEQ ID NO: 7420 - protein, 572 aa, Bacillus cereus ATCC 14579
MKPYKGLLSLAFIFLVGATVTEMMGPFLIKQFLDEHLVPRDFERSALVTLFVIYIVAHLLKVLFTYLNLLYFQNIAFKIVQDMRVEVYEHVQKLSLSFFDRTPIGTLVSRITNDTEAIKDFYVSVLSTFVKNVVFLVGILVAMFLLDVKLALFSLVLIPIMFAIMVLYRRKSAAFYLEVRNQLSVLNAKLNESIQGMNIVQVFRQEKRMRKEFEEVNNKHYSAGRRTLKLDALLLRPATDLVHIVAIALVLGLFGIDALKSPVEVGVLYAFVNYIHRFFQPVNEMMMKLSFFQQALVSSSRVFHLMDEKDLAPVQKGNENPQIVDGDIEFKNVTFSYDGKRDVLKNVSFHVKQGQTVAFVGHTGSGKSTIMNLLMRFYNIKSGNIVIDGVDLEKFEEREIRKKIGLVLQDAFLFAGNVKQNIRMYNEEITDEEVKEAARFVQANTFIEKLPKQYETEVVERGAAFSSGQRQLIAFARTIATNPKVLVLDEATANIDTETEEAIQTALQQMRKGRTTIAIAHRLSTIQDADQIFVMHDGEIVERGTHQELLSEQGLYYNMYLLQNKVSLQKAL

SEQ ID NO: 7421 - DNA, 1734 bp, Wigglesworthia glossinidia endosymbiont of Glossina brevipalpis
  CDS (1)..(1734): transl_table=11
atgtatattaaatacaatttaaaaaattatttaaaacgtctattaatatatgcatatccttttaagaaaaaattcatattagcatgttctatgttattgttgtcctcagctatggaaatttctggtccaataataattagttattttatagataatctatttaaaatagttaaaatgccaatatggatgtttttaatttttatgtttagttttttagttttacaaattatgtctgcgattttgaggtattatcaatcttacatattcagtaaaatatctttaaatatagtagctaaaattagaaatattgttatgaattcaattttacataaaccattatcttggtttgacaaacaatcaatgggcaaattaatttcgatcataataaatgatactgaaattataaaaaacttacttatacattttatatcttctataataaaaagtataacattaatttttagtatatctgtagctatttttatattaaattggaagttaggatttatttcattaattttatttcctataataattttcataatgaaaacttatcagatttatagtataccaattttttttagaataaggcattgcgtagaaaatattaataatttttttaatgaaattattaaaaatatgaaaattattcaacaatttagacagcaaaaaagattcagagaaaaattatataaaataaataaagaacattttaaagctcgtatggacagtctaaaactagaaggatatcttcttaggcctttactaagtttagtattttctttaattctttgcattatattacttttatttggtttaagtccaaataacattgttggagtaggaactttatatgcttttattcattatttaggaagattaagcgagccattaatagaaattacttctcatcaatctattttacaacaagcacatgttgcatgtgagagaatttttaatttgttagaatcaccaatccaatcttatggaaaagataataaaaaaatatttagcggatgcattcaagcaaaaaatataactttttcatatgactataaaaatttaattttaaatcatatatctttttatgttccagaaaaaagttttttagctttagtaggtcaaacaggaagtggaaaaagcactttagctaatttaattatgggtcattattcattgaaaaatggaactctactaatagataacagaccaatagaaacattgtctagaaaagtaattcgtaaaggaatatcaatggttcaacaagatccagttataatatcaagatcaatttacgataacatcgtatttggaagaaaaattaaagaaaaacaagtttggtctactttaaaaaatttaaatcttgtatcttttattaattcttttccaaatggaatattttctaaattagacgaatatggaaacatgctttctgctggacaaaaacaattaatatctttagcaagggttttagtatctgtaccttcaatattaatattagatgaatctacatcaaacattgattatgatacagaaaaattaattaataatattttatgcaagataaaaaaaactactactataatagttatagctcatagatttagtactattttaaatgctgataatattttagttttacataaaggaaatattgcagaacaaggaaatcatttatctcttataaaagagaaaggaaaatattacaaaatgtataatttacaaaaaaattaa

SEQ ID NO: 7422 - protein, 577 aa, Wigglesworthia glossinidia endosymbiont of Glossina brevipalpis
MYIKYNLKNYLKRLLIYAYPFKKKFILACSMLLLSSAMEISGPIIISYFIDNLFKIVKMPIWMFLIFMFSFLVLQIMSAILRYYQSYIFSKISLNIVAKIRNIVMNSILHKPLSWFDKQSMGKLISIIINDTEIIKNLLIHFISSIIKSITLIFSISVAIFILNWKLGFISLILFPIIIFIMKTYQIYSIPIFFRIRHCVENINNFFNEIIKNMKIIQQFRQQKRFREKLYKINKEHFKARMDSLKLEGYLLRPLLSLVFSLILCIILLLFGLSPNNIVGVGTLYAFIHYLGRLSEPLIEITSHQSILQQAHVACERIFNLLESPIQSYGKDNKKIFSGCIQAKNITFSYDYKNLILNHISFYVPEKSFLALVGQTGSGKSTLANLIMGHYSLKNGTLLIDNRPIETLSRKVIRKGISMVQQDPVIISRSIYDNIVFGRKIKEKQVWSTLKNLNLVSFINSFPNGIFSKLDEYGNMLSAGQKQLISLARVLVSVPSILILDESTSNIDYDTEKLINNILCKIKKTTTIIVIAHRFSTILNADNILVLHKGNIAEQGNHLSLIKEKGKYYKMYNLQKN

SEQ ID NO: 7423 - DNA, 1797 bp, Prochlorococcus marinus str. MIT 9313
  CDS (1)..(1797): transl_table=11
atggctgttactgattttcagcgggttcggcgtctagggcgctatctccgtgaggaccgccggcgtctatggatggtgcttgtcctcttggtgccggtagctcttgctggtgcgattcaacccttcttggttggccaggcaatcagtgttttgaagcaagagtcaaccttcccttggctcagtgatctgccagtgagctcagcaataagagttttggtggggattctgctgatttctgtgcttctgcgcttgggtctgcagggctttcagtctttcaatatcgaggccttagggcaacggctaacggcgcgtattcgtaacgatctgtttggccacgccatggccctttcgctgcgctttcacgatcgaatgcctgtgggcaagttgttgactcggctgaccagtgatgtgaatgcactatcggaggtttttggtagtggggcagtaggagttttgggggatctcgtcagccttgtggtgattgcagtcaccatgattttgattgattggcgcctgggggggttgctgctggtgacgcaggtaccagtcaccttggtgatcctttggttgcaacgccgataccggaaagccaattaccgcgtgagggaggaactctctcagctcaatgccgattttcaggaaaaccttcaggggcttgaggttgtccagatgtttcgtcgagaaacgtttaatgggcagctatttgatcgcactggctcggcctacaggcaagccgtgaatggaacgatcttttatgacagcagcatttcagcttttatcgaatgggtggccctggcagccgtggctgtggtgttggcgcttgggggatggatggtaactgccgagacaatgggccttggcaccttgacaacattcatcctttattcccagcgtttgtttgatcccctgcgtcaacttgctgatcgcttcactcagattcaggggggcctgactgctgttgaacggattggcgagttgctggagcagccactggacattgtcgatgcaaagcctgttaaagacgaacccagctttgttaggccctcggcttctgctgcttgcggtgaggtggtgtttgagggggtgagctttgcctatcggccagacgagccgattctccaggaccttagttttcgcatttctgctggtgaacatgttgccctggtaggaccaaccggttcaggcaagacgaccctgatccgcttgctttgtcgtctttacgagcctcaagtcgggcggatcatgcttgatggtgttgacatcaaaacaatccctctttggcggctacgcaaacaactgggggttgtgcttcaggacacctttctatttagcggcaatgtggcagataacctccgattggattcctcgattgaggatgaccgtttgcggacgatctgtagagatcttggccttgatcctttgctcaatcggctacccaacggcttggagactgagctcagggagcgtggcggcaatttgtcatcgggagagagacagctcttagcagttgcaagggtggccattcgcaaccccactgtgctggtaatggatgaggcgaccgctttcatggacccttctacggaagcgacattgcaaagggatctagatcgcttgcttgaacgtcgtaccgcggttgttattgcccatcgcttggccactgtggaagcagccgatcgaattatggtgcttcggcggggcaagctgattgagcagggaacccaccttgagcttcgtgccaagggaggcctttattctcagttagcggaactacaggaaaggggactggcgaaactttga

SEQ ID NO: 7424 - protein, 598 aa, Prochlorococcus marinus str. MIT 9313
MAVTDFQRVRRLGRYLREDRRRLWMVLVLLVPVALAGAIQPFLVGQAISVLKQESTFPWLSDLPVSSAIRVLVGILLISVLLRLGLQGFQSFNIEALGQRLTARIRNDLFGHAMALSLRFHDRMPVGKLLTRLTSDVNALSEVFGSGAVGVLGDLVSLVVIAVTMILIDWRLGGLLLVTQVPVTLVILWLQRRYRKANYRVREELSQLNADFQENLQGLEVVQMFRRETFNGQLFDRTGSAYRQAVNGTIFYDSSISAFIEWVALAAVAVVLALGGWMVTAETMGLGTLTTFILYSQRLFDPLRQLADRFTQIQGGLTAVERIGELLEQPLDIVDAKPVKDEPSFVRPSASAACGEVVFEGVSFAYRPDEPILQDLSFRISAGEHVALVGPTGSGKTTLIRLLCRLYEPQVGRIMLDGVDIKTIPLWRLRKQLGVVLQDTFLFSGNVADNLRLDSSIEDDRLRTICRDLGLDPLLNRLPNGLETELRERGGNLSSGERQLLAVARVAIRNPTVLVMDEATAFMDPSTEATLQRDLDRLLERRTAVVIAHRLATVEAADRIMVLRRGKLIEQGTHLELRAKGGLYSQLAELQERGLAKL

SEQ ID NO: 7425 - DNA, 1740 bp, Chromobacterium violaceum ATCC 12472
  CDS (1)..(1740): transl_table=11
ctgcaaacccgcgaagccgtcgcgctgctggccgacgccgcccgtcccgaccgccgccacctgtggctgggcggcttctggctgctgatcgccgccctgctggaggccggcgcgccgctgctgggcaaggtgttcatcgacagctacctgctgccgcaccggctggactggagcgccatcgccggcctgctggccggcagcctgctgctgggcctcgccgccgccgcgctgcgctaccggcagctggtgcgcttggccggcgtggcgatgcgcgcggtgctgcggctgcgcgagcgggtgtacggccacgtgatgcggctgccgatggccttcttcgacaaggccatcaccggccagctggtcagccgcgtcaccaacgacaccgagtccgtcaaggcgctgtatgtgcaggcgctgttcgtcatcctcaacagcagcatcgtggtgctcggcgcgctggcggcgatggcctggctggactggcggctgatgctggtcaccctgctgctgttccccgccaccttcgccatcgtctggctgtaccagcggctgagcgcgccgtcggtggcgcgcgcgcgcgcgctgcgcagcgacatcaacgcccagatggcggaatccatctccggcatcgccgtgctgcaggccagcaacgccgagggccgcttcatcgcccgcttcgacgacaccaaccagcgctattaccaggcgcggctgcgcgagctgcgcgccaacgcctggctgctgcgcccggcgctggacctgctcaacgtgctgctgctgatcgccgtgatccacagctacggccagcggccgctggacgggctggagatcggcgtgctgtacgccttcgtcggctacattggccgggtggtggagccgctgatccagatcacgctgcaattcggccagttgcagcaggcggtggtggccgccagccgcgtcagccagctgctggccgagtcgcccgcgccgggcccggcggaaaccggccgcgtctgcgacggcgcggtcagcttccgcggcctgcgcttcggctaccagcccgagcacccggtgctgcacgatctgagcctggagattcccgccggcggcttcgtcggcatcgtcggccataccggcagcggcaaatcgacgctgctgtcgctgctgctgcgcttctatcggccgcagcagggcgagatcctggtcgacggccagccgctggacgcgataggcgacgccgcctttcgcgccggcataggcctggtgccgcaagacccgttcctgctggccgccagcgcgcgcgaaaacatagacatgggccgcggcctgccgcaagacgagatcgaggaagccgcccgcgccgccggcgtgcacgaactgatcctgtcgctggaaaacggctacgacagcgatatgggcgagagcggcgcgcggctgtccagcggccagaagcagctgatcgccatcgcccgcgcgctggcgggcaagccgcgcatcctgctgctggacgaggccacctcgcacatcgacagcgaaaccgagcaactggtgcagcaggcgctggccaagctggccggcaagatcacgctgatctccatcgcccaccggctgtccaccatccgcgacgccgacaccatcgtcgtgctcaaccacggccgcatcgccgaatccggtgaccacgacgcgctgatgcgccagggcggcatctaccacaagctctacttgctgcaacaattgcaacccgaggaggaagcgtaa

SEQ ID NO: 7426 - protein, 579 aa, Chromobacterium violaceum ATCC 12472
MQTREAVALLADAARPDRRHLWLGGFWLLIAALLEAGAPLLGKVFIDSYLLPHRLDWSAIAGLLAGSLLLGLAAAALRYRQLVRLAGVAMRAVLRLRERVYGHVMRLPMAFFDKAITGQLVSRVTNDTESVKALYVQALFVILNSSIVVLGALAAMAWLDWRLMLVTLLLFPATFAIVWLYQRLSAPSVARARALRSDINAQMAESISGIAVLQASNAEGRFIARFDDTNQRYYQARLRELRANAWLLRPALDLLNVLLLIAVIHSYGQRPLDGLEIGVLYAFVGYIGRVVEPLIQITLQFGQLQQAVVAASRVSQLLAESPAPGPAETGRVCDGAVSFRGLRFGYQPEHPVLHDLSLEIPAGGFVGIVGHTGSGKSTLLSLLLRFYRPQQGEILVDGQPLDAIGDAAFRAGIGLVPQDPFLLAASARENIDMGRGLPQDEIEEAARAAGVHELILSLENGYDSDMGESGARLSSGQKQLIAIARALAGKPRILLLDEATSHIDSETEQLVQQALAKLAGKITLISIAHRLSTIRDADTIVVLNHGRIAESGDHDALMRQGGIYHKLYLLQQLQPEEEA

SEQ ID NO: 7427 - DNA, 1767 bp, Gloeobacter violaceus PCC 7421
  CDS (1)..(1767): transl_table=11
atgtccgaagccgtcgagccgcagccgggtgagcgccgcaactgggaactgctcaagcgcgtctggccttttgcccgtcggcaggtgcgcctttttatactggccttggtcctgctgccgcccctggccaccgcgagcgccatcggcccgattctcatccagcgggccatcgacggaccggccaagaccggcgacatggggcttctgcattggctggcgtttttgttcgcccttacggtgctggtgcggttgggtctacaggcctggcagggctatttgctgcagcaggcgggccagcggatgaccgccgacatccgctcagcactttttgaccacgtcacccgcctatcgagcagctacttcagccgcacgccggtgggcaagctgatcacccgcctcaccagcgacgtcgaagcgttgggcgaagtcttttccaccggcggcgtgggtatcctcagcgatgccgtctcgattgtgatcgtggccgccttcatgttcacgctgcgctgggatctggccctggtggtagtaatcttactcttcccgatcaccgccatcgtcatctggtttcagaacacctaccgggcggccaattcccgcgtgcgcgaggcgctttccaacctcaacgccatcttgcaggaaaatctaatcggcgtgaacgtcgtgcagatgttccgccgcgaggggcgcaacgccgagcagttcgaccgggtcaaccgcgggtacatcaagtcggtggacgagacgatcctctacgattcggccctctcggcggtgatggagtggatttcgctggtggccattgccggggtgctctggttcggcggcggccaggtgctccaaaatgccattacttttgggacgctggtggcctttatccagtacgcccagcgcctgtttgatccgattcgccagttgggcgagcgcttcacgtcgatccagtcgggctttacgtccctggagcggatcaccgacatcctcgatgaacccatcgagatcaaagaccaggacaaaccgttgcaactgcccgcggacggtaccggagaagtcacgtttcaaaacgtctggtttgcctacaaagcggacgaatacgtgctcaaaaatgtcagcttcacgatcaaacccggccagaccgtggccctggtcggtcccaccggctccggcaagagcacgattatccggctgttgtgccgcctgtacgaacccacccaggggcgcatcctcatcgacggcgtcgatatccaactgattgcccaggaagagttgcgccgccgcatcggggtcattttgcaggaggggttcctcttctccggcgatatcaactcgaacatcgcccttggtgaacccttcagcgaagaagagattcaacaagccgcgcgggcgatgaacgtcgatcgcttcatccgcgagttaccgaacggctacaagacccaggtgcgcgagcgcggcaacaacctttccggcggccaaaagcagctgttggccttcgcccgcgccgccgtgcgcaacccacgcatcctgatccttgacgaggccaccgcttcgctcgatgtaggcaccgagtcgctcatccaacaagatctgggtcgtctgctcgaagggcgcacctgtatcatgatcgcccaccggctatccaccatccgcgacgtcgatcgcattttggtgttgcgcaaaggtgaactgatcgaagacggcagtcacgaacagctattggcccagcacgggctttacgagagcctctacaagctacaggctctggcctcttga

SEQ ID NO: 7428 - protein, 588 aa, Gloeobacter violaceus PCC 7421
MSEAVEPQPGERRNWELLKRVWPFARRQVRLFILALVLLPPLATASAIGPILIQRAIDGPAKTGDMGLLHWLAFLFALTVLVRLGLQAWQGYLLQQAGQRMTADIRSALFDHVTRLSSSYFSRTPVGKLITRLTSDVEALGEVFSTGGVGILSDAVSIVIVAAFMFTLRWDLALVVVILLFPITAIVIWFQNTYRAANSRVREALSNLNAILQENLIGVNVVQMFRREGRNAEQFDRVNRGYIKSVDETILYDSALSAVMEWISLVAIAGVLWFGGGQVLQNAITFGTLVAFIQYAQRLFDPIRQLGERFTSIQSGFTSLERITDILDEPIEIKDQDKPLQLPADGTGEVTFQNVWFAYKADEYVLKNVSFTIKPGQTVALVGPTGSGKSTIIRLLCRLYEPTQGRILIDGVDIQLIAQEELRRRIGVILQEGFLFSGDINSNIALGEPFSEEEIQQAARAMNVDRFIRELPNGYKTQVRERGNNLSGGQKQLLAFARAAVRNPRILILDEATASLDVGTESLIQQDLGRLLEGRTCIMIAHRLSTIRDVDRILVLRKGELIEDGSHEQLLAQHGLYESLYKLQALAS

SEQ ID NO: 7429 - DNA, 1785 bp, Photorhabdus luminescens subsp. laumondii TTO1
  CDS (1)..(1785): transl_table=11
atgactaaagttcgtcaattgtggccgtctctgaagcgtctgttggtttatggaaaaaattatcgtaagccgttggggctggctgtactcatgttatggggggctgcaattgcggaagtcagtggtccggttctcattagttattttatcgataatatggttgcaacgggtaatatgcctactagagtggttatcgggctagctataacttttattgttctgcaactgattacggcggcgttacactattttcaggctttattgttcaatcaagtgtcagttgatgtggttcagcagcttcgtactgatgtgatgaatgcagcattgcgccagcctctgagtgcttttgataatcaaccggtagggcagttgatttcccgtgtaacgaatgacaccgaagtcattaaagatctttatgttaatgtagttccatcggtatttcgcagcatggcattgattggtacgatgctgattgctatgtttatgttggaatggcgtatggcattgattgcaattcttatttttcctgtcgtattgattgttatggcaatatatcagcattttagtacacccattgtccgccgggtacgtagttatttggctgatattaatgatgagtttaatgaagtcattaatggaatgagtgttattcagcagttccggcagcaggcgcgttttggtgaacgtatgttgttaaccaatcgggcccattatcaggcgagaatgcaagcgttgagattagatgggcttttgttacgcccattattgagtttgctatctgctatggtactgtgcggtcttatcgtgttgtttggaattagtgggccaggggcgattggtatcggggtattgtatgcttttattaattatttggggcggttgaatgaacctcttattgagctgacatctcagcaatcgattttgcaacaagctgtcgtttctggcgagagaatatttgaattaatggatagccctcaacaaggttatggtatggatggtcagccactatccagtggtcgaattgatatagaaaatgtcagtttttcctaccggcatggaaaaatagttttgcaagatattaacttacaggttccggctcatggttttgttgctttggttggtcatactggtagtggtaaaagtacgctggcaaatttgctgatgggatattacccgtggcagaaaggggaaatttatctcgatggcaggcctgtatcatctctgtctcattcggtattacgcaatggtgtggcaatagttcagcaggacccggttgttcttgcggactctttctttgacaatattacgcttggtcggaatatttcagaagagaaggtttggcaagtactggaaacggttcaattagctgagttagtacgtacattgcctgatggacttcatactatcttgggagagcagggtaatacgttgtcagccggtcaaaaacaattgcttgctatggcgagagtgttagtgcaaacgccacaaattttgatccttgatgaagcgactgcaaatattgattctggtacggaacaggcggtacaacaggctttgagattgattcgtcaacaaacaacattgatcgtgattgctcatcgtctgtctaccattgtggaggctgatactattctggtgctgcatcgtggtgcagttgttgaacagggatgccatcaacaattatttgtgagtcgtggacgttattatcagatgtatcagttgcaacaagtaggtgagacattaaatgaatgtggcacaatctctgagaaagaggtgttaatttaa

SEQ ID NO: 7430 - protein, 594 aa, Photorhabdus luminescens subsp. laumondii TTO1
MTKVRQLWPSLKRLLVYGKNYRKPLGLAVLMLWGAAIAEVSGPVLISYFIDNMVATGNMPTRVVIGLAITFIVLQLITAALHYFQALLFNQVSVDVVQQLRTDVMNAALRQPLSAFDNQPVGQLISRVTNDTEVIKDLYVNVVPSVFRSMALIGTMLIAMFMLEWRMALIAILIFPVVLIVMAIYQHFSTPIVRRVRSYLADINDEFNEVINGMSVIQQFRQQARFGERMLLTNRAHYQARMQALRLDGLLLRPLLSLLSAMVLCGLIVLFGISGPGAIGIGVLYAFINYLGRLNEPLIELTSQQSILQQAVVSGERIFELMDSPQQGYGMDGQPLSSGRIDIENVSFSYRHGKIVLQDINLQVPAHGFVALVGHTGSGKSTLANLLMGYYPWQKGEIYLDGRPVSSLSHSVLRNGVAIVQQDPVVLADSFFDNITLGRNISEEKVWQVLETVQLAELVRTLPDGLHTILGEQGNTLSAGQKQLLAMARVLVQTPQILILDEATANIDSGTEQAVQQALRLIRQQTTLIVIAHRLSTIVEADTILVLHRGAVVEQGCHQQLFVSRGRYYQMYQLQQVGETLNECGTISEKEVLI

SEQ ID NO: 7431 - DNA, 1776 bp, Vibrio vulnificus YJ016
  CDS (1)..(1776): transl_table=11
atgaaaaagaccacgttgaaacgtttatttgcttatccattggcgcagccaaaacccatgatgacgggtttagtctttttgttgattgcggccgtcagcaatgcgggtggcccttggctcatccaacactttattgacgagcacattaccaaagacgattacactcaacagacacttatcttacttgctagtggctatattggcctgctgctttgctcagctttatttcaatatcttcaaggtttgcaatttaacattgtcgcgacaggcatcattaaaaccattcgcaagcaggcttttaatcatgtgatcaagcaacctttgtcggctttcgattacacccctactggcaaactggtctcaagactcaccaacgacacggaatctctgcagcagttctacgagctgttgatcgcctccgtggtgaagaacctagtgatgatcttagtgatgctgggcgttatgctgattttgagctggcagctaacgttggtggtcttggttttgctgcccgttgtggttggttttatggtgctatttcaaaagctcagcacccatgcataccgagtgatgcgtgacttgcttaccgacatcaatggcaatatgagcgaatcgatccaaggaatgagcgtgatccaactgatgcgccaagaaaaacgcttcaacctgcagtttaatcaactgaccgagcagcatttcaatgcgggtcgtaaagtcatcaagctgaatggtattttacttcgacccttgatggatttattggcgggcatcgctttgctcaccctcgttgctattttcggtttcagtggtaccgagctcattggtgttggcgtactgtacgcgtttatcagctaccttggccgtattactgaaccgttaattgaaatgacgcaacagctagcgctactgcaacaagctttagtggccagcgaacgcatttttgaaatgatggatgctccagaacaaagctatggtcatgatcagcagccacttaaaagtggttctatcgccatagagcagctgagctttagctacgatggtaagcagcaggtattgaaacagatcgacattgacgtggaacaccagcaattcgtcgctttggtcggccacacgggtagcggaaaaagtaccctcgcgtcgctattgatgggcttttacccagtaagccaaggcaagctgaaactggatggtcgccctattgcctcattggcaaaatcggtgctgcgaaaagacgtggcgatggttcaacaagatccacatattctgccaacctcggtcagagaaaatattgccttgggaagagaagtctcagacgacatcatctggcaatctttagaacaagttggtttggctgagcagatcaaacgttaccctcaattgctggacacccaactgggccaaggagaaaccaacctctctgctggacaaaaacagttgttggccatggcccgagtgcttatcgctaagccgaaaattttaatcctcgacgaagcgacggcaaacatcgattcagggactgaggcgctgatacagcgcagtttgaatgccctacgccatgatatgacgctagtggtgattgcacaccgcctttccaccatcatggaggccgacaaaattgtggttttacaccacggagatttggttgaaatgggcagtcacaaacaactgcttgcccagcaagggcgctacgcacagatgtaccagttgcaacaagcaggccagcatatcaaggaaattgaacagcaggaggagcaagaactggaacaagccagctaa

SEQ ID NO: 7432 - protein, 591 aa, Vibrio vulnificus YJ016
MKKTTLKRLFAYPLAQPKPMMTGLVFLLIAAVSNAGGPWLIQHFIDEHITKDDYTQQTLILLASGYIGLLLCSALFQYLQGLQFNIVATGIIKTIRKQAFNHVIKQPLSAFDYTPTGKLVSRLTNDTESLQQFYELLIASVVKNLVMILVMLGVMLILSWQLTLVVLVLLPVVVGFMVLFQKLSTHAYRVMRDLLTDINGNMSESIQGMSVIQLMRQEKRFNLQFNQLTEQHFNAGRKVIKLNGILLRPLMDLLAGIALLTLVAIFGFSGTELIGVGVLYAFISYLGRITEPLIEMTQQLALLQQALVASERIFEMMDAPEQSYGHDQQPLKSGSIAIEQLSFSYDGKQQVLKQIDIDVEHQQFVALVGHTGSGKSTLASLLMGFYPVSQGKLKLDGRPIASLAKSVLRKDVAMVQQDPHILPTSVRENIALGREVSDDIIWQSLEQVGLAEQIKRYPQLLDTQLGQGETNLSAGQKQLLAMARVLIAKPKILILDEATANIDSGTEALIQRSLNALRHDMTLVVIAHRLSTIMEADKIVVLHHGDLVEMGSHKQLLAQQGRYAQMYQLQQAGQHIKEIEQQEEQELEQAS

SEQ ID NO: 7433 - DNA, 1956 bp, Rhodopseudomonas palustris CGA009
  CDS (1)..(1956): transl_table=11
atggctcacccacactcgcattcgagcagcggctctcctgtcgcgattccggaagacaagatcgcacagaaggcgacgctcggcggcaccctgatgcatctgtggccgtatatttggcccggcgaccggtccgatctgaagatgcgggtggtgtgggcgatcgtgctgctgatcgccgccaaggcggcgacgctgatcgttccgttcaccttcaaatgggcgaccgacgcgctgaccggcgctgataccgcaccgatcgagccgtcgaactggacgctgtggctgatcgcgtcaccgctggcgctgacggcgagctacggtttggttcgtgctttgatggcggtgctgacgcaatggcgtgacggcatcttcgccaaggtcgcgatgcacgcggtgcgcaagctggcgtaccgtaccttcgtgcacatgcacgatttgtcgctgcggtttcacctcgagcgcaagaccggcggtctgacccgcgtgctggagcgtggccggctcggcatcgaagtgatcgtgcggatggtgatcctgcagctggtgccgaccatcatcgagctgtcgctggtgatggcggtgctgctgtggcagttcgactggcgctacgtcgcggccgtgatggtcaccgtggtgttctacatgctgtacacctacaaggctaccgagtggcggatcggcatccgccgccgcatgaacgattccgacagcgacgccaatcagaaggcgatcgactcgctgctcaactacgagacggtgaagtatttcggcgccgaggagcgcgaggcgaagcgctacgacaagtcgatgcggcactatgaggacgccagcgtcgcgacctatacgtcgctggcggtcctcaacgccgggcaggcggtgatcttcaccttcggcctgaccgcgacgatgctgatgtgtgcctcgggcgtccgcaacggcaccaacaccgtcggcgacttcgtgatgatcaatgcgatgatgattcagctgtatcagccgctgaacttcatgggcatggtgtatcgcgagatcaagcaggcgatcatcgacatcgagaagatgttcgcggtgctgtcgcgcaagccggaggtcgaggatcgtgccggcgccaagccgctggcagtcgaagccggcaccgtgcggttcgaggacgtgaagttcgcttatgatccggcgcggccgatcctgaagggcctcaacttcgaggtcccggccggcaagacggtggcgatcgtcggcccgtcgggcgccggcaagtcgacgatctcgcggctgctgttccggctgtacgacgtctcgggcggccgcatcctgatcgatggtcaggacatccgcagcgtcacccagacctcgctgcgcgcggcgatcggcatggtgccgcaggacaccgtgctgttcaacgacaccatccgctacaacatccgctacggccgttgggacgccaccgatgccgaggtggaggaggccgccaagaccgcgcagatcgacgccttcatcaaggcgtcgccgaagggctacgacaccgaagtcggcgagcgcgggctgaagctctcgggcggcgagaagcagcgggtggcgattgcgcgaacggttctcaaggcgccgccgattctggtgctcgacgaagcgacctcggcgctcgacagccacaccgagcacgagatccagggcgcgctggagcgtgtggcacaaaaccgcacctcgctggtgatcgcgcaccggctttcgaccatcgtcggggccgatgagatcattgtgctcgatcaggggcggatcgccgaacgcggcacccattcgcaattattggcagcgggcgggctctacgccagcatgtggaacaggcagcgcgaggccgaagaggcgcgcgagcggctggcgctgatcggcgacgatgattcaccggttcgtaagccggaaatcgacgacgatctggcaacttcggcggcggcggagtaa

SEQ ID NO: 7434 - protein, 651 aa, Rhodopseudomonas palustris CGA009
MAHPHSHSSSGSPVAIPEDKIAQKATLGGTLMHLWPYIWPGDRSDLKMRVVWAIVLLIAAKAATLIVPFTFKWATDALTGADTAPIEPSNWTLWLIASPLALTASYGLVRALMAVLTQWRDGIFAKVAMHAVRKLAYRTFVHMHDLSLRFHLERKTGGLTRVLERGRLGIEVIVRMVILQLVPTIIELSLVMAVLLWQFDWRYVAAVMVTVVFYMLYTYKATEWRIGIRRRMNDSDSDANQKAIDSLLNYETVKYFGAEEREAKRYDKSMRHYEDASVATYTSLAVLNAGQAVIFTFGLTATMLMCASGVRNGTNTVGDFVMINAMMIQLYQPLNFMGMVYREIKQAIIDIEKMFAVLSRKPEVEDRAGAKPLAVEAGTVRFEDVKFAYDPARPILKGLNFEVPAGKTVAIVGPSGAGKSTISRLLFRLYDVSGGRILIDGQDIRSVTQTSLRAAIGMVPQDTVLFNDTIRYNIRYGRWDATDAEVEEAAKTAQIDAFIKASPKGYDTEVGERGLKLSGGEKQRVAIARTVLKAPPILVLDEATSALDSHTEHEIQGALERVAQNRTSLVIAHRLSTIVGADEIIVLDQGRIAERGTHSQLLAAGGLYASMWNRQREAEEARERLALIGDDDSPVRKPEIDDDLATSAAAE

SEQ ID NO: 7435 - DNA, 1683 bp, Lactobacillus johnsonii NCC 533
  CDS (1)..(1683): transl_table=11
atgggaattgcaatttttggagctttcttagtaagtgtaattaatatgcttttaccaaggggactacagtttttcttagataattatttgatcaaacaaaaagcaacggtacagattatagtttgggctggactattatatggacttggaacaattattaaggcaattcttcaatttgtatatcaatatttatatgcacttggcgctgaaaaaacacttgaaagtgtaagaaaagatttatatcgaaaacttcatagtttagggatgcgctattttgaccagaccccagcaggttcaattgtatcaagagtcactaatgatacgatgactctaagcgactttttaggagtactttgtcaagtagtcattggagtattttctttagtaactgcttttatagcgatgtatgtaaccaataaatttgcggcgttaattgtcttgctgtttttaccaattttaggttttattttctggatttatacacaaaagagttctagattgtatcgtgcttttagggaacggcttagtcgaattaatactaacttaaatgaatctattgaaggagtttctctaattcagcaatttaagcaggaaaaaagaatgacaaaccattttgaaaatgagaatggtactttaatgagaacacgttttaacttgatccgagttaactcgcttttgctctcgccaatgactagtttgctttattcattggctcttgcattagtgttaatgtattttggttttccattgcaagagacttttgttcctgccggaattgtatatgctttttctcaatatgtacaacaattttttaatcctatttctactatgatggatcgaatgacttcttttcaggatgggattgtggcaggtaaacgtatttttagaattatggatgaaaaagaatacgaaccgcgacaagaaaatgatgaaagagcagttatttcaaaaggaaagattgaatttaaaaatgtcagcttttcttatgatggaaagaatgaaatcttacatgatgtatcttttgtagttaatccgggtgaaactttaggaattgttggtcatactggatcaggaaagagttcaattatcaatgtaatgatgagattttatgaatttggtagtggggaagtacttattgatggcattgatattaggaagtttccaaagaaagaattacgtaaaaaactaggattagttttacaagaaccctttatgttctatggggacatttcttcaaatattcgcttgtataatgacaaaattacagatcaacaaattaaagatgctgctaaaaccgtacaagcagattcatttattgaaaagatgcctggtaaatatcatgcaaaagtgattgaaggtggatcagaacttagtcaaggacaacgacaattaatttcatttgcacgaaccttagtaactgatcctaaaattttagttctagatgaagcaacggctaatgtcgatacagaaaccgaaaatttaattcaagagggattaaagaagcttcgtcaaggaagaacgactttggcaattgcgcaccgtctttcaacaattgcagatgcggaccagattattgttttggataaaggaagaattgttgaacgtggtacacatgaggaactattgaagaagaaagggtattactacaatctttataagcttcaacaaaatagcgataaataa

SEQ ID NO: 7436 - protein, 560 aa, Lactobacillus johnsonii NCC 533
MGIAIFGAFLVSVINMLLPRGLQFFLDNYLIKQKATVQIIVWAGLLYGLGTIIKAILQFVYQYLYALGAEKTLESVRKDLYRKLHSLGMRYFDQTPAGSIVSRVTNDTMTLSDFLGVLCQVVIGVFSLVTAFIAMYVTNKFAALIVLLFLPILGFIFWIYTQKSSRLYRAFRERLSRINTNLNESIEGVSLIQQFKQEKRMTNHFENENGTLMRTRFNLIRVNSLLLSPMTSLLYSLALALVLMYFGFPLQETFVPAGIVYAFSQYVQQFFNPISTMMDRMTSFQDGIVAGKRIFRIMDEKEYEPRQENDERAVISKGKIEFKNVSFSYDGKNEILHDVSFVVNPGETLGIVGHTGSGKSSIINVMMRFYEFGSGEVLIDGIDIRKFPKKELRKKLGLVLQEPFMFYGDISSNIRLYNDKITDQQIKDAAKTVQADSFIEKMPGKYHAKVIEGGSELSQGQRQLISFARTLVTDPKILVLDEATANVDTETENLIQEGLKKLRQGRTTLAIAHRLSTIADADQIIVLDKGRIVERGTHEELLKKKGYYYNLYKLQQNSDK

SEQ ID NO: 7437 - DNA, 1704 bp, Bdellovibrio bacteriovorus HD100
  CDS (1)..(1704): transl_table=11
atggcgatctttgcggtcgccggcggcgccaccgtggcccgcctgattccactgttgattggacaggccatcgacaaaggtgtcgtgggtcgcgatctgtcgattttcaccaaagtggcttacgcgtacctggcacttgaaatcatgcgttcggtgttttctttcggaaatgcctttttattccagttgttcggaaaccgcatgctgtaccacctgcgcgaagatctgatgaaccacgtgcaaagactgccgatgcagttcttcaacaaaacacccaacgggcgcattgtcacgcgcctgaccaatgacgtgatgtccttgggcgaactgttttcagaaggtgtgatttcggtcttcaccaacgcggtgatcatcgtgtcggtggtgattgcgctcagcctgatttcctggaagctgaccgtggtgtcgctgtttctggcgccgttctttatctgggccacgttccacctttcaaataaaatccgtgcgatcctaagcgaacagaaaaagaagctctccacgatcaacgctttcctggctgaaaatctgaacggcatcaaagtgattcagctctacaatcgtgtcacccgcaatcgcgacaagttcagcaccctgtcggtggactatcgcgacaccaatatgcgctcgatcaaggcctatgccctgatgcagccggtgatgaatctgttcaacgccgtgaccatcacctcggctttgtatttcggtggttacttaagcgctgaaaactcgatcgccattggttccttggtggccttcctgatgaacatccaggacttcatcccgccattgcgagagattttagagaaataccagcagttccaaaactccctgaccagcgccgaacgtattttcacgctgatggatgaaccgaaagagcacgaactggccgccctgaccagcccgggatctttgcggggggaactggaaatcaagaatctgaacttccagtacgaaagccatctgccgctggttttgaaaaacatcaacctgcacattaaagccggagaatccgtggctttggtggggcgtaccggcagcggcaagtccacgttcatctcgctgttgcagcgattctatgatgccccggagcagacggtctttgtcgatggtcttgccctggaaagcatcccgcgcgaggaaatccgccaccacgtcggcgtggttcagcaggataacttcatcttccgcggcaacatccgcgacaatattggcctgggcgacccgcgcatcacagaagaacaaatccgcatggcctgtgaaaaaaccggctatatggctctattgacccgcacaggccgcgatctgctaagcccggtggcagaacgcggagccaacttgtcggtcggcgaacgccagctgatcgcctttgcgcgcattctggccttcaatccggatattttaattctggatgaagccaccgccaacattgactctgaaagtgaacacatcattcaggatgcgaccaaagagatcaccaaaggccgtacaagcatcatcattgcccaccgtctttcaacgattgaacagtgcgatcgcattattgttctgaatcagggggaagtggccgagatgggctcgcacgaagaacttatgcaagcccagggcatgtattatcagttcgcgtctttaggtttgaaatccaccttgatcgacgcatccgcagcgggcaccgcagttccatag

SEQ ID NO: 7438 - protein, 567 aa, Bdellovibrio bacteriovorus HD100
MAIFAVAGGATVARLIPLLIGQAIDKGVVGRDLSIFTKVAYAYLALEIMRSVFSFGNAFLFQLFGNRMLYHLREDLMNHVQRLPMQFFNKTPNGRIVTRLTNDVMSLGELFSEGVISVFTNAVIIVSVVIALSLISWKLTVVSLFLAPFFIWATFHLSNKIRAILSEQKKKLSTINAFLAENLNGIKVIQLYNRVTRNRDKFSTLSVDYRDTNMRSIKAYALMQPVMNLFNAVTITSALYFGGYLSAENSIAIGSLVAFLMNIQDFIPPLREILEKYQQFQNSLTSAERIFTLMDEPKEHELAALTSPGSLRGELEIKNLNFQYESHLPLVLKNINLHIKAGESVALVGRTGSGKSTFISLLQRFYDAPEQTVFVDGLALESIPREEIRHHVGVVQQDNFIFRGNIRDNIGLGDPRITEEQIRMACEKTGYMALLTRTGRDLLSPVAERGANLSVGERQLIAFARILAFNPDILILDEATANIDSESEHIIQDATKEITKGRTSIIIAHRLSTIEQCDRIIVLNQGEVAEMGSHEELMQAQGMYYQFASLGLKSTLIDASAAGTAVP

SEQ ID NO: 7439 - DNA, 1764 bp, Bacillus cereus ATCC 10987
  CDS (1)..(1764): transl_table=11
atggctgagaaaaaacagagcgatttaagaagattactgtcttatatgaggccatataaaggactgttagcattagcatttttatttctagttggtgcaactgtaacagaaatgatgggtccttttttaattaaacaatttcttgatgaacacttagtaccacgtaactttgatcaatcagcacttgttactttatttgtagtgtatattgttgctcacttattaaaagtattatttacttatttagacttgttatattttcaaaatattgcttttaaaattgttcaagatatgcgtgttgaagtatatgagcatgttcaaaagttgtcattaagtttctttgatcgtacgccgattggtacgctcgtatcgcgcataacgaatgatacagaagcaattaaagatttttatgtcagtgtattatcaacatttgttaaaaatatcgtatttttagcagggattttagtagcgatgtttttattaaatgtaaaattagcgctattttctctcgtattaattccgatcatgtttgcgattatggtgctatatcgccggaaaagtgcagctttttatttagaagtccgtaatcaattaagtgtgttaaatgcaaagttaaacgagtccattcaagggatgaatattgttcaagtgttcagacaagaaaagcgcatgagaaaagaatttgaagaagtgaataataaacattatagtgcagggcgacgtacattaaagttagatgcattgcttttacgtccagcaactgatttagttcatattgtagctattgcgttagtacttggtttatttggaattgatgctttgaagagtcctgttgaagtaggcgttttatatgcgtttgttaactatatacatcgttttttccagcctgtaaatgagatgatgatgaaattatcatttttccaacaggcactggtttcatcatcacgtgtatttcatttaatggatgagaaagatttagcgccagttcaaaaaggggatggaaatcctcaagttattaatggagatattgaatttaaaaatgttactttttcgtacgatggaaaacgtgatgttttaaaaaatgtatcttttcacgtgaaacaagggcaaacggttgctttcgttgggcacactggcagcggaaagagtactattatgaatttattactgagattctataatattaattccggaaatattgtaatagatggtgtagagttagagaaatttgaagaacaagaaattagaaagaaaataggacttgtattgcaagatgcatttttatttgcgggaaatgtaaaacaaaatattcgtatgtataatgaagaaattacggatgaagaagtaaaagaagcggcacaatttgtgcaagcgaatacgtttattgaaaaattaccagagcagtatgaaacggaagtagtagaaagaggagctgcattttctagtggtcaacgacaattaattgctttcgctagaacgatagcaacgaatccgaaagtgttagtattagatgaagcaacagcaaatattgatacagaaactgaagatgcaatccaaacagcgttacagcaaatgcgaaaaggacggactacgatagcgattgcgcacagattatctaccatacaagatgcagatcaaatttttgttatgcacgatggagagatagtagaaagagggacgcatcaagaattactgagtgaacaaggattgtattataatatgtatttactacaaaataaaggaagtttacaaaaggccttgtaa

SEQ ID NO: 7440 - protein, 587 aa, Bacillus cereus ATCC 10987
MAEKKQSDLRRLLSYMRPYKGLLALAFLFLVGATVTEMMGPFLIKQFLDEHLVPRNFDQSALVTLFVVYIVAHLLKVLFTYLDLLYFQNIAFKIVQDMRVEVYEHVQKLSLSFFDRTPIGTLVSRITNDTEAIKDFYVSVLSTFVKNIVFLAGILVAMFLLNVKLALFSLVLIPIMFAIMVLYRRKSAAFYLEVRNQLSVLNAKLNESIQGMNIVQVFRQEKRMRKEFEEVNNKHYSAGRRTLKLDALLLRPATDLVHIVAIALVLGLFGIDALKSPVEVGVLYAFVNYIHRFFQPVNEMMMKLSFFQQALVSSSRVFHLMDEKDLAPVQKGDGNPQVINGDIEFKNVTFSYDGKRDVLKNVSFHVKQGQTVAFVGHTGSGKSTIMNLLLRFYNINSGNIVIDGVELEKFEEQEIRKKIGLVLQDAFLFAGNVKQNIRMYNEEITDEEVKEAAQFVQANTFIEKLPEQYETEVVERGAAFSSGQRQLIAFARTIATNPKVLVLDEATANIDTETEDAIQTALQQMRKGRTTIAIAHRLSTIQDADQIFVMHDGEIVERGTHQELLSEQGLYYNMYLLQNKGSLQKAL

SEQ ID NO: 7441 - DNA, 1851 bp, Yersinia pestis biovar Microtus str. 91001
  CDS (1)..(1851): transl_table=11
atgacggtgagcaggaggtcgaagccgatgaataacgttcagcaactttggccgacattgaaacgcctgctttcctacggttcgccttatcgtaaaccgctggggctggcagtcttaatgctgtgggttgcggcggcagcagaggtaagtggtccactactgatcagttattttattgaccatgtagtcgccaaaggcacattacctctggggctagtcagtgggttggcattggcctatctgttgttgcaattattggccgcgacattgcactattttcaggcattgctgtttaaccgtgcggcagtgggggtcgttcagcggctacgcattgatgtgatggacgctgcattacgtcaacctctcagtgcttttgatactcagcctgttgggcagttaatttcccgagtaaccaatgacaccgaagtgatcaaagatttatatgtcatggtggtttctacggttttgaaaagtgcggccttaattagtgcgatgctggtggcaatgtttagtctggattggcggatggcgctgatttcaatttgtatcttccctgcggtgttggtggtgatgacaatctatcagcgctatagcacccctatcgttcgccgggtacgatcctatctggctgatattaacgatggttttaatgaagtcattaatggtatgggcgtcattcagcaattccgtcagcaggcccgtttcggagaacgcatggcgtctgccagccgtgcgcattatgttgcccggatgcaaaccttacggctggagggctttctattacgccctttattgagcctattctctgccttggtgctatgtggtctactgctgcttttcggtttcagccctgaaggttctgtgggggtaggtgtgctgtatgcgttcattaattaccttggccgcctgaatgagccgttgattgaactgacatcgcagcaatcaattatgcaacaggccgtagtggcaggagagcgtatttttgatctgatggatcgtgcgcagcagggctatggtagcgacaatattcccttgagcagtggccgtattcaggtggaaaacgtcagctttgcgtatcgctcggataaaatggtgttacacaatatttctctcaatgtcccctcccgtggattcgtggctttagttgggcacaccggcagtggtaaaagtacgctagctaacctgttgatgggctactatcccgttcagcaaggtgagattttgcttgatggccggccattatcccgcctctcccatcaggttctgcgccagggggtagcgttggtacagcaagatcccgtggtgttggctgactccttctttgcgaatatcacccttgggcgtgaccttagtgaacagcaagtgtgggaggcactcgaaaccgttcaattggcaccgttggttcgtaccttacctgatggcttgtacagtttacttggggaacagggcaataccttgtctgttgggcaaaaacagttgctggcgatggcgcgggtgttggtgcaagcgccccaaatcctgattctggatgaagccactgcgaatattgactctggcactgaacaggctattcagcgggcattacaggtgattcgaaaaaataccacgctggtggttattgctcatcgcctttcgacgattgtggaggcggatagtattttggtactgcaccgtggtgttgcggttgagcagggtaatcatcaagcgctgctagctgcccgtgggcgttattaccagatgtaccagttgcagttagtcagcgaagatttggctgccattgatcaggaagctattgataaaggctctattgatcaaagtactattgatcaagccggaatgagcgtgagttaa

SEQ ID NO: 7442 - protein, 616 aa, Yersinia pestis biovar Microtus str. 91001
MTVSRRSKPMNNVQQLWPTLKRLLSYGSPYRKPLGLAVLMLWVAAAAEVSGPLLISYFIDHVVAKGTLPLGLVSGLALAYLLLQLLAATLHYFQALLFNRAAVGVVQRLRIDVMDAALRQPLSAFDTQPVGQLISRVTNDTEVIKDLYVMVVSTVLKSAALISAMLVAMFSLDWRMALISICIFPAVLVVMTIYQRYSTPIVRRVRSYLADINDGFNEVINGMGVIQQFRQQARFGERMASASRAHYVARMQTLRLEGFLLRPLLSLFSALVLCGLLLLFGFSPEGSVGVGVLYAFINYLGRLNEPLIELTSQQSIMQQAVVAGERIFDLMDRAQQGYGSDNIPLSSGRIQVENVSFAYRSDKMVLHNISLNVPSRGFVALVGHTGSGKSTLANLLMGYYPVQQGEILLDGRPLSRLSHQVLRQGVALVQQDPVVLADSFFANITLGRDLSEQQVWEALETVQLAPLVRTLPDGLYSLLGEQGNTLSVGQKQLLAMARVLVQAPQILILDEATANIDSGTEQAIQRALQVIRKNTTLVVIAHRLSTIVEADSILVLHRGVAVEQGNHQALLAARGRYYQMYQLQLVSEDLAAIDQEAIDKGSIDQSTIDQAGMSVS

SEQ ID NO: 7443 - DNA, 1920 bp, Nasonia vitripennis
  CDS (1)..(1920)
atgacgctgctctgcaatgtgtccaagagatgctacgttcaggcatatatcatccagacctcacaactgtctcggaagaagcttctgaacctcaagcatctcaagaggttctccacagacagcatcaagacaaaactaggagaacctgtcaaacaggtcaacaacattcggagaaccaagaacaatgagctgcgcaggctgttcttgttggctgcgccagaaaagtggcgcctaataggtgctattgcctttttaattatatcctccacggttaccatggctgtgccattctgtcttggcaaaattattgacattctttatacaaatgatcagaataagaccaaggagaatctcaacaaggtctgctttgttctgcttggaattttcatatttggtggaatgtgtaattttgcaaggatttacctcatgtctaccactggacacaagatcacgcagtctctcaggaagaaggcctatgctgctatattgagtcaggagactgcaatgtttgataaagtcagcactggagaacttgttggaagactatctggagatgcccagttggtcagttcagcaattacgagtaacatttcagatggactaaggtcaggcataatgacaacagcaggaatttccatgatgttctatgtctctccacaattagcccttgttggcttagcaatagttcctccagtagctgcaatgggaatcctgtatggcagatttgtcaaaaagatctcaaaagatgtacaaaatagtttggctgtgttaaatacaacagctgaagagaaaattagtaatattaggactgttaaagcttttgcacaagagctcaatgaaattgaaaattatcgtacaaagttacaagacttactgcaactctgttacaaagaaagcttctacagaggaatattttttggcatgactgggctgtctggtaatgctataatattgtcggttctttattatggaggagttatgctctccgattcaacaatcactgttggaaacctaagttcatttttgttatatgctgcatatgtgggcatttccatgggtggattgtcgagtttttattctgaattgaacaaatctcttggtgccagtactagattatttgagttgattgaccgcaagcctgcaatacccattcatggtggaaaaattttagaaaaagaattgacaggagacattgtctttaaggatgttagttttacttatcccactagaactgaatcaatgattttgaaggatttcaacctgcatattccaaagaattcagtcactgctgttgttggtccatcagggtctggaaagtctactctggcttctttactactgcgattgtacgaccctgtatcaggttctgttttattggatggatataacttaagggaattggatccttgttgggtgaaacaacaaattggttttgtgtcccaagagcctatactgtttaatggaacagtgagagaaaatataacttatggaagcaaaggtgctgcagatgaagaagtaagagaagctgctaagcaagctaatgtattagaatttatagagagaatgtccgatggacttgacacttatgtcggagaaagaggaattactttgagtggaggccagcgccaaagagttgctattgcaagagctctcatcaagaacccgaagatcctgattctggacgaggcgacaagcgccctcgactcggagtcggagagtctggtccaacaagccctggagcgagccacccttggtcgaaccgttctgacgatagcccatcggctcagcacgattcgcaatgccgacaagatagccgtgctggacggcggctcggtacgcgagagcggcagctacgacgatctcatggctctgccaaacggcctcttcaggaaactcgttcagcaccaaacgttcggctga

SEQ ID NO: 7444 - protein, 639 aa, Nasonia vitripennis
MTLLCNVSKRCYVQAYIIQTSQLSRKKLLNLKHLKRFSTDSIKTKLGEPVKQVNNIRRTKNNELRRLFLLAAPEKWRLIGAIAFLIISSTVTMAVPFCLGKIIDILYTNDQNKTKENLNKVCFVLLGIFIFGGMCNFARIYLMSTTGHKITQSLRKKAYAAILSQETAMFDKVSTGELVGRLSGDAQLVSSAITSNISDGLRSGIMTTAGISMMFYVSPQLALVGLAIVPPVAAMGILYGRFVKKISKDVQNSLAVLNTTAEEKISNIRTVKAFAQELNEIENYRTKLQDLLQLCYKESFYRGIFFGMTGLSGNAIILSVLYYGGVMLSDSTITVGNLSSFLLYAAYVGISMGGLSSFYSELNKSLGASTRLFELIDRKPAIPIHGGKILEKELTGDIVFKDVSFTYPTRTESMILKDFNLHIPKNSVTAVVGPSGSGKSTLASLLLRLYDPVSGSVLLDGYNLRELDPCWVKQQIGFVSQEPILFNGTVRENITYGSKGAADEEVREAAKQANVLEFIERMSDGLDTYVGERGITLSGGQRQRVAIARALIKNPKILILDEATSALDSESESLVQQALERATLGRTVLTIAHRLSTIRNADKIAVLDGGSVRESGSYDDLMALPNGLFRKLVQHQTFG

SEQ ID NO: 7445 - DNA, 2640 bp, Gibberella zeae PH-1
  CDS (1)..(2640)
atgaaggaggcaggatattatgagcctacccggaacatcaaaaccccggcaaccttgacatcacctcacaacaccgaaactatccttcatacatcatcactgcttccagtcatggccaaggaagaacttgggttgaagataggcttctatgcctatccgtgcgccctattcgtcacgcttctgggtgttcaatccgcccagttctacctcgctcgtcatggcgatccgaaaacgcgtcagaacgcgttggacaatgatctcaagacaaagattgagaaactccaacggttctacgcaaggttaatatggggctttcaacttattctttcaggattgattactgcgagtatcgttcttgctacaaaggaggtttttgcggatcagaaaaatattgaagggaaaatactgttctcattcagcgcttacttggcatcatttgttggcgttttactttatttccttgccggtctcctccccgatcccgaaggtccatggaatccgaatagctctcatctcgcagcatggtgtgttgctgcgcttgcagaaatcgtcatcgcagcagtcttgtctgtggttgagccccaacttcgtgtctcgcccaattttgtcgataccatcaacattctcggctcggcgagagtctttgttcttgctctcatgatcggctcgtttactttgagagagtataagatgaaatccctcgaaccaaaatccttgcccgaagaacgccagggtttgttggagaatggcaatggcaacggttatggaagcgttccaccctccgcagctgaaccaagacgtacacaggtttcgggaacaggctggctcgattatttcgctggtttcaaagtcctatttccttacctctggcccaaggattcacctctctaccaagccatcgtccttgtctgcatcctcctcctgatcggccaacgtaccgtcaacgttctcggtccgctccaactcggtgtacttgtcgacaaccttggcgaaggaaaactgccttacaaggagatcatcctttacgtcgtctaccgggcccttcaaggcaaccaaggtgctctcggagcagcgcgttccgtcctctggatcccagtatcacaatctctgttccgacgactatcttctgctgcatttgagcacgttctcggtctatccctagaattccatctcaacaaaaaggttggcgaggtcaccagtgcgctaagcagaggcgcttctataaacaccttcctcgagagtttctgtttccaggttttccccatggttttcgacatctttgttgccggcgtggtgttcttttacaagtatgatcctttttatctcattatagtgttcttcatcatgtggtcctatatcttccttactatatacgtggccaagtaccgtggtaagcagaggagagacatggccgtcaagacacgagagatggaggctgtcaagacggatgccattgtggcgtatgagacggtccagcacaattgtgctgtcgttcgtgagactgggaggttcagagaacatgtcactatcttccaacgcgctgagcgacttgtgcagtggtctctggcggctctcaaccttacccagagctccatcttttctctgggcacagccctcctcgttgctgtctcggcatacaagatttctatcggagaacagactgttggagagttcgtgagtctcatcaactactttgttcagcttcagggacccttgaacttcttcggcacatactacaccatgctgcagaacaacctcattgaagcagagcgacttctcgacctgttcaaagaaactgctggcgtagtcgaaaagccagatgccatcgttcttcctcccatcaggggcgaagttgccttcaacgacgtcaaattcgcttaccagactaaaaagggcggtcttgtcctcgacggcattaactttaccgttgcacccggcacaaagacagccatcgtcggcgagtctggcagtggaaagtccacctcgctcaagcttctcttccgcttctacgacgtgacagacggttctattaccattgatggccatgatctgagggatgtcaagctcgacagcgtacgcagaaacatcggtgtcgtgccgcaggataccgtgctgttcaacgcgaccatcatgtacaatctgctgtatgcgagacctgatgcaacagaggaagatgtgtttgaggcatgcaaggctgcgaacatccatgagaggatcttgaacttccctgatgggtacgagaccaaggttggagagcgaggtctaaagttgtctggaggtgaacgacagcgaattgctatcgcacgtgctattcttaaagatgcgcgaatccttcttcttgatgaagccactgcttctctagactctcacactgagcgacagattcaggatgctcttgagcgcgtaacagccggacgtacaaccatcaccatcgcacatcgattatccacaatcacaacttcagatcaaatcatcgtccttcacaagggcgagattgtagaacgcggcacacacaacgagctcttggcctctaagggaagatatcatgccatgtgggagaagcagacgacgattgagaagaaggaaaaggagaagaaggaacttgagggggaggcatctgagactgcatctcaagaatga

SEQ ID NO: 7446 - protein, 879 aa, Gibberella zeae PH-1
MKEAGYYEPTRNIKTPATLTSPHNTETILHTSSLLPVMAKEELGLKIGFYAYPCALFVTLLGVQSAQFYLARHGDPKTRQNALDNDLKTKIEKLQRFYARLIWGFQLILSGLITASIVLATKEVFADQKNIEGKILFSFSAYLASFVGVLLYFLAGLLPDPEGPWNPNSSHLAAWCVAALAEIVIAAVLSVVEPQLRVSPNFVDTINILGSARVFVLALMIGSFTLREYKMKSLEPKSLPEERQGLLENGNGNGYGSVPPSAAEPRRTQVSGTGWLDYFAGFKVLFPYLWPKDSPLYQAIVLVCILLLIGQRTVNVLGPLQLGVLVDNLGEGKLPYKEIILYVVYRALQGNQGALGAARSVLWIPVSQSLFRRLSSAAFEHVLGLSLEFHLNKKVGEVTSALSRGASINTFLESFCFQVFPMVFDIFVAGVVFFYKYDPFYLIIVFFIMWSYIFLTIYVAKYRGKQRRDMAVKTREMEAVKTDAIVAYETVQHNCAVVRETGRFREHVTIFQRAERLVQWSLAALNLTQSSIFSLGTALLVAVSAYKISIGEQTVGEFVSLINYFVQLQGPLNFFGTYYTMLQNNLIEAERLLDLFKETAGVVEKPDAIVLPPIRGEVAFNDVKFAYQTKKGGLVLDGINFTVAPGTKTAIVGESGSGKSTSLKLLFRFYDVTDGSITIDGHDLRDVKLDSVRRNIGVVPQDTVLFNATIMYNLLYARPDATEEDVFEACKAANIHERILNFPDGYETKVGERGLKLSGGERQRIAIARAILKDARILLLDEATASLDSHTERQIQDALERVTAGRTTITIAHRLSTITTSDQIIVLHKGEIVERGTHNELLASKGRYHAMWEKQTTIEKKEKEKKELEGEASETASQE

SEQ ID NO: 7447 - DNA, 4089 bp, Gibberella zeae PH-1
  CDS (1)..(4089)
atgataaatccccagcatcaccagcttattccgacaacatgtatcagcgtctttaaggcgtatggcaagacttcctcgctctatgatcctctaaacgttttccacattctcattcaaaccatactgtctcccaggccctattctcttctccagtggggatgttcgatccttcgcgtctctagctcgctgaccttatccccattagaggtgccaagccaagaccagggaacactcacggcttgcgccgccggtgctccgttccctctgatgggcatcatctttggtcaactcgtcaacgacctcaatactgcatcttgcgataatagtgaagtcgcgtcccagtactcgccaaaagaactccaagacagcatcaacaagaaagttgtcatgatcacatggattggcgtaatcagttttgcgcttatctacacgtacatcgtgtcttggtccatcttcagtcgccgtctcgagaaccgcattcgcgatcgctacttcatgagccttctgttgcaggatgcaaccttctttgacaagaggcaggctggagagattacttctcgccttaataccgatattcaggcaatccagtctggtacttccgagaaggtcggtattatcatgggatgtacatcattcttcgtctcgtcgtatgtcgttgcatttgtcaagaatgtcacactcgcaggtattcttgtatcacttgtgcctgctttcatgctgcttgcaatcgtgggaagcatgtttactgcaaagtttgcgacggctatgtctgaaaagatcgcatctgcctcttcaatcgcctcggaagctcttgcaaacattcccgttgtacaggcctttggcgcaggtcctcgactagaggccatctttgccgaaaggatgaagggagcaagaaagcaaggaatcaacaaggcctttgttgctgctgtccaggctggattgctttactttatcgcctactcagcaaatgctcttgctttctggcagggcagtgggcagattgctgatatggttgagggtaatagcgacacatctgtgggtgatatttatactgttattctcttgctagttgatgcttgcgtcgtcctcggcggtattgctcctttgctgccgcttgttggggctgctgttggatcttttgaaaaacttcgcgaagatatggacagcccagctactatcgacacaggatccagcaacggagagaagatcgcatcagtagaaggcactgtgtcttttagaaacgtctcttttgcttatgtctcccgacctcaccacaccgtactgaaaaacgtctccttcgaatgtcctgctggcaagcacactgcccttgttggtctttctggcagtggtaagtctaccgttgctggactcacatctcgaatctatgatcccaccgaaggtacagttcttctcgatggacatgatgtaaaggaccttaacgtcaagggcctgagaagtcatatgagtcttgtacaacaagagccctctcttctagaccggtcaatcgttgagaacattgcccttggcatcttgaactccgctcaacctgaacacgagagattcaaagctacaatcctaggcactggccttgctgagcttgccgctaaactccgtgagggcgatagtttggtgacggcagcgcaaagtttcggtcaggaaatggttgatctgattgatcgtgttcaggaggctgcccgacttgccgatgcatctgatttcgttgatagactcgagtacggttacggaacactggttggtactggcggaaagctagtaagtggaggtcaacgacagcgacttgcgcttgctcgagccttggttcgtgatcccaagatcctcatacttgatgaggccaccgcttcccttgactcagcaagtgagcaccgcatccagatggccatcgaatccattgccaagaatcgtactgtcattgcaatcgcccaccgtctatccaccatcaagaatgctgataacatcatcgttatgaacaatggcgagatcatagagcaaggaaatcacctcgagctgatggctttgaacggctcatatgccagtatggtacgcttgcagacagttgactcagaggatgctggatctaccacaagcactgtccacaccgatggtgtcttgtccgagaaagactctctcgtagacatcaaggtcaggggtacagaaaaggaagaagcagatgtgtccaaggaggaggaagctaaagagaaagaggtatctcccgaggcagacgctgctcttgactcgactaaatctgcgtgggtcgtcacaaagaccattggcggcatggtacgaccctatctcctcctcatcgttgtctgcctttttgcagctactattgttgggctcaccttctcttcgtctggtctgattttcggctatactatcgacaacctgagtccctgcaaccctgttgaagatatccggtgggcaggcaagttctttggaggcatgtggtttctgattgcttgcgtcgagctgttggccaataccacaagctggaccggtttcggcatggttgcagagaagttgctgtacaagattcgagttctctgtttccgctctctgtatgaacaggaccttgactggcatcagtcggaaggccgtactccaactgcactcctgtctgtcattacttcggatgctgcagcagttggagggttcagcggctctattattggtaccatcttctctatcgtggtcaatttcttggttgccatcatcctttcacacattcttgcttggaaaattgcgattgtatgcttagtcattgtgcctatccttctgggttgtggcattatgcaacttcgatcgctgtccaagtttgagcgtcgtcacgctggggctttctccggtgccgttggcatcgctaacgaggctgtcaattcattcaagaccatctcttcattgtctattgaagaagaagtcatgagctcctaccgccgtgctctcagggcgccccagaaggagataactctagcttcgatgtacgccaacttgtggctttccctggccaacagcactggaaacctgatatatgcctttgcgtattggtgggggtcaacacggattactgcaggcgaggctagccagagagagttctttataattctcatttgcatgcttgtcagcgcacagctttggggccaaatgttcagtcttgcgcctgaagtgtctcgagccagagctgccgcttcgcgtattctgagtctgattaatctaggatcttccaaagagaaggccaagaaaggcaagcttgcactggctctcgagagtactaaaagagatgtcgaagcttgtgctgaagcttctgcaaagagcagcggcggcaagggggcaaccatcgttttcaaagatgtcaaattctcatacccggctcgacctcatattcagatcttgacaggcatgtcgttcaccatctctgctggtcagttcgttggtcttgtaggaccttccggtgctggcaagtcgaccatcatgtcgttggtccaacgcatgtaccggccaacaggcggaactgttgagattgatggtgttgatatttgcgcacgtgaaggaaatgagttccgcaacgatatagcagttgtccctcaagactgtgctctctttgacgggacaatccggttcaatgtttcgctaggttcaactcctgatcacgagcccacagacgatgagatccatgaagcttgcaagctagccaatatccacaacgttattatggagttgcctgaagcttatgataccgaatgcgggcctaacggctcgcggctctctggcggtcagcgtcaacggctagcgattgcgcgtgcccttgtgcgtaagcctaagctgctgttgcttgacgaaagcacgagcgcgctagacgccgagagtgaacgagctctgcaagaggggctagaacgtgtagcacgcggtattactgtgattgccatcactcataggcttcacacggtgcgcaaggcggatgtcatctttataattgaagggggtaaggtggtagaaaagggtcggcatgaggaactggtagaaaggagcgagacatatcgtacaaatgccctgcagcagatgctgggaaactaa

SEQ ID NO: 7448 - protein, 1362 aa, Gibberella zeae PH-1
MINPQHHQLIPTTCISVFKAYGKTSSLYDPLNVFHILIQTILSPRPYSLLQWGCSILRVSSSLTLSPLEVPSQDQGTLTACAAGAPFPLMGIIFGQLVNDLNTASCDNSEVASQYSPKELQDSINKKVVMITWIGVISFALIYTYIVSWSIFSRRLENRIRDRYFMSLLLQDATFFDKRQAGEITSRLNTDIQAIQSGTSEKVGIIMGCTSFFVSSYVVAFVKNVTLAGILVSLVPAFMLLAIVGSMFTAKFATAMSEKIASASSIASEALANIPVVQAFGAGPRLEAIFAERMKGARKQGINKAFVAAVQAGLLYFIAYSANALAFWQGSGQIADMVEGNSDTSVGDIYTVILLLVDACVVLGGIAPLLPLVGAAVGSFEKLREDMDSPATIDTGSSNGEKIASVEGTVSFRNVSFAYVSRPHHTVLKNVSFECPAGKHTALVGLSGSGKSTVAGLTSRIYDPTEGTVLLDGHDVKDLNVKGLRSHMSLVQQEPSLLDRSIVENIALGILNSAQPEHERFKATILGTGLAELAAKLREGDSLVTAAQSFGQEMVDLIDRVQEAARLADASDFVDRLEYGYGTLVGTGGKLVSGGQRQRLALARALVRDPKILILDEATASLDSASEHRIQMAIESIAKNRTVIAIAHRLSTIKNADNIIVMNNGEIIEQGNHLELMALNGSYASMVRLQTVDSEDAGSTTSTVHTDGVLSEKDSLVDIKVRGTEKEEADVSKEEEAKEKEVSPEADAALDSTKSAWVVTKTIGGMVRPYLLLIVVCLFAATIVGLTFSSSGLIFGYTIDNLSPCNPVEDIRWAGKFFGGMWFLIACVELLANTTSWTGFGMVAEKLLYKIRVLCFRSLYEQDLDWHQSEGRTPTALLSVITSDAAAVGGFSGSIIGTIFSIVVNFLVAIILSHILAWKIAIVCLVIVPILLGCGIMQLRSLSKFERRHAGAFSGAVGIANEAVNSFKTISSLSIEEEVMSSYRRALRAPQKEITLASMYANLWLSLANSTGNLIYAFAYWWGSTRITAGEASQREFFIILICMLVSAQLWGQMFSLAPEVSRARAAASRILSLINLGSSKEKAKKGKLALALESTKRDVEACAEASAKSSGGKGATIVFKDVKFSYPARPHIQILTGMSFTISAGQFVGLVGPSGAGKSTIMSLVQRMYRPTGGTVEIDGVDICAREGNEFRNDIAVVPQDCALFDGTIRFNVSLGSTPDHEPTDDEIHEACKLANIHNVIMELPEAYDTECGPNGSRLSGGQRQRLAIARALVRKPKLLLLDESTSALDAESERALQEGLERVARGITVIAITHRLHTVRKADVIFIIEGGKVVEKGRHEELVERSETYRTNALQQMLGN

SEQ ID NO: 7449 - DNA, 3975 bp, Aspergillus nidulans FGSC A4
  CDS (1)..(3975)
atgggggagaaaacagcagaggccgaggccgagaagcccagtctcctcacacgttgcaccacattcacccgtcttctattctatggcagtccctcccttaaggaagccctcgtgttgctcacgggcctaatctccgccatcgcctcggggatccccttccctataatggcgattgtgttcggtcagctcgtcgatgagatgaactcgtcgacgtgcaatgcaacgcccgaaaacgcagactcataccaatccagcatcaacgccaaggtcctgcagatcgtctatattggcatcgcatatttcgtcctcatatacatctatgtcttttgctggaatatttccggagagtggcttgcgcagcggttacgcgaaagatactttcagagtctcttgcgtcaggacgcaggtttcttcgatactttggcgcctggagaggcttcgtcacgtattactggggatatcagtacgatccagcaggggacaagcgagaaggtgggaattgtacttaacagcattgcgttctttgtgacgagttatgtggtcgcgtttatcaaggatgctcggttggccggaatgcttgtctccctcgcgcctgcgtacctgatcatgtcgttggccggagggtattttgtgcggaagtactttgggcgggctctagagtgcatggcggctgcgtcggccgttgctctggaggcgttcagcaatacgatgctcgtgcatgcgttttcggcgggtgggaggcttgaagagcgcttcattgagcacctggggcctgcccgggtcgcgggtattcgcaagtcaatcgcgacagctacgcaggccggcttgctgtacttcattgcgttctcggcaaatgcgctggctttctggcaggggtcgatgaagattgcgggcgcggttgagggaggtgcggatggggtcactgtggggaatacgtatactgtgatcctggtgttggttgatgcgagtttgatactgagccaggttgcgccgttcctgcagagctttgatgcggcagccgtggcgtttaaaaagttggagaaggatatcgagaggccgagtccgattgatggaaccgctgattctggccttgttccggcagcagcaaagatagagtcggatatcgagtttcgcaacgtctcgtttcggttcccttcaaggcctgataaaccgatcctgcaggatctgacgctgcgcatcccggcaggcaagcagacggcgcttgtcggactgagtggcagcggcaagtcaactgtcgcgggcttgatcacgcggttctatgatgctgaggaagggcaggtgacgattgggggccatgacgtgcgcgagctgaatgtgcggtttctgcgcagtgctattagtcttgtccagcaggaaccttgtctgctcgatcggtcgatactggagaatattgctcttggactggtgaactcctcagcacatgtgcatttgatggatgtgctgaagagcagtgccttggaggatattgccactgctattcgggaaaaaggcttgagtctcaaccacgccattgacttgcaacccagcaacaaagaccagatccgcgagattgtgtccttggtcgaaacagcagctggcctagcagacgcaagcaacttcatcaacaagctcgaccacggctacgcaacaatggtcggatcaagcgggaacctcatcagtgggggccagaagcagcgtatctcgatcgcccgagccttggtcaaaagcccccaaatccttatccttgatgaagccaccgcatctctggattccgctacggaattacgcgtgcaacgggcgttggaggcggcggctgctggacgcactctagtcactatagcccatcggctctcgaccatcaagaaggcggataacattattgtgatgagacagggaaagctcattgagcagggctctcatgcagaacttcttgcggcagatggagcgtatgcagagctggtaaggttgcagaatctcaatgtcaatgcctcgcaggagagtgcgtcttcgtctgctcggccgtcactggacagtacggcgcttgagaaagaaaggaatgcagaggtaacatcggtacaagacgacgaaagctccactccatcccctaaagagaagccagcagacgaagaaccagttactaccgagcgctctgtcggttctacctctaaggccattgcctctctcttccgtccgtactcgctagccctccttgtagccatcatcggtgccgtcgtcatcggaggcacatactgcggttctgctgtcatattcggtaacgttgtgggcaagctaagctcgtgcgagacagcagaatccatccgccacgcgggagaattctgggggctcatgttcttcgtcctggctctgattgagtttttcgcaaacctcatcagctggtccctcttcggctggatcgcggagcagctcatatataaagtccgcgtgctctctctacgttccattctcgagcagaagctggaatggcatgaagcgcgcacaccctccggcctcctatcactcattgtcaaggacagcaacgcgctcaatggcctcacgggatccgtcatttgcacaatcctcagcatcctcgtcaacctcttcgccgccattattatgacccacatcattgcctggagaattgcactcgtttgtctctccgtcgtgccacttctcttgggcgctgggttcatgcgtgtctcaaccttagcccgctttgaggagcgccacaatgacgccttcgcccgctccctgggcataaccgtcgaagccgtgacatccattaagaccgtccacgcgctggccattgagtccgaagttctttccacctaccgccgctccctgcagggccccatgcgcgagataacagggcaatccgccttcaccaacctctggctcgccgtcggttacggcctcagcaacttcgtctatgcgcttgcatactggtggggtgcgaagcagattatcgctggtcactacacccagacacagttcttcattgttcagctggccctgctcgtctcgtctcagctctggggccagatgtttgctttggctcctgatgtgtctcgcgccgtgcaggccacccgccggctcttgaacttgctggacctaggctcaacgaagagactctccgatcccatcttaccccctcactcggcatcaacagatatcgaagcaacctcgcacccatccgaaaaaccccctccccctgatccatcaggcacgcagtccggcctcagcgtctcctttaagcaagttcaattcacctacccggcccgcccagacacccaggtcctacacgggctagatctcaccatctccgcagggcaattcgccgcgctcgttgggccctccggtgctgggaagtcaaccataatatcccttatcgaacgcctctacacacccagttctggaacaatcgagcttggcaaccgcaacatcgcacacatggacgcctccttccgcgacgaggttgcctatgtcccgcaacactccgtccttttcgacgggtccatcaggttcaatcttgaactcggtgcgcggccgaaccaggccctttcacaaactgagattgaggaagcgtgtaagcttgccaatatccacgatacaattgtgtctctaccagacgggtatgacacagccgttggaccgaacggtgacagactaagcggtggtcagaagcagcgtcttgcgattgcaagggcattgctgagaaggccgagactgttgctgctggatgagtcgacgagtgcgctggatgcggagagcgagcggttactgcaggatggcttggagaaggcggcaaggggaatcactgtcattgcaattgctcatcggctgtatacgattcgcaaggcggatgtgatcttcctcattgaagaggggaggtgtgtggaaagggggtcgcatacagaactgatggagaggagtgagagttatcgggttaatgccctgaatcaggctgtggatggctaa

SEQ ID NO: 7450 - protein, 1324 aa, Aspergillus nidulans FGSC A4
MGEKTAEAEAEKPSLLTRCTTFTRLLFYGSPSLKEALVLLTGLISAIASGIPFPIMAIVFGQLVDEMNSSTCNATPENADSYQSSINAKVLQIVYIGIAYFVLIYIYVFCWNISGEWLAQRLRERYFQSLLRQDAGFFDTLAPGEASSRITGDISTIQQGTSEKVGIVLNSIAFFVTSYVVAFIKDARLAGMLVSLAPAYLIMSLAGGYFVRKYFGRALECMAAASAVALEAFSNTMLVHAFSAGGRLEERFIEHLGPARVAGIRKSIATATQAGLLYFIAFSANALAFWQGSMKIAGAVEGGADGVTVGNTYTVILVLVDASLILSQVAPFLQSFDAAAVAFKKLEKDIERPSPIDGTADSGLVPAAAKIESDIEFRNVSFRFPSRPDKPILQDLTLRIPAGKQTALVGLSGSGKSTVAGLITRFYDAEEGQVTIGGHDVRELNVRFLRSAISLVQQEPCLLDRSILENIALGLVNSSAHVHLMDVLKSSALEDIATAIREKGLSLNHAIDLQPSNKDQIREIVSLVETAAGLADASNFINKLDHGYATMVGSSGNLISGGQKQRISIARALVKSPQILILDEATASLDSATELRVQRALEAAAAGRTLVTIAHRLSTIKKADNIIVMRQGKLIEQGSHAELLAADGAYAELVRLQNLNVNASQESASSSARPSLDSTALEKERNAEVTSVQDDESSTPSPKEKPADEEPVTTERSVGSTSKAIASLFRPYSLALLVAIIGAVVIGGTYCGSAVIFGNVVGKLSSCETAESIRHAGEFWGLMFFVLALIEFFANLISWSLFGWIAEQLIYKVRVLSLRSILEQKLEWHEARTPSGLLSLIVKDSNALNGLTGSVICTILSILVNLFAAIIMTHIIAWRIALVCLSVVPLLLGAGFMRVSTLARFEERHNDAFARSLGITVEAVTSIKTVHALAIESEVLSTYRRSLQGPMREITGQSAFTNLWLAVGYGLSNFVYALAYWWGAKQIIAGHYTQTQFFIVQLALLVSSQLWGQMFALAPDVSRAVQATRRLLNLLDLGSTKRLSDPILPPHSASTDIEATSHPSEKPPPPDPSGTQSGLSVSFKQVQFTYPARPDTQVLHGLDLTISAGQFAALVGPSGAGKSTIISLIERLYTPSSGTIELGNRNIAHMDASFRDEVAYVPQHSVLFDGSIRFNLELGARPNQALSQTEIEEACKLANIHDTIVSLPDGYDTAVGPNGDRLSGGQKQRLAIARALLRRPRLLLLDESTSALDAESERLLQDGLEKAARGITVIAIAHRLYTIRKADVIFLIEEGRCVERGSHTELMERSESYRVNALNQAVDG

SEQ ID NO: 7451 - DNA, 4134 bp, Aspergillus nidulans FGSC A4
  CDS (1)..(4134)
atgaactcagcccatctcggatcaggattcaggaatcaggaaccccccaatccactcgctggatcggcatcgacgatagccatgaggtccatgacgcatttacgtaaagacaccctccccttcccgcatggttatgccacggctgcggatgattcgatgtggcttggattcagcaccgtcggtatgaagcttgttcagaatctggcgggctttcctcgcctgctgctggccggcaacccttcaaaaatcgaccttggcatgctcctggtggccatcctgagtgcgatagcgtccggcgtaccctttccattgatcggtatcctgttcggtcagctcctcgacgatttcaacgcggcgacatgtaaatcaggcgactcctctggcgacggcgagcaagggagcatcaacgacaagatcctgattatcgtatatttggcaatcgctcagttcgtccttatctacatccatctttcgttttggactctaaatggcgctcggctggcgcagcgactgcgagaatcctacctgcaaaacctccttcgacaggaaccctcgttttttgacaaccttcctccgggagaggtagcctctcgactcaatggcgacatccagacgattcgttccggcacgtccgagaaagtgggaatttgtctcgcgagtttctcgttcttcgttacggcctatatcgttgcatttattaaggacaccaaacttgcaggaatgcttgtttcgttgattccggcctatttcctgatgtcgtttgtcggaagccactatatcgagaaatactcaggtctgatgtcggaatatgccgctaccgccgcttcgatagcttcagaagcgctttcaaacttcaccgttgtccaggcctttggcgcaaacgaccgcttggaggagaaattctccaaggcgctcaagtcctcggaaaaggaagggctgaaaaaggctacggcagttggcatacagtctggagttctgtatttcgtcgcttattctgcgaacggtttggcgttctgggaaggcagcagacaggttgcccgcacagtgaacggcgagcctggcggtgttactgtcggcgctacgttcacggtcatcttcattctagttgaagcgaccctgcttctgagtcaagtcgcaccattccttcacctgttcactgcaggagttgcctcgtacgagaaattgcatgcagacatcaatcgccagccgctgattgatggaactactccttcaggaagccgcctcacccaggctggtgggttcgagctaaacgaagtctcatttagctatccctcacggcctgaggtcaccgtcctcgacaaggtttccctcagcatacctcccaacaaacatactgcaattgtaggcctttcgggaagtggaaagtcgacaatcgccggcctggttacaaggctgtatgatcccacggaagggcaaatcttgttcgatggccatgatcttcgcgacgtcaatactcgtgacttgagaagttttgtcagtttggtgcagcaagagccgaaccttttggaccgttccatcctggagaacatcgcacatggtttggtcaattcgagcaatcccagccatacgcctctgagagcagcccttctcagctccgacattgcggacatcgctagcgaagttagggagggaaaagatttaatggaagcggctgagaaaaggggcccagagttcgttgagattgccaaactggtccagaaagccgcgcagctcgcggatgcagaagctttcattcttgcactgcaacatggatatggcacacttgttggatccagtgggaggttgatcagtggtggtcagaaacaacgaatctcccttgcgagagcccttgtcaaggatccagccgtacttattctggacgaagcaacggcctctctggattcgcgaagtgaacaacgtattcaaagggctatttctaacatagctagcggacgaaccatgattactattgctcatcgtctatccacaattaccaatgcggataatatcgtcgttatgcacaagggccatatcgtggaacaggggaaccatgcaacattgatggcaaaagatggggcttatgctgatctagtcaaactgcaaacgctatccactactgacaagaatgaatctacaaccagtgttgatactatcagcaaaactgatcagatctcgtcggacggcgacctcgagtcgagcagtcttactgacggtcccagatttatcgaggatgagaagaagcctgaaacaactgaaactccggttaccgactcaacagaagagcctgaagaacctgatacgccaaacaaatccttatgggctctcgttaagggttatgcgccgactctgaggccgcatttgctttttctcctccttgcgctgctgggctccagtattgttggcggtgcattttctggtgaagccgtgatttttggaaatactgttggaagtttgaatccatgcaacagtgcggattacatccgatccaagggaaactttttcggactcatgttcttcgtgttggcgatcatcgagttctttgcgaacgttgttagttggaccggatttggatgggtgtcggagaaagtagtctacactgtccgagttctatccttccggtcactgatggagcaagatctccagtggcaccaatcgaaaggtcgctcaccacccttgctcctctcatacatcaccagagatggcaacgctttggctggactaagcggctctgtcgtcggcacactgttttcaattactgttaatctcatcgcagcgattatcttgacgcacatcattgcatggaggattgctctggtttgcctcgctctagttccactgctgcttggtgccggtcttatggaactccatatactcgggaagttcgaggagcgtcacgagaacgcttataccaagtcggtcgacattggtgttgaagccatcacctccatcaaaacgattgcatctctttcccttgaagatgagacactgaagacctaccaacggtccctgaagggtcctcgtaaggaaacgcttacagttactctacaggcaagcttttggcaggcgatgacctacttcctgggtaacctcgtgaatgcgttagcctactggtggggttccaaacaaatcttggcgggcaattatacccagactcagttcttaattgtggtgttttccctgcttgttagtgctttgctttggagtcaaatgtttgctcttgcgccagagctttcggcagcacgagctgcaatggccaggttactgggtcttattgagatagggtcagataagatgcaaggacacgtaccccctcgctcccttacggcatcgtcttcaggggaggaagaggcagctgtcgaaactaagcaacatgcatcagacagcaaagcctccagcgtccagcttcgcgacgttcactttgcgtacccagcccgaccagacattaaggttatgaacgggttgactattgacatcaagcccggaaagttcgccgccctcgtcggtcccagtggtgcaggcaagtccacaatcatttcactagttgaacgcctttacacgccgcaatctggctcgatcctcgtcgacggcgtggacattaccaagcatcgggatgtcggcttccgagactcaatcgctctggtgccccaggaaagcgtcctcttcgaagggaccatcaaattcaacattagcctcggcgccaaaccaggccacgaggtttcgcagggggacattgaaaaagcttgcaaactagcaaacatccacgataccattgccgcccttcccgacggctacgacaccctctgcggtcccaacgggagccagttttccggaggccagaaacagcgcctctctatcgccagagctcttgttcggaaaccgaagctgcttatccttgacgagtcaactagcgctcttgacgcggagtctgagaaactgctgcaggatgggctcgaaaaggctgctaagggaatcacagtcattgccattgcgcatcgtttgcatacaatcaagaaggcggatgtcatctttttgattgagggaggtcggtgtgttgaacatggcacacatgaggagttactggccaggtcagagagctacagggctaatgttatgcaccagactgtggctacatga

SEQ ID NO: 7452 - protein, 1377 aa, Aspergillus nidulans FGSC A4
MNSAHLGSGFRNQEPPNPLAGSASTIAMRSMTHLRKDTLPFPHGYATAADDSMWLGFSTVGMKLVQNLAGFPRLLLAGNPSKIDLGMLLVAILSAIASGVPFPLIGILFGQLLDDFNAATCKSGDSSGDGEQGSINDKILIIVYLAIAQFVLIYIHLSFWTLNGARLAQRLRESYLQNLLRQEPSFFDNLPPGEVASRLNGDIQTIRSGTSEKVGICLASFSFFVTAYIVAFIKDTKLAGMLVSLIPAYFLMSFVGSHYIEKYSGLMSEYAATAASIASEALSNFTVVQAFGANDRLEEKFSKALKSSEKEGLKKATAVGIQSGVLYFVAYSANGLAFWEGSRQVARTVNGEPGGVTVGATFTVIFILVEATLLLSQVAPFLHLFTAGVASYEKLHADINRQPLIDGTTPSGSRLTQAGGFELNEVSFSYPSRPEVTVLDKVSLSIPPNKHTAIVGLSGSGKSTIAGLVTRLYDPTEGQILFDGHDLRDVNTRDLRSFVSLVQQEPNLLDRSILENIAHGLVNSSNPSHTPLRAALLSSDIADIASEVREGKDLMEAAEKRGPEFVEIAKLVQKAAQLADAEAFILALQHGYGTLVGSSGRLISGGQKQRISLARALVKDPAVLILDEATASLDSRSEQRIQRAISNIASGRTMITIAHRLSTITNADNIVVMHKGHIVEQGNHATLMAKDGAYADLVKLQTLSTTDKNESTTSVDTISKTDQISSDGDLESSSLTDGPRFIEDEKKPETTETPVTDSTEEPEEPDTPNKSLWALVKGYAPTLRPHLLFLLLALLGSSIVGGAFSGEAVIFGNTVGSLNPCNSADYIRSKGNFFGLMFFVLAIIEFFANVVSWTGFGWVSEKVVYTVRVLSFRSLMEQDLQWHQSKGRSPPLLLSYITRDGNALAGLSGSVVGTLFSITVNLIAAIILTHIIAWRIALVCLALVPLLLGAGLMELHILGKFEERHENAYTKSVDIGVEAITSIKTIASLSLEDETLKTYQRSLKGPRKETLTVTLQASFWQAMTYFLGNLVNALAYWWGSKQILAGNYTQTQFLIVVFSLLVSALLWSQMFALAPELSAARAAMARLLGLIEIGSDKMQGHVPPRSLTASSSGEEEAAVETKQHASDSKASSVQLRDVHFAYPARPDIKVMNGLTIDIKPGKFAALVGPSGAGKSTIISLVERLYTPQSGSILVDGVDITKHRDVGFRDSIALVPQESVLFEGTIKFNISLGAKPGHEVSQGDIEKACKLANIHDTIAALPDGYDTLCGPNGSQFSGGQKQRLSIARALVRKPKLLILDESTSALDAESEKLLQDGLEKAAKGITVIAIAHRLHTIKKADVIFLIEGGRCVEHGTHEELLARSESYRANVMHQTVAT

SEQ ID NO: 7453 - DNA, 1941 bp, Tribolium castaneum
  CDS (1)..(1941)
atggcccagaaagtgagtcagaacaagacatacatcgctgtgaatatccccgaaaattcgaataaagcagttcgaaaatcattttggtcggtttttaaaagggacgctagcacaaagaaaagcaaagaagcgcccaaagaagtagccccagcgaccccgcgcattaacaaagctgatttggcccgcctgctgtccttagccaagccagaaaaatggaaacttttcggagcgatttgtttcttgctggtgtcaagcaccgtcacaatgagcatcccttttagtttaggcaaagtccttgacatcatttatagtagtagtgaaaatagtgatgaggctcgagcgaaattaaataaagtttgcggtgttttattgtgcgtgtttgtcttaggggcgatttgcaattttggacgtgtgtacctaatgtcagtatcaggttatagaatgactcaagctttaagaaaacgtgttttttctaccataatgaagcaggaacaaggctggtttgataagagatcaactggggagttggtaaacagactctctgccgatactcaaattgtgggaaatgctctctctagcaatatttcagacgggctaaggtcaattgtcatggtctgtgctggtacaggcatgatgttttatatgtcggcagaactggcacttgttggcttggctattgtgcccccggttgcgattattgccgttatttatgggagattccttagagggatttctaggaaggttcaggattctttagcaggggctactagtgttgcagaggaacgtattgctaatatcaggactgttaaaactttctcgcaggaaccgagagaagttgattcgtacgcaaatgccattaaagaggttctaggcttgagttacagagaggctaaagctagggccattttttatgggctgaccggctttagcggccacgtaatcataatatcagtgctttattatggtggtgtgatggtgtcttcaaacaccataacagtgggaaatctgtcttcttttctcttatatgcggcttatatcggcgtatcgttgggcacattttcaaatttttactccgaattgaacaaatcaattggtgctgcggccagaatttgggaaattatcgacagagaacccataattccgatgaaaggtggtttagtgccaattgcaccccctgaaggtcacatacaatttaacgacatccagtttagttacccagcgcgcgacgatgtccgcattttcgaaaatttcaaactcgaaatatcccccggaaaaatggttgcagtagtcggtccgagtggttccggcaaaagcaccctcgctgctcttttattgcgactatacgatcctgcaaaaggacaagttctattagacggacaggacattaaagaaattgatccgagttggttgcgccgacatgtcggtaccgttagccaggaaccagttttattttcgtgttcaattcgtgataatattttatacggagctgatgatccttccaaagtgacagaagatgaattagttcaagtggccaaagaggccaatgtttacgaattcgtccaacagttgcccgacggttttgatactttggtaggggaacgtggggtgatgttgagcggtggccagaaacaacgcattgccatagcgagagctttgattaaagatccgaagatattgttgttagatgaagccacgagtgcgttagatgcgcaatcggagcacttggtgcaagaagctttggagaggattatgaaagggaggactgttttaacgattgctcataggctgtcgacgattcaaaatgccgatactattgctgtgctgcgcgatggacatatcgtggaacaggggaaataccaggatttacttaatatcaagaagggcgcgtttagggaattaatgaaacatcaaacgtttcaagggaatatagagaagacgtga

SEQ ID NO: 7454 - protein, 646 aa, Tribolium castaneum
MAQKVSQNKTYIAVNIPENSNKAVRKSFWSVFKRDASTKKSKEAPKEVAPATPRINKADLARLLSLAKPEKWKLFGAICFLLVSSTVTMSIPFSLGKVLDIIYSSSENSDEARAKLNKVCGVLLCVFVLGAICNFGRVYLMSVSGYRMTQALRKRVFSTIMKQEQGWFDKRSTGELVNRLSADTQIVGNALSSNISDGLRSIVMVCAGTGMMFYMSAELALVGLAIVPPVAIIAVIYGRFLRGISRKVQDSLAGATSVAEERIANIRTVKTFSQEPREVDSYANAIKEVLGLSYREAKARAIFYGLTGFSGHVIIISVLYYGGVMVSSNTITVGNLSSFLLYAAYIGVSLGTFSNFYSELNKSIGAAARIWEIIDREPIIPMKGGLVPIAPPEGHIQFNDIQFSYPARDDVRIFENFKLEISPGKMVAVVGPSGSGKSTLAALLLRLYDPAKGQVLLDGQDIKEIDPSWLRRHVGTVSQEPVLFSCSIRDNILYGADDPSKVTEDELVQVAKEANVYEFVQQLPDGFDTLVGERGVMLSGGQKQRIAIARALIKDPKILLLDEATSALDAQSEHLVQEALERIMKGRTVLTIAHRLSTIQNADTIAVLRDGHIVEQGKYQDLLNIKKGAFRELMKHQTFQGNIEKT

SEQ ID NO: 7455 - DNA, 1800 bp, Tribolium castaneum
  CDS (1)..(1800)
atgacaacatacaggacatcctctggcaaacagcaaaaatttgattgggataaattttggcagtatttaaaaccccatatttggtatcttattgcggcaattgctggagctttagctgttgcgatcttaaatatacaaataccgcaagtaatgggaggggttattaatgttatagctcagtatacagacaacaagaatagtgaatcatttataaatgaaatgaaagtgcctgcgattaaacttattgcaatgtatgttggccaatcactttgtacgtttttttacatttacatgttatctaatttgggtgaaagaatttcatttcaaatgaaaaccgatttatttgctgcaataatgcgccaagatattgcgttctttgaccaacaaagaaccggtgaggtgatcaacagactgacttccgatatccaagactttaaaagcagttttaaacagacggtatcgggcggtttaagggcaattgcccaaattgtgggatgctcagtgtccctaattatgatttcacctcacatgacttttattacgttactttgtgtccccacagttattgctgttgggacgctttttgggggcttgttaaggaacacttcaaggaaagcacaggcacagattgaaaaaacaaccgctgtcgcggatgaagctgtaagcaacataagaacagtccgagcgtttgggatggaagatcaagagagggaattatttgatgctgaggctgaattagcaatggttttaaatgaaaatttgggttttggtattgggtggttccaagcgggtacaaatttatttttaaatgggatggttttaattacactttacatgggtggttatttgctctcaactgataagttgtctccgggagaattgatggcgtatttgatggcctcccaaactattcagaggtcattggggcaactgtccctgctttttgggtccgtggtcaggggggttgcggcaggatcgcgtgtttttgagtatatgaatttacgaccaactatgcctttaagaggagggaaaataattccagaagataatctgaagggtgatattgagttcaaaaacgtaacatttgcttatccaacgcgacgacaacagtatgttttaaagaattttgatttaaaaataccttctggtaaaactttggcaatagttggagcttcaggtaacggcaaatctacggttgttgcgctgatagaacgattttacgacgtaaattgcggttcggtcactttagacggtcatgacattaaaaccctcgacccatcatggttgagacagcgtgttctggggctaataagccaagagccaattttgtttggtacttccattgtcgaaaatatcagatatgggctccctagtgcctcagatgaggaagtcaaagaagcggcaaaattagcaaacgcccatgactttatctccagttttccgcaagggtatgacactatggtgggtgagagaggggtgacattatccggtggccaaaaacaaagaattgccattgctagagcgttacttaaaaacccgacagtattactattagatgaagcaacaagtgctttagacacagaatcggagaaagtcgtacaaaacgcattagaaaatgctaaaaaggggaggaccgttgtggtgatcgcccaccgactgtccacggttcagaacgctgacataattgttgttttgaataagggggttatagttgagatggggacccatgaggagttgacacgcaagcggggctattactggtctctgacgtaccaacagcaggaggttcccgccggttaa

SEQ ID NO: 7456 - protein, 599 aa, Tribolium castaneum
MTTYRTSSGKQQKFDWDKFWQYLKPHIWYLIAAIAGALAVAILNIQIPQVMGGVINVIAQYTDNKNSESFINEMKVPAIKLIAMYVGQSLCTFFYIYMLSNLGERISFQMKTDLFAAIMRQDIAFFDQQRTGEVINRLTSDIQDFKSSFKQTVSGGLRAIAQIVGCSVSLIMISPHMTFITLLCVPTVIAVGTLFGGLLRNTSRKAQAQIEKTTAVADEAVSNIRTVRAFGMEDQERELFDAEAELAMVLNENLGFGIGWFQAGTNLFLNGMVLITLYMGGYLLSTDKLSPGELMAYLMASQTIQRSLGQLSLLFGSVVRGVAAGSRVFEYMNLRPTMPLRGGKIIPEDNLKGDIEFKNVTFAYPTRRQQYVLKNFDLKIPSGKTLAIVGASGNGKSTVVALIERFYDVNCGSVTLDGHDIKTLDPSWLRQRVLGLISQEPILFGTSIVENIRYGLPSASDEEVKEAAKLANAHDFISSFPQGYDTMVGERGVTLSGGQKQRIAIARALLKNPTVLLLDEATSALDTESEKVVQNALENAKKGRTVVVIAHRLSTVQNADIIVVLNKGVIVEMGTHEELTRKRGYYWSLTYQQQEVPAG

SEQ ID NO: 7457 - DNA, 1797 bp, Prochlorococcus marinus str. MIT 9303
  CDS (1)..(1797): transl_table=11
atggctgttactgattttcagcgggttcggcgtctggggcgttatctccgtgaggaccgtcggcgtttatggatcgtcctgtctctcttggtgccgctagctcttgctggtgcgattcaacccctcttggttggccaggcaatcagtgttttgaagcaagagtcaaccttcccttggctcagtgatctgccagtgagctcagcaataagacttttggtggggattctgctgatttctgtgcttctgcgcttgggtctgcagggctttcagtctttcaatatcgaggccttagggcaacggctaacggcgcgtattcgtaacgatctgtttggccacgccatggccctttcgctgcgctttcacgatcgaatgcctgtgggcaagttgttgactcggctgaccagtgatgtgaatgcactgtctgaggtttttggcagtggggcagtgggagttttgggcgacctcgtcagccttgtggtgattgcagtcaccatgattttgattgattggcgcctgggggggttgctgctggttacgcaggtaccggtcaccttggtgatcctttggttgcaacgccgataccggaaagccaattaccgcgtgagggaggaactctctcagctcaatgccgattttcaggaaaaccttcaggggcttgaggttgtccagatgtttcgtcgagaaacggttaatgggcagctatttgatcgcactggctcggcctacaggcaagccgtgaatggaacgatcttttatgacagcagcatttcagcttttatcgaatgggtggccctggcagccgtggctgcggtgctggcgcttgggggatggatggtaactgccgagacaatgggccttggcaccttgacaacgttcatcctttattcccagcgtttgtttgatcccctgcgtcaacttgctgatcgcttcactcagattcaggggggactgactgctgttgaacggattggcgagttgctggagcagccacttgacattgtcgatgcaaagtctgttaaagacgaacccagcgttgttaggccctcggcttctgctgcttgcggtgaggtggtgtttgagggggtgagctttgcctatcggccggacgagccgattctccaggaccttagttttcgcatttctgctggtgaacatgttgccctggtaggaccaaccggttcaggcaagacgaccctgatccgcttgctgtgtcgtctttacgagcctcaagtcgggcggatcatgcttgatggtgttgacatcaaaacaatccctctttggcggctacgcaaacaactgggggttgtgcttcaggacacctttctatttagcggcaatgttgcagataacctccgattggattcctcgattgaggatgaccgtttgcgggcgatctgtagagatcttggccttgatcctttgctcaatcggctacccaacggcttggagactgagctcagggagcgtggcggcaatttgtcatcgggagagagacagctcttagcagttgcaagggtggccattcgcaaccccactgtgctggttatggatgaggcgacggctttcatggacccttctacggaagcgacattgcaaagggatctagatcgcttgcttgaacgtcgcaccgcggttgttattgcccatcgcctggccactgtggaagcagccgatcgaatcatggtgcttcggcggggcaagctgattgagcagggaacccaccttgagcttcgtgccaagggaggcctttattctcagttagcggaactacaggaaaggggactggcgaaactttga

SEQ ID NO: 7458 - protein, 598 aa, Prochlorococcus marinus str. MIT 9303
MAVTDFQRVRRLGRYLREDRRRLWIVLSLLVPLALAGAIQPLLVGQAISVLKQESTFPWLSDLPVSSAIRLLVGILLISVLLRLGLQGFQSFNIEALGQRLTARIRNDLFGHAMALSLRFHDRMPVGKLLTRLTSDVNALSEVFGSGAVGVLGDLVSLVVIAVTMILIDWRLGGLLLVTQVPVTLVILWLQRRYRKANYRVREELSQLNADFQENLQGLEVVQMFRRETVNGQLFDRTGSAYRQAVNGTIFYDSSISAFIEWVALAAVAAVLALGGWMVTAETMGLGTLTTFILYSQRLFDPLRQLADRFTQIQGGLTAVERIGELLEQPLDIVDAKSVKDEPSVVRPSASAACGEVVFEGVSFAYRPDEPILQDLSFRISAGEHVALVGPTGSGKTTLIRLLCRLYEPQVGRIMLDGVDIKTIPLWRLRKQLGVVLQDTFLFSGNVADNLRLDSSIEDDRLRAICRDLGLDPLLNRLPNGLETELRERGGNLSSGERQLLAVARVAIRNPTVLVMDEATAFMDPSTEATLQRDLDRLLERRTAVVIAHRLATVEAADRIMVLRRGKLIEQGTHLELRAKGGLYSQLAELQERGLAKL

SEQ ID NO: 7459 - DNA, 1728 bp, Clostridium thermocellum ATCC 27405
  CDS (1)..(1728): transl_table=11
atgaagaattttatcagaatacttaaacagggacgacaatactggaaatatttgatagtcgccggtataagcctgctcgcgattacggctttcaaccttgttaccccatggaaagtcagagaactggttgatatattgtcaaaagaaggcacgaagaatatggcaagtatacgcaatattgcaattatacttgccgttgcatacatcgcaagagcgtttttttcctatctgtatcgctatttcagccatgttgccgcatggagactggttgcggacatgagggtgattgtgtacgaacatctgcagaagctgtctttgagtttctatcaagacaagcagaccgggcagcttatgtcaagggcaataaatgacacggccacttttgaggttttaatagcccatgctgttccggaccttgttaccaatgtgcttattctcgttggcaccggtatactgttgtttgtaataaaccctttgctggcggcgcttacccttatacccataccgtttttggtactgggttcgggaatatttaccaaaaaagttcttccgaatttccgggaggcgcagggaaaacttggggatcttaacgcagtggtgcaggacaatatttcgggtatcaaggaaattcaggctttcaaccaacagtcaagggagaaaaaacgcgttgaaaaaagggcaagaaaatacacttccgcaatacttcatgctttaagggtaagtgcgatatttcatcccgttgtggaaatgataagctcccttggaacggttattgtcgtggcctttggcggatggtttgcattaaaaggttatgtcagcacggctgatattgtaggatttataatgtttctgggacttttttatcagcctatcaccacactggcaagagtaatagaagatttacagcaggctgcggcgggagcggaaagagtgtttgagcttcttgacaccgagccggatattgtcgacagtgaaggggcgaaaaccattacaagttccaaaggtgaaataacctttaaaaatgtaagtttccactatattccttcaaatccggttttgaaaaatataagctttaccgcaaagcccggtcagatgatagcattggtggggccgaccggagtgggaaaaagcactgtaattagtttaatagcaagattttatgacccggtttcgggagaaattcttcttgacggtatgaatattaaggatataacaatatcttctctaagaaaccagataagcatagtgcttcaggatacattccttttcaacggcagtgtggctgacaatattgcttacggaagcagggacgcttcttttgaagatattgttagagcggcaaaaatcgcaagggctcatgattttataatgcagcttcccgaaggctatgacaccgtgataggtgaaaggggcgtaaagctttccggagggcagaaacagcgtttgtccatcgccagagcggttcttagaaacactcctatattgatattggacgaagcaaccgcgtcagttgatgtcgaaacggaagcggaaatccagaaagcgattggtgaattggcaggaacccgcactattattgtgatagcccacaggctgtccaccgtaaagcaggcagacaacatccttgtcttaaaagacggggaaattgtagagtcgggcactcatgacgagcttataaagcaagacggcttgtacaaatatctttgcgaagtacaattcggaatatga

SEQ ID NO: 7460 - protein, 575 aa, Clostridium thermocellum ATCC 27405
MKNFIRILKQGRQYWKYLIVAGISLLAITAFNLVTPWKVRELVDILSKEGTKNMASIRNIAIILAVAYIARAFFSYLYRYFSHVAAWRLVADMRVIVYEHLQKLSLSFYQDKQTGQLMSRAINDTATFEVLIAHAVPDLVTNVLILVGTGILLFVINPLLAALTLIPIPFLVLGSGIFTKKVLPNFREAQGKLGDLNAVVQDNISGIKEIQAFNQQSREKKRVEKRARKYTSAILHALRVSAIFHPVVEMISSLGTVIVVAFGGWFALKGYVSTADIVGFIMFLGLFYQPITTLARVIEDLQQAAAGAERVFELLDTEPDIVDSEGAKTITSSKGEITFKNVSFHYIPSNPVLKNISFTAKPGQMIALVGPTGVGKSTVISLIARFYDPVSGEILLDGMNIKDITISSLRNQISIVLQDTFLFNGSVADNIAYGSRDASFEDIVRAAKIARAHDFIMQLPEGYDTVIGERGVKLSGGQKQRLSIARAVLRNTPILILDEATASVDVETEAEIQKAIGELAGTRTIIVIAHRLSTVKQADNILVLKDGEIVESGTHDELIKQDGLYKYLCEVQFGI

SEQ ID NO: 7461 - DNA, 1881 bp, Mycobacterium sp. JLS
  CDS (1)..(1881): transl_table=11
atgagtatcgaaacggtcgcccggcagaccctgtaccgccaggcgcacgcccgcagcggagatctgcactcgctggccgaccgtgccctgctgcgccgcatctggcggttcgccggccggcaccaccgcaggctcgccgcgttcgtggcggtcagcgtggtgagcgcgacgctggcggtggccacgcccgtgctggccggccgggtggtcgacgagatcacgcgcggcggcgcggcgtcggtcgtgatcgggctcgccgccgtcatcgcgaccgtcgcactcgccgaggccggggtgtcgctgctgacgcgctggctgtcgtcgaacatcggcgagggcctcatcttcgacctgcgcaccgccgtcttcgagcacgtccagaagatgcccgtggcgttcttcatgcgcacccgcaccggtgcgctggtcagccgcctcggcaacgatgtgctcggcgcacagcgcgcgttctccgacacgctgtccggggtggtctccaacctggtcacgctgacgctgacgctcggcgtgatgctcgcgatctcctggcagatcaccgtcgtcgcactcgtgctggtcccggttttcgtgctgcccgcccgccgaatcggcgccaggatggcgcacctgtcgcgggagagcgccattcacaacgcgacgatgaacacgcagatgaccgaacggttctccgcgcccggcgccaccctggtcaagctgttcggccgccccgatagcgaatcccacgagttcgcggtccgcgccgggcgcgtccgcgacatcggggtgcggtcggcgatgctgcagtcgacgttcatgaactcgctgacgctgatgtcggcgctcgccctggcgctggtgtacgggctcggcggggtgatcgccctcggtggtcatctgcaggccggggcgatcgtgtcgctggcgctgttgttgacccgtctctacgcaccgctgactgcgttggccaatgcccgggtcgagatcgccagtgcgctggtgtctttcgagcgtgtcttcgaggtgctggatctggagccgatcatccgggaggagcccgacgccgtcgcggtacccgacggcccggtgcgcgtcgaatttgatcacgtgcggttctcctacccgacggcggacaaggtctcgctggcctcgctcgaggaggtcgcggtgctcgacgaccgcgacgacggtgaggtgctgcacgacatctcgttcaccgcggagccggggcagatggtcgcgctggtcgggtcttcgggcgccggcaagtcgacgatcgccgcgctgctggcccgtctctacgacgtcgactccggtgcggtgcggctggccgggatggacgtgcgcgacgtgacgttcgaatcgctgcgcgacaccgtcggcatggtcacccaggacggacacctgttccacgagtcgatccgggccaacctgctgctggccgcccccgaggcgacggacgaccggctctgggaggtgctgcgccgcgcccggttggccgatgtcgtcgccgcgatgcccgacgggctcgacacggttgtcggtgagcgtggctaccgtctgtccggcgggcaacggcaacggctgaccatcgcccgcctgctgttggggaggtcacgggtggtggtgctcgacgaggcgacggcgtcgctggactcggcgtcggaggccgccgtgcaacaggccctcggtgaggcgctggccgggcggacgtcgctggtcatcgcccaccggctgtcgaccgtgcgggccgccgacctgatcctcgtggtcgaggacggccggatcgtcgagcgcgggacgcatcgccagctcatcggccgcggcggccgctacgccgagttgtacgagacccagttcgcggagccggaggcggttgcgtga

SEQ ID NO: 7462 - protein, 626 aa, Mycobacterium sp. JLS
MSIETVARQTLYRQAHARSGDLHSLADRALLRRIWRFAGRHHRRLAAFVAVSVVSATLAVATPVLAGRVVDEITRGGAASVVIGLAAVIATVALAEAGVSLLTRWLSSNIGEGLIFDLRTAVFEHVQKMPVAFFMRTRTGALVSRLGNDVLGAQRAFSDTLSGVVSNLVTLTLTLGVMLAISWQITVVALVLVPVFVLPARRIGARMAHLSRESAIHNATMNTQMTERFSAPGATLVKLFGRPDSESHEFAVRAGRVRDIGVRSAMLQSTFMNSLTLMSALALALVYGLGGVIALGGHLQAGAIVSLALLLTRLYAPLTALANARVEIASALVSFERVFEVLDLEPIIREEPDAVAVPDGPVRVEFDHVRFSYPTADKVSLASLEEVAVLDDRDDGEVLHDISFTAEPGQMVALVGSSGAGKSTIAALLARLYDVDSGAVRLAGMDVRDVTFESLRDTVGMVTQDGHLFHESIRANLLLAAPEATDDRLWEVLRRARLADVVAAMPDGLDTVVGERGYRLSGGQRQRLTIARLLLGRSRVVVLDEATASLDSASEAAVQQALGEALAGRTSLVIAHRLSTVRAADLILVVEDGRIVERGTHRQLIGRGGRYAELYETQFAEPEAVA

SEQ ID NO: 7463 - DNA, 1977 bp, Bradyrhizobium sp. ORS278
  CDS (1)..(1977): transl_table=11
ttgatgccccccgattcctccccacatcaccttgccaccgatgcgccggcctctccggagcagggaacgctcgccggcacgctgcgtcatctctggcccttcatctggccgagcgaccgcgccgatctgaagatgcgcgtgttatggtcggtggtgctgctgctcgcagccaaggtcgcgaccttggtgctgcccttcaccttcaaatggaccaccgacgccctgaccggcgccaacaccgcgccgatcaagccggacgattgggcgttctggctggtcgcctcgccgatcgtgatgaccgcgagctatggcgcgatgcgggtgctgatggcggtgctgacgcagtggcgcgacggtatctttgcgcgcgtcgccatgcatgcggtgcgcaagctcgccaccatcaccttcgtccatatgcacgagctgtcactgcgctttcatctggagcgcaagaccggcggattgacacgcgtgctcgaacgcggacgcaatgcgatcgagacgatcgtccgcatggtgatcctccagctgatcccgaccatcgtcgaggtctcgctgctgaccgccgtgctgctgtggcagttcgactggcgctatgtgctggtcacgttgaccatggtcggggcctatctcttctacacatacatcgcgaccgagtggcgcatcgagatccggcgccggatgaacgactccgacaccgacgcgaacacgaaggcgatcgactcgctgctcaactacgagacggtgaaatatttcggcgccgaggcgcgcgaggccgagcgctacgaccgctcgatggagcgttatgagcgggccagcgtgaagacctacacctcgcttgcggtgctaaacgccgggcaggcggtgatcttcaccatcggcctgaccatcgcgatgctgatgtgcgcccatggcgtgcgccaggggcgcaacaccgtcggcgacttcgtcatgatcaacagcatgatgatccagctctaccagccgctgaacttcatgggcatggtgtatcgcgagatcaagcaggcgatcatcgacatcgagaagatgttcggcgtcttgaccagggatgccgaggtgaaggatgcgccgcgcgccaagccgctggtggtgaccgcaggccatgtccgcttcgaggatgtccgctttgcctatgagcccgagcggccgatcctgcaggggctgagcttcgaggtgcccgccggcaagacggtcgcgatcgtcggtccgtccggcgcaggcaagtcgacgatctcgcgcctgttgttccggctgtacgacgtgtccggcggccgcatcctgatcgacggccaggacatccgcgatgtgacgcaggtgtcgctgcgggcgcagatcggaatggtgccgcaggacaccgtgctgttcaacgacaccatccgctacaacatccgctacggccgctgggatgcggacgatgccgcggtcgaggaggcggcgcggctggcgcagatcgacggcctcatccggatggcgccgaagggctacgagactcaggtcggcgagcgcggcctcaagctgtccggcggcgagaagcagcgcgtcgcgatcgcccgcaccatcctgaaggcgccgccgatcctggtgctcgacgaggccacttcggcgctcgacagccacaccgagcaggagattcaggatgcgctggacggcgtgtcgcgcaaccggacctcgctggtgattgcgcaccggctctcgaccatcgtcgcggccgacgagatcatcgtgctcgaccgcggccggatcgccgagcggggcacgcatgccgagttgctggcgaaaagcgggctctatgccggcatgtggaaccggcagcgcgaggccgaggaggcgcgcgagaagctggcgcagatcggcgacgacgcggccgccccgaatcgcaatccgccggcccgaagcgagccagacgtcgccggacccgacctgtccgggcctgtcgccagcgccgcggagtga

SEQ ID NO: 7464 - protein, 658 aa, Bradyrhizobium sp. ORS278
MMPPDSSPHHLATDAPASPEQGTLAGTLRHLWPFIWPSDRADLKMRVLWSVVLLLAAKVATLVLPFTFKWTTDALTGANTAPIKPDDWAFWLVASPIVMTASYGAMRVLMAVLTQWRDGIFARVAMHAVRKLATITFVHMHELSLRFHLERKTGGLTRVLERGRNAIETIVRMVILQLIPTIVEVSLLTAVLLWQFDWRYVLVTLTMVGAYLFYTYIATEWRIEIRRRMNDSDTDANTKAIDSLLNYETVKYFGAEAREAERYDRSMERYERASVKTYTSLAVLNAGQAVIFTIGLTIAMLMCAHGVRQGRNTVGDFVMINSMMIQLYQPLNFMGMVYREIKQAIIDIEKMFGVLTRDAEVKDAPRAKPLVVTAGHVRFEDVRFAYEPERPILQGLSFEVPAGKTVAIVGPSGAGKSTISRLLFRLYDVSGGRILIDGQDIRDVTQVSLRAQIGMVPQDTVLFNDTIRYNIRYGRWDADDAAVEEAARLAQIDGLIRMAPKGYETQVGERGLKLSGGEKQRVAIARTILKAPPILVLDEATSALDSHTEQEIQDALDGVSRNRTSLVIAHRLSTIVAADEIIVLDRGRIAERGTHAELLAKSGLYAGMWNRQREAEEAREKLAQIGDDAAAPNRNPPARSEPDVAGPDLSGPVASAAE

SEQ ID NO: 7465 - DNA, 1764 bp, Bacillus thuringiensis serovar konkukian str. 97-27
  CDS (1)..(1764): transl_table=11
atgactgagaaaaaacagagcgatttaagaagattgctttcttatatgaagccatataaaggactattagcattagcatttttatttctagttggtgcaactgtaactgaaatgatgggaccttttttaattaaacaatttcttgatgaacatttagtaccacgtaactttgatcaatcagcacttgttacactatttgtagtgtatattgttgctcacttattaaaagtattatttacttatttagacttgttatattttcaaaatatcgcttttaaaattgttcaagatatgcgtgttgaagtatatgagcatgttcaaaagttatcattaagtttctttgatcgtacgccgattggtacgcttgtatcacgcataacgaatgatacggaagcaattaaagatttttatgtgagtgtattatcaacatttgttaaaaatatcgtatttttaataggtattttagtagcgatgtttttattaaacgtaaaattagcgctattttctctcgtattaattccaataatgttcgcgattatggtgctatatcgccggaaaagtgcagctttttatttagaagtgcgtaatcaattaagcgtgttaaatgcaaagttaaacgaatccattcaagggatgaatattgttcaagtgtttagacaagaaaagcgtatgagaaaagagtttgaagaagtgaacaataaacattatagtgcagggcgacgtacgttaaagttagatgcgttgcttttacgtccagctacagatttagtacatattgtagcgattgcattagtacttggtttatttggaattgatgctttgaaaagtcctgttgaagtaggcgttttatatgcgtttgttaactatatacatcgtttcttccagccggtaaatgagatgatgatgaaattatcatttttccagcaggcacttgtttcatcatcacgtgtatttcatttaatggatgagaaagatttagcaccagttcaaaaaggggatggaaatcctcaagtcattaatggagatattgaatttaaaaatgttactttttcttatgatggaaaacgtgatgttttaaaaaatgtatcttttcacgtgaaacaagggcaaacggttgctttcgttgggcacacgggtagcggaaaaagtaccattatgaatttattaatgcgattttataatattaagtctggaaatattgtaatagatggtgtagatttagaaaaatttgaagaacaagaaattagaaagaaaataggacttgtactgcaagatgcatttttatttgcgggaaatgtgaaacaaaatattcgtatgtataatgaagaaattacggatgaagaagtaaaagaagcggcacaatttgtgcaagcgaatacgtttattgaaaaattaccagagcagtatgaaacagaagtagtagaaagaggaactgcattttctagtggtcaacgacaattaattgcttttgctagaacgatagcaacgaatccgaaagtattagtattagatgaagcaacagctaatattgatacagaaactgaagatgcgatccaaacagcgttacagcaaatgcgaaaaggacggactacgatagcgattgcacacagattatctaccatacaagatgcagatcaaatttttgttatgcacgatggagagatagtagagagagggacacatcaagaattactgagtgaacaaggattgtattataatatgtacttactacaaaataaaggaagtttacaaaaggccttgtag

SEQ ID NO: 7466 - protein, 587 aa, Bacillus thuringiensis serovar konkukian str. 97-27
MTEKKQSDLRRLLSYMKPYKGLLALAFLFLVGATVTEMMGPFLIKQFLDEHLVPRNFDQSALVTLFVVYIVAHLLKVLFTYLDLLYFQNIAFKIVQDMRVEVYEHVQKLSLSFFDRTPIGTLVSRITNDTEAIKDFYVSVLSTFVKNIVFLIGILVAMFLLNVKLALFSLVLIPIMFAIMVLYRRKSAAFYLEVRNQLSVLNAKLNESIQGMNIVQVFRQEKRMRKEFEEVNNKHYSAGRRTLKLDALLLRPATDLVHIVAIALVLGLFGIDALKSPVEVGVLYAFVNYIHRFFQPVNEMMMKLSFFQQALVSSSRVFHLMDEKDLAPVQKGDGNPQVINGDIEFKNVTFSYDGKRDVLKNVSFHVKQGQTVAFVGHTGSGKSTIMNLLMRFYNIKSGNIVIDGVDLEKFEEQEIRKKIGLVLQDAFLFAGNVKQNIRMYNEEITDEEVKEAAQFVQANTFIEKLPEQYETEVVERGTAFSSGQRQLIAFARTIATNPKVLVLDEATANIDTETEDAIQTALQQMRKGRTTIAIAHRLSTIQDADQIFVMHDGEIVERGTHQELLSEQGLYYNMYLLQNKGSLQKAL

SEQ ID NO: 7467 - DNA, 1776 bp, Erwinia carotovora subsp. atroseptica SCRI1043
  CDS (1)..(1776): transl_table=11
atgaatagccctcaacagttttggccaaccctgaagcgtctgttggcctatggttctccctggagaaaaccgctgatacaaggcgtactcatgctgtgggttgctgctatcgctgaagtctctggtcccgtgctggtgagctattttattgacgatctggtggcaaaaggtcagtttccgctggcgattgcggctggcttggcaatggtctatatcctgctgcaaattctggcggcctcgctgcactatttccagacactgttgtttaaccgggtcgcagtgggtgtcgttcagcaactgcgtattgatgtgatggatgccgctttgcgtcagccgcttagcacatttgatacacagcctgttgggcagttgatttcacgcgtcaccaatgacaccgaggtagtgaaagatctgtatgtcatggtggtgtcaacggtattacgcagtgcggcgttggttggtgcgatgctggtggcgatgttcagtctgaactggcagatggcgctcgttgcgctgatgattttccctgcggtcgcgacggtcatggtgctctatcaccgctttagtacgccgactgtgcgcaaggtgcgaagctatctggcggacattaacgatggtttcaacgaagtgattaatggcatgggtgtcatccagcaatttcgccagcaggcacgctttggcaagaagttgggtgcagccagccatgagcattatgaagcccgtatgaaggccttgcgtctggaaggttttctgctgcggcctctgctgagcttatttgccgcgatggtactgtgtggtttgttgatccaatttggttttagctcgatggggtcggttggcgttggggttctgtacgcgtttatcaactaccttggccgcttaaatgaaccactgattgagctgaccacccagcaatccatgttacagcaggcggtcgtcgccggtgaacgtatctttgaactgatggatggcaaaaagcagacctacggcaatgacgagcgccccctgagtaccgggcgcgttgatattgacgatgtctctttttcttatggtacagaaacacgcgtgctacagaatatttccctgacgatacctgagcgcggttttgtcgccttagtggggcataccggcagtgggaaaagtacgctagccagcctacttatggggtattacgtgccagatgagggtgagattcggcttgatgaccggccgctgtcgacgctctctcataccgttttgcgccaaaatgtggcaatggttcaacaggatcccgttgtcctggcggagtcgatgttcgtgaatgtgactctgggacgtgatatcagcgaagaggccgtctggcgtgtgctggaagtggtgcagcttgctgaactggttagggattttcctgaagggttgcatacacgcattggtgagcaagggaacaacttgtctaccggacaaaaacagctgttagcgattgcgcgggtcttggtgcaaacgcctaaaatcctgattctcgatgaggctactgcgaatattgactctggcacggagcagtcggtgcaaaaggcgttgcgcatcatcagggaacagacgaccttgattatcatcgcccatcggctttctactatcgttgaggctgacatgattatggtgctccatcatgggcaaactgttgagcggggaacgcacgagcaactgctgcaacagcagggccgctattatcaaatgtatcaattacaactggccggagaggatctcgctgccattagcacggaatcttgccctgcataa

SEQ ID NO: 7468 - protein, 591 aa, Erwinia carotovora subsp. atroseptica SCRI1043
MNSPQQFWPTLKRLLAYGSPWRKPLIQGVLMLWVAAIAEVSGPVLVSYFIDDLVAKGQFPLAIAAGLAMVYILLQILAASLHYFQTLLFNRVAVGVVQQLRIDVMDAALRQPLSTFDTQPVGQLISRVTNDTEVVKDLYVMVVSTVLRSAALVGAMLVAMFSLNWQMALVALMIFPAVATVMVLYHRFSTPTVRKVRSYLADINDGFNEVINGMGVIQQFRQQARFGKKLGAASHEHYEARMKALRLEGFLLRPLLSLFAAMVLCGLLIQFGFSSMGSVGVGVLYAFINYLGRLNEPLIELTTQQSMLQQAVVAGERIFELMDGKKQTYGNDERPLSTGRVDIDDVSFSYGTETRVLQNISLTIPERGFVALVGHTGSGKSTLASLLMGYYVPDEGEIRLDDRPLSTLSHTVLRQNVAMVQQDPVVLAESMFVNVTLGRDISEEAVWRVLEVVQLAELVRDFPEGLHTRIGEQGNNLSTGQKQLLAIARVLVQTPKILILDEATANIDSGTEQSVQKALRIIREQTTLIIIAHRLSTIVEADMIMVLHHGQTVERGTHEQLLQQQGRYYQMYQLQLAGEDLAAISTESCPA

SEQ ID NO: 7469 - DNA, 1857 bp, Leifsonia xyli subsp. xyli str. CTCB07
  CDS (1)..(1857): transl_table=11
atgttcggcggcacaccggcgaagaaggcggagcacttctggccgtcgttcaaccggctgatcgggttgctgcgcacggaacggctcgcgatggtctgggtcaccctgctcgtggtggtctcggtcgcgctcaccgtgatcgcgccgaagatcctcgggaacgccaccgatgtgatcgtcaacggcgtcaccggcgctcggcaggcgaacggccagcccgctcccggtcccggggtcgacttcacggatctcggccggctgctgatgatcgtgctcgccatgtacatcgccgcgtcgctgctgcaatggtggcagggctacattctgaacgcgctcgtgatgcgagtggtctaccgcttgcgcgccgagatcgaggacaaactcaaccgtctgccgctcagctacttcgacacccgtcagcgcggtgatctgatgtcgcgcgtcacgaacgatgtcgacaacatccagaccgctctgcagcaggccttctcacagctgatccagtcggttctgatggtcatcgggatcggcgtcatgatgttcatcgtgtcgtggcagctcgcgctcatcgcgcttatcagcatcccgctctccggcatcatcgccggggtgatcggcacgcgctcacagaagctgttcaaacagcagtggaactccaccggcgccctcaacgggcacatcgaggagtcctactccgggctcgacctggtgcgcgccttcggccgcgatgaggtcatgctggaacggttcgacgagcgcaacggcaagctctggtcgtcgatggtcggtgcgcagttcgtctccggcatgatcatgccggcgatgaacttcgtctcctacctctcctacgtgctgatcgccgtcgtcggtgcgctgcgggtgaccgcaggccagctgagcattggcgatgtgacggcgttcatccagtactcgcgcgagttctcccagcccatcggccagatcgcgggcatggcgaacatgttgcagtccggcgtcgcgtcggcggagcgcaccttcgagttcctcgactcggacgagcagacgcccgaacacgagaccgagcacctccccgagcgggcgaacggccgcgtcgagctggacagcgtcgacttctcctacgatcccgagaccgagctcatccgcgatctctcgctctccgtcgagcccggccacacggtcgcgatcgtcggcccgaccggagccggaaagacgacgctggtcaacctcatcatgcggttctacgagctgaacggcggtgccatccgcctcgatggcatcgacaccaccgacctctcgcgctccgagttgcgcggtcaggtcgggatggtgctgcaggatgcgtggctcttctccgggaccattcgtgagaacatccgctatggccgcctcgaagcatccgacgaggaggtggtcgctgccgcgaaggcgacgatggtcgaccgtttcgtccgccagctgccggacggctacgacacggtcatcgaggcggacggcggcaacgtctccgcgggcgagcgccagttgctcaccatcgcccgggctttcatcgccaacccgtcgctgctcatcctggacgaagccacgtcctcggtggacacccgcaccgagttgctggtgcagcacgcgatggcggcgttgcgcagcgaccggacttcgttcgtgatcgcccaccgcctgtccaccatccgggacgcgcacaccatcctcgtgatggagaagggccggatcgtggagcagggcgatcacaagaccctcctcgcgaagaagggcgcctactacgacctgtacatgacgcagttccgcggcgcggctgaggaatcgggccaggaagagcccgagggcgtcgccgcgagatga

SEQ ID NO: 7470 - protein, 618 aa, Leifsonia xyli subsp. xyli str. CTCB07
MFGGTPAKKAEHFWPSFNRLIGLLRTERLAMVWVTLLVVVSVALTVIAPKILGNATDVIVNGVTGARQANGQPAPGPGVDFTDLGRLLMIVLAMYIAASLLQWWQGYILNALVMRVVYRLRAEIEDKLNRLPLSYFDTRQRGDLMSRVTNDVDNIQTALQQAFSQLIQSVLMVIGIGVMMFIVSWQLALIALISIPLSGIIAGVIGTRSQKLFKQQWNSTGALNGHIEESYSGLDLVRAFGRDEVMLERFDERNGKLWSSMVGAQFVSGMIMPAMNFVSYLSYVLIAVVGALRVTAGQLSIGDVTAFIQYSREFSQPIGQIAGMANMLQSGVASAERTFEFLDSDEQTPEHETEHLPERANGRVELDSVDFSYDPETELIRDLSLSVEPGHTVAIVGPTGAGKTTLVNLIMRFYELNGGAIRLDGIDTTDLSRSELRGQVGMVLQDAWLFSGTIRENIRYGRLEASDEEVVAAAKATMVDRFVRQLPDGYDTVIEADGGNVSAGERQLLTIARAFIANPSLLILDEATSSVDTRTELLVQHAMAALRSDRTSFVIAHRLSTIRDAHTILVMEKGRIVEQGDHKTLLAKKGAYYDLYMTQFRGAAEESGQEEPEGVAAR

SEQ ID NO: 7471 - DNA, 1824 bp, Yersinia pseudotuberculosis IP 32953
  CDS (1)..(1824): transl_table=11
atgaataacgctcagcaactttggccgacattgaaacgcctgctttcctacggttcgccttatcgtaaaccgctggggctggcagtcttaatgctgtgggttgcggcagcagcagaggtaagtggtccactactgatcagttattttattgaccatgtagtcgccaaaggcacattacctctggggctagtcagtgggttggcattggcctatctgttgttgcaattattggccgcgacattgcactattttcaggcattgctgtttaaccgtgcggcagtgggggtcgttcagcggctacgcattgatgtgatggacgctgcattacgccaacctctcagtgcttttgatactcagcctgttgggcagttgatttcccgagtaaccaatgacactgaagtgatcaaagatttatatgtcatggtggtttctacggttttgaaaagtgcggccttaattagtgcgatgctggtggcgatgtttagtctggattggcggatggcgctgatttcaatttgtatcttccctgcggtgttggtggtgatgacaatctatcagcgctatagcacccctatcgttcgccgggtacgatcctatctggctgatattaacgatggttttaatgaagtcattaatggcatgggcgtcattcagcaattccgtcagcaggcccgtttcggggaacgcatggcgtctgccagccgtgcgcattatgttgcccggatgcaaaccttacggctggagggctttctattacgccctttattgagcctattctccgccttggtgttatgtggtttactgctgcttttcggtttcagccctgaaggttctgtgggggtgggtgtgctgtatgcgttcattaattaccttggccgcctgaatgagccgttgattgaactgacatcgcagcaatcaattatgcaacaggccgtggtggcaggagagcgtatttttgatctgatggatcgtgcgcagcaggactatggtagcgacaatattcccttgagcagtggccgtattcaggtggaaaacgtcagctttgcgtatcgctcggataaaatggtgttacacaatatttctctcagtgtcccctcccgtggatttgtggctttagttgggcacaccggcagtggtaaaagtacgctagctaacctgttgatgggctactatcccattcagcaaggtgagattttgcttgatggccggccattatcccgcctctcccatcaggttctgcgccagggggtagcgttggtacagcaagatcccgtggtgttggctgactccttctttgcgaatatcacccttgggcgtgaccttagtgaacagcaagtgtgggaggcactcgaaaccgttcaattggcacagttggttcgtaccttacctgatggcttgtacagtttacttggggaacagggcaataccttgtctgttgggcaaaaacagttgctggcgatggcgcgggtgttggtgcaagcgccccaaatcctgattctggatgaagccactgcgaatattgactctggcactgaacaggctattcagcgggcattacaggtgattcgaaaaaataccacgctggtggttattgctcatcgcctttcgacgattgtggaggcggatagtattttggtactgcaccgtggtgttgcggttgagcagggtaatcatcaagcgctgctagctgcccgtgggcgttattaccagatgtaccagttgcagttagtcagcgaagatttggctgccattgatcaggaagctattgataaaggctctattgatcaaagcactattgatcaagccggaatgagcgtgagttaa

SEQ ID NO: 7472 - protein, 607 aa, Yersinia pseudotuberculosis IP 32953
MNNAQQLWPTLKRLLSYGSPYRKPLGLAVLMLWVAAAAEVSGPLLISYFIDHVVAKGTLPLGLVSGLALAYLLLQLLAATLHYFQALLFNRAAVGVVQRLRIDVMDAALRQPLSAFDTQPVGQLISRVTNDTEVIKDLYVMVVSTVLKSAALISAMLVAMFSLDWRMALISICIFPAVLVVMTIYQRYSTPIVRRVRSYLADINDGFNEVINGMGVIQQFRQQARFGERMASASRAHYVARMQTLRLEGFLLRPLLSLFSALVLCGLLLLFGFSPEGSVGVGVLYAFINYLGRLNEPLIELTSQQSIMQQAVVAGERIFDLMDRAQQDYGSDNIPLSSGRIQVENVSFAYRSDKMVLHNISLSVPSRGFVALVGHTGSGKSTLANLLMGYYPIQQGEILLDGRPLSRLSHQVLRQGVALVQQDPVVLADSFFANITLGRDLSEQQVWEALETVQLAQLVRTLPDGLYSLLGEQGNTLSVGQKQLLAMARVLVQAPQILILDEATANIDSGTEQAIQRALQVIRKNTTLVVIAHRLSTIVEADSILVLHRGVAVEQGNHQALLAARGRYYQMYQLQLVSEDLAAIDQEAIDKGSIDQSTIDQAGMSVS

SEQ ID NO: 7473 - DNA, 1863 bp, Symbiobacterium thermophilum IAM 14863
  CDS (1)..(1863): transl_table=11
atgagcgcccggcacggtccccgacccggtcatggtcccggagccggcccggcgatggcgctggtgggcgagaagccccgcgacttccgcgggaccctgcggcggctgctgcgctacctgcggccgaggctctggcagctgggcgccgtcttcctgctggcggctctcagcacggtcttcagcatcgtgagcccgcgcatcatgggcaaggccaccaccatcctgttcgaagggctgctggcgaagctgagcggcgtccccggcgcggggatcgacttcggccgcatcgcccgcatcctggtcctgctggggctgctctacgtggcgagtgccgccttcggcatcgtccagcagttcgtcatgtccggcgtctcccagcgcacggtctacgacctgcgcaaccaggtgaacgagaagctggcccggctgcccctcagcttctacgaccggaagacccacggcgaggtcctgagccgggtgaccaacgacatcgacaccatcgccgggacgctgcagcagagcctgacccagctgatcaccgccatcgtcacgctggtgggcgtggtggtgatgatgctctccatcagccctgtgctcaccctggtcaccctggtctcgctgccgctgtcgctcctggtcacggtcggcgtcgcccggcggtcacagggctacttcaaggcgcagcagaaggcgctgggcgagctgaacggccacgtcgaggagacctacaccggccaccaggtggtgaaggccttcggccgggaggaggacgtggtggccgagttcgaccgcatcaaccagcggctgtacgaggccggctggaaggcccagttcgtctcgggcatcatcatgccgctgatggcgttcgtcaacaacatcggctacgtgatcgtggccgtggtcggcggcatcttcgtcgcccgccgcgcggtggagatcggcgacatccaggccttcctccagtacgcccggcagttcagccagccgatcacccagacggccaacatcgccaacatcctccagtccaccatcgccgccgccgagcgggtctttgagctcctggacgagccggagatcgtcccggacccggccgagccggtgcggctggagcaggtccggggcgaggtccggttcgagaacgtcagcttccgctacaagccggacgagccgctgatcgaggacctgaacctcacggcccggcccggccaggtgatcgccatcgtcggccacaccggcgccggcaagaccaccctggtcaacctgctgatgcgcttctacgagatcgacggcggccggatcacggtcgacggcgtggacatccgccgcctccgccgcgacgacctgcgcagcctcttcggcatggtgttgcaggacacgtggctcttccatggcacgatccgggagaacatcgcctacggccgggagggggccaccgaggaggagatcgtccgggcggcaaaactcgcccacgccgacggcttcatccgatccctgcccgacggctatgacaccgtgctcaacgaggaggcctcgaacatctcccaggggcagaagcagctgctcaccatcgcgcgggcgttcctggccgacccgccgatgctgatcctggacgaggcgacgtcctccgtggacacccgcacggagctgcagatccagcaggccatgcagaccctcatgaagggcaggacgagcttcgtgatcgcccaccggctctcgaccatccgggaggcagacctgatcctggtcatggaccacggccggatcgtggagcagggcacgcaccgggagctcctggccgcaggcggcccgtacgcggacctgtactacagccagttcgccgccgggcagggcctggccggctga

SEQ ID NO: 7474 - protein, 620 aa, Symbiobacterium thermophilum IAM 14863
MSARHGPRPGHGPGAGPAMALVGEKPRDFRGTLRRLLRYLRPRLWQLGAVFLLAALSTVFSIVSPRIMGKATTILFEGLLAKLSGVPGAGIDFGRIARILVLLGLLYVASAAFGIVQQFVMSGVSQRTVYDLRNQVNEKLARLPLSFYDRKTHGEVLSRVTNDIDTIAGTLQQSLTQLITAIVTLVGVVVMMLSISPVLTLVTLVSLPLSLLVTVGVARRSQGYFKAQQKALGELNGHVEETYTGHQVVKAFGREEDVVAEFDRINQRLYEAGWKAQFVSGIIMPLMAFVNNIGYVIVAVVGGIFVARRAVEIGDIQAFLQYARQFSQPITQTANIANILQSTIAAAERVFELLDEPEIVPDPAEPVRLEQVRGEVRFENVSFRYKPDEPLIEDLNLTARPGQVIAIVGHTGAGKTTLVNLLMRFYEIDGGRITVDGVDIRRLRRDDLRSLFGMVLQDTWLFHGTIRENIAYGREGATEEEIVRAAKLAHADGFIRSLPDGYDTVLNEEASNISQGQKQLLTIARAFLADPPMLILDEATSSVDTRTELQIQQAMQTLMKGRTSFVIAHRLSTIREADLILVMDHGRIVEQGTHRELLAAGGPYADLYYSQFAAGQGLAG

SEQ ID NO: 7475 - DNA, 1839 bp, Symbiobacterium thermophilum IAM 14863
  CDS (1)..(1839): transl_table=11
atggcggacttccgcgaagaagaggcccttggcaaggtctacgacgcccgactcatggcccggctgctctcctacgcccgtccgcactggaaggccctgctggtatgcattgcgatgctcggcgtggccgtgagcctggacttgctcgtccccaagctggtgcaggtcgccatcgacgactacctcgtcctcggcgacgcccctgccgcggcggtcggcctcaaccggctcgccttctggctgatcgcggcgctggtcgccaacttcttcgtctcctacggcgaggttctgctgctccagttcaccgggcagaagatcatctatgcgatccgcaaggatctcttcggccaccttcagcggctgcacctccagttctttgaccgcaacccggccgggcggctggtcacccgggtcaccaacgacaccgagaccctgagtgagatgtacaccagtgtgctggtcaacctgttccgggacgtcttcacgctggtcggggtagccgtggttatggtgaggacccatcccaggctggccgcggtcagcctcgccctcatcccgctggtcgcctactacacccgcttcttcgcagcgaaggcgcgcgacgcctggcgtgaggtgcgggtgcggctcgcccgcatcaacgccttcgtctcggagcacgtgagcggcatgcgggtggtgcagctcttcgcccgggaggcgcagacgttcgccgagttcaaacgggagaacgatgagtacaaccgggcctcctggcggcagttgatggtctgggccgtcttccggcccgtcctcgacctcctggccagcgtcaccatcgccctggtgctgtggtatggcggcctgcaggccctgggcggcggcctcacgcccggcgtcctgctcctgttcgtcaccctctcccgccgcttcttcgagccactcatgcaactggccgagaagttcaacatcctgcagagcgccatggcctcggccgagcgcatcttcatgctgatggacacgccgccggccatcgtagacccgccggaccccaaaccgctgggccgggtcaccggcgcggtggagttccgcaacgtctggttcgcgtacaacgagggcgactgggtcctgaaggacgtgtcgttccgggccgagccgggccagaccatcgccttcgtcggccacaccggggccggcaagtcctccatcatcaacctgctgtgccggttctacgacgtgcagaagggccaggtgctggtggacggcctcgacgtacgggaggtcgccaccgccgagctgcggcggtccatcggcctcatggcgcaggacgtcttcctcttcagcggcgacatccggtccaacatccgcttgggcaacacggagatcagcgatgagcgggtgcgggaagcggcccgcatcgtgggggcggacgagttcatccgcgagctgcgcaacggctacgacgagcccgtggccgagcggggcgccaccctttcggcggggcagcggcagctgctctccttcgcccgggccctggccttcgatcccccgatcctcgtgctggacgaggccaccgcctccatcgattccgagaccgaggcgctgatccagaaagccctgagggagctgacgaaggggcgcaccactttcatcgtggcgcaccggctctccaccatccagcacgcggatcagatcatcgtgctgcacaagggccggatccacgagcagggcacccacgaggagctgctggccaggcagggcctgtactacaagctctggcggctgcagttcgaggagcacctggaggagcgggatgcgccgaccgagacgctgatgccggcgacccacccgtcggcgtaa

SEQ ID NO: 7476 - protein, 612 aa, Symbiobacterium thermophilum IAM 14863
MADFREEEALGKVYDARLMARLLSYARPHWKALLVCIAMLGVAVSLDLLVPKLVQVAIDDYLVLGDAPAAAVGLNRLAFWLIAALVANFFVSYGEVLLLQFTGQKIIYAIRKDLFGHLQRLHLQFFDRNPAGRLVTRVTNDTETLSEMYTSVLVNLFRDVFTLVGVAVVMVRTHPRLAAVSLALIPLVAYYTRFFAAKARDAWREVRVRLARINAFVSEHVSGMRVVQLFAREAQTFAEFKRENDEYNRASWRQLMVWAVFRPVLDLLASVTIALVLWYGGLQALGGGLTPGVLLLFVTLSRRFFEPLMQLAEKFNILQSAMASAERIFMLMDTPPAIVDPPDPKPLGRVTGAVEFRNVWFAYNEGDWVLKDVSFRAEPGQTIAFVGHTGAGKSSIINLLCRFYDVQKGQVLVDGLDVREVATAELRRSIGLMAQDVFLFSGDIRSNIRLGNTEISDERVREAARIVGADEFIRELRNGYDEPVAERGATLSAGQRQLLSFARALAFDPPILVLDEATASIDSETEALIQKALRELTKGRTTFIVAHRLSTIQHADQIIVLHKGRIHEQGTHEELLARQGLYYKLWRLQFEEHLEERDAPTETLMPATHPSA

SEQ ID NO: 7477 - DNA, 1764 bp, Bacillus cereus E33L
  CDS (1)..(1764): transl_table=11
atgactgagaaaaaacagagcgatttaagaagattgctttcttatatgaagccatataaaggactattagcattagcatttttatttctagttggtgcaactgtaactgaaatgatgggaccttttttaattaaacaatttcttgatgaacatttagtaccacgtaactttgatcaatcagcacttgttacactatttgtagtgtatattgttgctcacttattaaaagtattatttacttatttagacttgttatattttcaaaatatcgcttttaaaattgttcaagatatgcgtgttgaagtatatgagcatgttcaaaagttatcattaagtttctttgatcgtacgccgattggtacgcttgtatcacgcataacgaatgatacggaagcaattaaagacttttatgtgagtgtattatcaacatttgttaaaaatatcgtatttttaataggtattttagtagcgatgtttttattaaacgtaaaattagcgctattttctctcgtattaattccaataatgtttgcgattatggtgctatatcgccggaaaagtgcagctttttatttagaagtgcgtaatcaattaagcgtgttaaatgcaaagttaaacgaatccattcaagggatgaatattgttcaagtgtttagacaagaaaagcgtatgagaaaagagtttgaagaagtgaacaataaacattatagtgcagggcgacgtacgttaaagttagatgcgttgcttttacgtccagctacagatttagtacatattgtagcgattgcattagtacttggtttatttggaattgatgctttgaagagtcctgttgaagtaggcgttttatatgcgtttgttaactatatccatcgtttcttccagcctgtaaatgagatgatgatgaaattatcatttttccagcaggcacttgtttcatcatcacgcgtatttcatttaatggatgagaaagatttagcaccagttcaaaaaggggatggaaatcctcaagtcgttaatggagatattgaatttaaaaatgttactttttcttatgatggaaaacgtgatgttttaaaaaatgtatcttttcacgtgaaacaagggcaaacggttgctttcgttgggcacactggtagcggaaaaagtaccattatgaatttattaatgcgattttataatattaagtccggaaatattgtaatagatggtgtagatttagaaaaatttgaagaacaagaaattagaaagaaaataggacttgtactgcaagatgcatttttatttgcgggaaatgtgaaacaaaatattcgtatgtataatgaagaaattacggatgaagaagtaaaagaagcggcacaatttgtgcaagcgaatacgtttattgaaaaattaccagagcagtatgaaacagaagtagtagaaagaggagctgcattttctagtggtcaacgacaattaattgcttttgctagaacgatagcaacgaatccgaaagtattagtattagatgaagcaacagctaatattgatacagaaactgaagatgcgatccaaacagcgttacagcaaatgcgaaaagggagaacgactatagccattgcgcaccggttatctacaattcaagatgcagaccaaattttcgttatgcatgatggagagatagtagaaagaggaacacaccaagaattactgagtgaacaagggttgtattataatatgtatttactacaaaataaaggaagtttacaaaaggccttgtag

SEQ ID NO: 7478 - protein, 587 aa, Bacillus cereus E33L
MTEKKQSDLRRLLSYMKPYKGLLALAFLFLVGATVTEMMGPFLIKQFLDEHLVPRNFDQSALVTLFVVYIVAHLLKVLFTYLDLLYFQNIAFKIVQDMRVEVYEHVQKLSLSFFDRTPIGTLVSRITNDTEAIKDFYVSVLSTFVKNIVFLIGILVAMFLLNVKLALFSLVLIPIMFAIMVLYRRKSAAFYLEVRNQLSVLNAKLNESIQGMNIVQVFRQEKRMRKEFEEVNNKHYSAGRRTLKLDALLLRPATDLVHIVAIALVLGLFGIDALKSPVEVGVLYAFVNYIHRFFQPVNEMMMKLSFFQQALVSSSRVFHLMDEKDLAPVQKGDGNPQVVNGDIEFKNVTFSYDGKRDVLKNVSFHVKQGQTVAFVGHTGSGKSTIMNLLMRFYNIKSGNIVIDGVDLEKFEEQEIRKKIGLVLQDAFLFAGNVKQNIRMYNEEITDEEVKEAAQFVQANTFIEKLPEQYETEVVERGAAFSSGQRQLIAFARTIATNPKVLVLDEATANIDTETEDAIQTALQQMRKGRTTIAIAHRLSTIQDADQIFVMHDGEIVERGTHQELLSEQGLYYNMYLLQNKGSLQKAL

SEQ ID NO: 7479 - DNA, 2019 bp, Bacillus licheniformis ATCC 14580
  CDS (1)..(2019): transl_table=11
atgacaacaggaaaaaggcttttccaatatgcgcttctttataaaaaaattctcatctgggcgctcgtcatgctgacgatcgccgtcacagccgagctgactgggccgatgatcgccaaaaagatgatcgacgatcatattctcggaattgaaaaaacgtggtatgaaacgacagagaactcgaaatatactgtttcctacaaaggaaaggaatatatcagggaagacaggacagacccttcagctgaaaagctgcaggaagttcacatctttcaagtcggtatgaactactactttgtggggaaaccggtttcctttgacggggagcggacggtttccgggggagagctgagaatgacgagcggagaccggacggaaacctacaaggccgatcgcctgtctttgtctgaagtgtatgctttttacgagcctgaaataggagggctgatctcgctcgtttctatttatttcggccttctcattttctcgatctttttccattacggccaattctacctcttgcagatgagcgcaaaccgcatcattcaaaagatgagacaggatgtattcgccaacattcaaaggcttcctatccgctattttgataatttgccggcaggaaaaatcgttgcaagggtaacgaatgataccgaagcgatccgcgatctgtatgtgaccgttctttcgacgtttgttacaaatatcatttatatggccggaatattcgccgcactgtttttccttgatgtcaggctggccggcgtctgtctgttgattgtgcccctgattgtcatttgggctgctgtttatcgaaaattcgcttcaggctacaatcataaacttaggtcaatcaacagcgagatcaacgccaaaatgaatgaatcgattcaaggcatgacgattattcaggcattccggcgcggacaggacacaaaagaagaatttgaacagctgaatgacagccactttcattaccaaaataaaatgctgaaattaaactcgcttatgtcccacaacttggtcaacattctgagaaatgtgatgttcaccgctctaatatggtatttcgggggagctgccctgaacgcggaaggaatgatttcaatcggcgtactctatgcattcgtcgattacttgaatcgtttatttcagccgattacgggcatcgtcaaccagtttgccaagcttgaattggcgcgcgtatcatcggagcgggttttccgcctgctggatgagccgggcgtcgatgtcaaagagccgagcagcgaaagagcgcgggggcgagtcgtgtttgaggatgtatcatttcgctatcatgacggtgaagatgtgctgaaaaacatctcatttgaagcgaagcaaggggagaccgttgcattggtcggtcatacgggctcaggcaaaagctcaatcatgaatgttcttttccgcttttacgatattgaaaagggcgatgtcaaaatcgacggcagaagcatatatgatatgtcaaggcaggaaatcagaaagcatatgggcatcgttctccaggatccttacttattttccggcacgattgcttcaaatgtcagccttgacaatgctgatattactagagagcaaatagaagacgccttgaaacaggtcggggctcttgaggtgctcgcccgtctgccgaaaggccttgacgagccggtcatcgaaaaaggaagcaccctttcttcaggagaaaggcagctgatctcgtttgcccgtgcgctggcatacgatccggctattcttattttagacgaggcgacggcccatatcgataccgaaacagaagcggtcattcaaaaagcgcttgacgtcgtcaaacaagggcgcacaacctttatcatcgcccacaggctgtcaacgatcaaaaacgccgaccagattctggtgcttgaaaaaggccggattatcgaaaggggaaatcatgaagagctgatgaagcaaaaaggccaatactatcaaatgtatgaactgcaaaaggggaaaggaaccctgatagggtaa

SEQ ID NO: 7480 - protein, 672 aa, Bacillus licheniformis ATCC 14580
MTTGKRLFQYALLYKKILIWALVMLTIAVTAELTGPMIAKKMIDDHILGIEKTWYETTENSKYTVSYKGKEYIREDRTDPSAEKLQEVHIFQVGMNYYFVGKPVSFDGERTVSGGELRMTSGDRTETYKADRLSLSEVYAFYEPEIGGLISLVSIYFGLLIFSIFFHYGQFYLLQMSANRIIQKMRQDVFANIQRLPIRYFDNLPAGKIVARVTNDTEAIRDLYVTVLSTFVTNIIYMAGIFAALFFLDVRLAGVCLLIVPLIVIWAAVYRKFASGYNHKLRSINSEINAKMNESIQGMTIIQAFRRGQDTKEEFEQLNDSHFHYQNKMLKLNSLMSHNLVNILRNVMFTALIWYFGGAALNAEGMISIGVLYAFVDYLNRLFQPITGIVNQFAKLELARVSSERVFRLLDEPGVDVKEPSSERARGRVVFEDVSFRYHDGEDVLKNISFEAKQGETVALVGHTGSGKSSIMNVLFRFYDIEKGDVKIDGRSIYDMSRQEIRKHMGIVLQDPYLFSGTIASNVSLDNADITREQIEDALKQVGALEVLARLPKGLDEPVIEKGSTLSSGERQLISFARALAYDPAILILDEATAHIDTETEAVIQKALDVVKQGRTTFIIAHRLSTIKNADQILVLEKGRIIERGNHEELMKQKGQYYQMYELQKGKGTLIG

SEQ ID NO: 7481 - DNA, 1794 bp, Legionella pneumophila subsp. pneumophila str. Philadelphia 1
  CDS (1)..(1794): transl_table=11
ttgcgtacaagattaacttctaaattaatgaaaaataacctccctattaaatcccgtctgctatacaaacgcttgttaagctatgtaaaacctttttggccagttttattattaggagtattggcgaatatcctatattcgggcattgacgccggctttacctatatgaccaagctttttttggataaaagctttattactattgatctgaattttgttaaacaaatcccgctgattgttttaatcggtattactctgagaggattggtcagttctttaggcagttattgtatgacatgggtggctcgctcagtagttaaagtattaaggcagaccgtattttctcatattattcacttaccggcggattattatgacgaagccacatcaggtcagcttctttcaaaaattttgtacgatgttgagcaagtggcacaagtcagtgcggatgccctaacagattttattcaaaatatatgtctggtcatcggtttgctgaccgttatgatggttatatgttggcagctgtctttgatgtttttattaactatcccctttgtgggaatcattgttaattatactaataaaagagtaagacgaattagtcacaaagtccaaaaaaccatgggcgaagtcacagaaattgccagtgaggcaatcgagggttatcgagtggttcgcatctttggtggtgaacggtatgaaataacaaaatttaataaagcaacagaatattcacgcaaaaacgatatgaaagttgccataagcaaggcgattaatgtttcaggcgttcaattggtgatcgctatcgggattgccacgattattatggctgccattcatttatctactgtcattactatcagtgccggttcttttttggcaattatcgcagccatgttgcaattaataaaacctatgaaaactctgactactcttaacgcaaccatacaaagaggcttggctggtgcagaaagtgtatttaatttgcttgatttgcctttggaaagaaacaatggtttgatattaaaagaaaagatacgtggtgaaattgagtttaagcatgtataccacgcataccgacagggtcaaaatattttacatgatgtcaattttgtaattgaagcaggaacgtctgttgctctggttgggcattcaggaagtggtaaaacgaccatagccagtttattaccccgcttttatgaattgagtcaaggtatgattactttagatggcatgcccattcaacagcttagtctggaaagtttacgcaagcagatgtccttggtcagtcaaaacgtgacactttttaatgatactttggctaacaacatagcctatggtcgttttgatgcgagccgagagcaaattattactgcggctaaactggcctatgctgatgagtttattaagcaattacctgatggctatgataccagggtcggagaaaatggggtgttgttgtcaggcggacaaaggcaaagaatagcgatagccagggcaattttgaaagatgctccaattttaatactcgatgaggcgacttcagctctggatagtgagtctgagcattatattcaggcggctttggagcaagtgatgaaaggtagaactactttaatcattgcgcaccgattgtcgactattaagcatgctcacaagattatcgtattgcaacatggtcgtattgttgagcaaggtagtcatcaagaattacttgatatggatggtcattacgctcagttgtataaagtgcaacaatttggcaggattaatgaggaagtggtagcttaa

SEQ ID NO: 7482 - protein, 597 aa, Legionella pneumophila subsp. pneumophila str. Philadelphia 1
MRTRLTSKLMKNNLPIKSRLLYKRLLSYVKPFWPVLLLGVLANILYSGIDAGFTYMTKLFLDKSFITIDLNFVKQIPLIVLIGITLRGLVSSLGSYCMTWVARSVVKVLRQTVFSHIIHLPADYYDEATSGQLLSKILYDVEQVAQVSADALTDFIQNICLVIGLLTVMMVICWQLSLMFLLTIPFVGIIVNYTNKRVRRISHKVQKTMGEVTEIASEAIEGYRVVRIFGGERYEITKFNKATEYSRKNDMKVAISKAINVSGVQLVIAIGIATIIMAAIHLSTVITISAGSFLAIIAAMLQLIKPMKTLTTLNATIQRGLAGAESVFNLLDLPLERNNGLILKEKIRGEIEFKHVYHAYRQGQNILHDVNFVIEAGTSVALVGHSGSGKTTIASLLPRFYELSQGMITLDGMPIQQLSLESLRKQMSLVSQNVTLFNDTLANNIAYGRFDASREQIITAAKLAYADEFIKQLPDGYDTRVGENGVLLSGGQRQRIAIARAILKDAPILILDEATSALDSESEHYIQAALEQVMKGRTTLIIAHRLSTIKHAHKIIVLQHGRIVEQGSHQELLDMDGHYAQLYKVQQFGRINEEVVA

SEQ ID NO: 7483 - DNA, 1797 bp, Synechococcus elongatus PCC 6301
  CDS (1)..(1797): transl_table=11
atgcttgctctgttacgtcgttgggatgattggtcactactgagtcggcttttgccttacctcggtcgccacaagcggttactgatcggatcgttgattttgctcgtgcccttggctttggccggcgccgtgcaacccatgctggtggggcaagcgatctcggttctacagaacaagccgacctgggaaatgctgcagggcatgagccgcagtcaaggcttgaacctactctccttggcactgttggccacgatcgttgtgcggctggccttccgaggcgtccaaggctactacgtgcaggaagtcggtcagcgcgtgaccgccgacattcgccaagatttgttccagcacgtcacggctctggccgtgcgctttttcgatcgcacgcctgtgggcaagctggtgacacgactcaccaacgatgtcgaagccctcggcgaagtcttttcgaccggcgcgatcggtattctcagcgatattgtttcattgctggcgatcgcgatcgccatgttttggttgcagtggcaattggcgctgttgctgaccgttttattgccgcccaccacggctgtcatcctctatttccagcgacgctaccgcaaagccaattaccgagcccgcgaggagctgtcgaacctcaacgccagcttgcaggaaaacatggtcgggattggcattgtccaaagcttccgccgcgaagcctacaatgcccagcagtttcgagtggcgaatcaacgctatctcgaagccgtcgatcgcacgatctttcacgactcggccatttccgccacgctggaatggatctcgctggctgcgatcgcggctgtcctctggttaggcagctttctggtattgcaagaccaaatgaattttggtctgttagcagcatttattctttactcgcagcggttgtttgacccgttgcgccaactcgctgaaaaattcacctcgattcaagctggatttacagcgatcgagcgaattgtcgacatcttcaatgaaccaattgaaattcgcgatgccgcccagacccaacaactgagccttgaaacctcacagtctggagaaattcactttgaaaatgtttggtttggctacaagcccgatgagccggtcattcaaaacctcaacatcaccattcaacccggtcaaaaggttgcactagtggggccgactggagccggaaagagtacgattattcgcctgctctgtcgcctctatgagccaactcaaggacggattttaattgacggcattgatatccgaaatctacctcaggtcgagctgcggcgtcacctaggcgtcattctccaagacggctttctgtttgccggggatgtcagcagcaacatcacgctgggagagccctacgaccaggaggcggtgcaggcagcagcgcgtcgcaccaatgttgccacgctgattgaatcgctgccgcaaggctatgccactcctttacgggaacgcgggacaaatttgtcgggcggacaaaggcagctattggcgtttgcgcgggtggccattcgcgatccaaaggtgttgattttggatgaggcgacagcgaatttagatgtcggcactgaagctcttgttcaagaggctttagatgatctcctgagcgatcgcaccgcaattattattgctcaccggctctcgacaattcgcaatgccgatcgcatcttagtcctccgccaaggacagctaatcgaagatggatcacatgatgttttgatggctcgcaacggactatataccagtctctatcgactgcaatcactgggagcagaagtagcctag

SEQ ID NO: 7484 - protein, 598 aa, Synechococcus elongatus PCC 6301
MLALLRRWDDWSLLSRLLPYLGRHKRLLIGSLILLVPLALAGAVQPMLVGQAISVLQNKPTWEMLQGMSRSQGLNLLSLALLATIVVRLAFRGVQGYYVQEVGQRVTADIRQDLFQHVTALAVRFFDRTPVGKLVTRLTNDVEALGEVFSTGAIGILSDIVSLLAIAIAMFWLQWQLALLLTVLLPPTTAVILYFQRRYRKANYRAREELSNLNASLQENMVGIGIVQSFRREAYNAQQFRVANQRYLEAVDRTIFHDSAISATLEWISLAAIAAVLWLGSFLVLQDQMNFGLLAAFILYSQRLFDPLRQLAEKFTSIQAGFTAIERIVDIFNEPIEIRDAAQTQQLSLETSQSGEIHFENVWFGYKPDEPVIQNLNITIQPGQKVALVGPTGAGKSTIIRLLCRLYEPTQGRILIDGIDIRNLPQVELRRHLGVILQDGFLFAGDVSSNITLGEPYDQEAVQAAARRTNVATLIESLPQGYATPLRERGTNLSGGQRQLLAFARVAIRDPKVLILDEATANLDVGTEALVQEALDDLLSDRTAIIIAHRLSTIRNADRILVLRQGQLIEDGSHDVLMARNGLYTSLYRLQSLGAEVA

SEQ ID NO: 7485 - DNA, 1785 bp, Bacillus clausii KSM-K16
  CDS (1)..(1785): transl_table=11
atgaaacatacagatggcgttatgacaggacgtgagcagcgagccgttttttggcggcttctccgttacgctggcccgcataagaagcggttcatgttggctcttgctattatgatggtcgctgccggagcagaactgctgcaaccgattttgattgcccgctttattgacgattatttaacgccgcaattatttgaactgaaaccactgttaacgcttgcagtcttgtatgtagggctattaatcgcggcagtgattggccaatatgtacaaagcgtccttttttggcgaattgcgctaagtattgtccaagcattacggctcgatgtattcgcccatgttcaaaagctagggctgtctttttttgaccgcatgcctggtggcgctcttatttcacggattacaaacgacaccgaagccatcaaggaactatacgttagcgtgctcgcggtctttgttcaaaacggcgtatttatgatcgggacgtttttggcgatgttttacttaaatgcgacacttgccttctattgtttggcttttctgccactccttcttgctgtagttggcttgtaccgtaaaatcagctctcgcttctatgaacaagtgagcgccaaattgagtgagatcaatgcgaagttgagcgagtcgatccaagggatggccattattcaagcgttccggcaagagaagcgtctgcaaaaagaatttgcggatacaaatgaagcccattaccgcgcagggttccgggcaatgaaagcagacggattgctccttaggccgatcgtcgatgtgttaagccaccttgccattgccatcattcttttgtactttggcttcggctcctttgctggtccagtagaaattggcgtgttatatgcgtttgtcaattacctagaccgtttttttgagccggtcaaccaaatcatgcagcggttatctttattccaacaagcgatcgtttctgccgggcgggtcttccgtttaatggaccaacaggagtttgccccaggtaaacagggggacgataagccgcaaatggcagacggtgaaattgaatttgataatgtgactttttcttatgacgggaaaaccgacgtgctaaaaaacatttcattcaccgtcaaaaaaggcgagacacttgccattgttggccacactggtagcgggaaaagctctatcattcatttgttgttgcgtttttacccgctgaagcaaggctctattcgtatagacagaaacgagctatccgcctatccagaagaagagctaaggcaaaaagttgggcttgtgttacaagacccgtttatgtatagcggtacgattgccagcaatattacgctcttccgtgatgggtatacgcaagctgatgtagaggctgccgccgcttttgtcggcgctgatgcattcattaataagttgcctgatggctatcaaacggaagtgactgaaaggggagggacgttttcaagtggcgaacggcaactgctttcctttgcaagaacgatgatagccgacccgcctattttaatcctcgacgaagcgacggctatggtggataccgagacagaagaagcgattcaaaaagcacttgtggcaatggagcaaaaccggacaacgattgccattgcccatcgcctgtcgacgattaagcacgctgaccaaattttggtgctccaccaaggagaaattgcggaacaaggttcccacgaggagttgctgagtaaaaaaggtctttattataaaatgtatttgctacaggcaagagaaaaaacagccgctatttaa

SEQ ID NO: 7486 - protein, 594 aa, Bacillus clausii KSM-K16
MKHTDGVMTGREQRAVFWRLLRYAGPHKKRFMLALAIMMVAAGAELLQPILIARFIDDYLTPQLFELKPLLTLAVLYVGLLIAAVIGQYVQSVLFWRIALSIVQALRLDVFAHVQKLGLSFFDRMPGGALISRITNDTEAIKELYVSVLAVFVQNGVFMIGTFLAMFYLNATLAFYCLAFLPLLLAVVGLYRKISSRFYEQVSAKLSEINAKLSESIQGMAIIQAFRQEKRLQKEFADTNEAHYRAGFRAMKADGLLLRPIVDVLSHLAIAIILLYFGFGSFAGPVEIGVLYAFVNYLDRFFEPVNQIMQRLSLFQQAIVSAGRVFRLMDQQEFAPGKQGDDKPQMADGEIEFDNVTFSYDGKTDVLKNISFTVKKGETLAIVGHTGSGKSSIIHLLLRFYPLKQGSIRIDRNELSAYPEEELRQKVGLVLQDPFMYSGTIASNITLFRDGYTQADVEAAAAFVGADAFINKLPDGYQTEVTERGGTFSSGERQLLSFARTMIADPPILILDEATAMVDTETEEAIQKALVAMEQNRTTIAIAHRLSTIKHADQILVLHQGEIAEQGSHEELLSKKGLYYKMYLLQAREKTAAI

SEQ ID NO: 7487 - DNA, 1896 bp, Thermobifida fusca YX
  CDS (1)..(1896): transl_table=11
atgagcatggagatgacggcgtggcacgcgctgtaccacaccacccaggcccctgaggagcggcgcccgctgtccttggccaccctgcggaggatcgggggattcgcccgcccgcacgcggcgctgctgggctcttttctggtgtgcagcgtgcttggctcggtgctggcggtggcgaccccggtggtcgcaggccaggcagtcgacggcatcgtcgggggtgcccccatcggcgttgtcgggggatgggcgctgctcatcgccggtatcgccctggccgaggcgggggtggggctggtcgcgcggtggctgtcggcgcggatcggtgaagggctcatcctgcggttgcggaccgcagtcttcgaccacgtacagcgcatgccgatcgctttcttcacccgcacccacacgggtgctctggtcagccggttgaacaacgacgtcatcggcgcacagcgggcgttcagcgacaccctgtccggtgtggtgggcaacgtggtgacgctggcgttgaccctggtagtgatggtggggctgtcgtggcaggtcacggtggcggcactggtcctgctgcccgtgttcgtgctgcccgcgcgccgcgtgggtttccgccttgcccggctggagcgggaggcggccgaacacaattcggcgatgagcacgcggatggccgaacgcttctccgctcccggggcagccctggtcaagctgttcggggacccagggcgggagtcggcggagtttgctgcccgagccacgcgcgtccacgacatcggagtgcgccaagccatgctggagcacgtgttcttcaccgcgctgaccctcgtctccgcgctggcgttggcgctggtctacgggctgggtggcttttttgcgctgcgcggccacctggatgccggggcggtggtggcgctcgccctcctgctgacccgcttgtacgctccgctgacggccctggcgcatgcgcgagtggagatgatgggggcgcttgtcagctttgagcgggttttcgaggtcctggacctggaaccgctcattcaagagcgtgcggctgcccgaacggtgccggaggggccggtgtccgtggagtttgaccgggtacggtttgcctatccggccccggacgaggtttcgctggcctccttggaggaggtggcgcagctggaggcgcgcggcggagcggacgtgctgcacggtgtgtcgttccgtgtggaaccggggcagctggtagccctggtcgggtcctcgggggcgggaaaatcgacgattgcgcacctgttggctcggttctacgacgtggacgagggcgcggtccggctgtccggggtcgatgtgcgggacctgtcgtttgcgtccctgcgtgccaccgtgggcatggtgccccaagacgggcacctgttccacgacaccatccgcgctaacctgctgctggctcggccgcaggcgagtgaggaggagctgtgggaggcgctacgtcgggcacgggctgctgaccttgtcgcggcgctgcccgacggtctcgacacggtggtgggtgagcgtggttaccgcttttccggcggggaacgccaacggctcgcccttgcccggctgctgctggctcggccccgcgtagtgatcttggacgaagccaccgcgcacctggacgccgactcggaagcacaggtccaggaggcgctcgccgaagcactggcgggacgcaccgcgctggtgatcgcccaccggttggccacggtccagaccgctgacctcatcgtggtggtggaggacgggcggatcgtggaacgaggcacccacgtcgaactgctcgccgcgcgcggccgctacgcgcagctctactggacccagttcgcgcagcccgcaggggggcaggccgccgacggctcgtatgcgtga

SEQ ID NO: 7488 - protein, 631 aa, Thermobifida fusca YX
MSMEMTAWHALYHTTQAPEERRPLSLATLRRIGGFARPHAALLGSFLVCSVLGSVLAVATPVVAGQAVDGIVGGAPIGVVGGWALLIAGIALAEAGVGLVARWLSARIGEGLILRLRTAVFDHVQRMPIAFFTRTHTGALVSRLNNDVIGAQRAFSDTLSGVVGNVVTLALTLVVMVGLSWQVTVAALVLLPVFVLPARRVGFRLARLEREAAEHNSAMSTRMAERFSAPGAALVKLFGDPGRESAEFAARATRVHDIGVRQAMLEHVFFTALTLVSALALALVYGLGGFFALRGHLDAGAVVALALLLTRLYAPLTALAHARVEMMGALVSFERVFEVLDLEPLIQERAAARTVPEGPVSVEFDRVRFAYPAPDEVSLASLEEVAQLEARGGADVLHGVSFRVEPGQLVALVGSSGAGKSTIAHLLARFYDVDEGAVRLSGVDVRDLSFASLRATVGMVPQDGHLFHDTIRANLLLARPQASEEELWEALRRARAADLVAALPDGLDTVVGERGYRFSGGERQRLALARLLLARPRVVILDEATAHLDADSEAQVQEALAEALAGRTALVIAHRLATVQTADLIVVVEDGRIVERGTHVELLAARGRYAQLYWTQFAQPAGGQAADGSYA

SEQ ID NO: 7489 - DNA, 1848 bp, Methanosarcina barkeri str. Fusaro
  CDS (1)..(1848): transl_table=11
atgccacagaataacgtgatgcctcataatatgcctcataatattacaggccgcccggcaggaggaccaagcgcttttcttcaaagggaaaaaacggaaatcaaggacgttaagggaacattcatacgcattattatgtaccttggcaaatggtggcgcacattgctcatcatttttttctgtgctcttgttacaacagtgatcaccattatcggcattcaactaaacgggtacgcagtcgacgagttcatctctaaaaaggatattgccggacttgctcgcatctgtattatcatgattcttatttaccttgttgcggttttttctacttacatgcagaattccctgatgatccgtgttgctcagaaaacttcggctagtatccggaacgatcttttcagcagcctgcaaaagctgcccctcaagtattttgatacccactcaagcggggacctcatgagccgcctgacaaacgatgttgacaacatcaaccttacactttcacagagtgtcgtgcagcttttttccggcgtcatcagcgtggtcggtatgttgatagcgatgctgctgctcagcccgctgcttacgctgatcgggctgctgacaacgcctctgatgttctttacgtcaaaagtccttgcagtaaagtctcagaagttttttaaggaacagcaatatgagcttggacggcttaacggatatatcgaggaaatggtctccggccaaaaagttattaaggtcttttcccgagaaaaggaggtggagggtcacttcaaagaaatcaatgaaaagcttgtttccagttctatgaaagcacaggcaataagcagcgtcatgggacctgtgaataacactatcaataatctgacctatttgattatcacggtctgcggtggcgttttaatcataaagggatttgcgggaatcactgttggcgtaatattttctttcctgctctatatgcgcaattttacccagccaatcaacaatattctcaaccttttcagcactatccagtcagcccttgcaggcgcagagcgagtgtttgaggtaatggacgaggaaaaagaaaaagatgccgataatgccagagacattcaaaacattgaaggcaacgtgaaaattgaatctgttaatttttcatacatacctggtaagcctgtacttaaagaggcaacaatttctgcgaaaaaaggtcagacaattgccatcgtgggccctacgggtgctgggaaaacaaccattatcaatctgctcaccaagttttatggcattgatgacggagcaatctatattgatggaaagaatataaatgccattactcgaaagagtctgcggcagtccatttcaatggtactccaggatacttttcttttctcggacaccatacgcgagaatatccgctatggcaggctgacagcaacggatgaagaagttgaacaggcagcaaagctggcacatgcccatgactttattatgcaactgccacagggttatgatacaattctttctgacaatggcggcaacctttcacagggacagcggcaattgcttagtattgcgagagcgatgatcgcacaatcttctgtgttgatacttgatgaagcgacttcttcaatcgatacacggacagagctgattattcagagtgctctgctcaaactaatgcacggaaaaacgagttttgttatcgcacaccgcctttccaccatcaaaaacgcagataaaatcatcgttttagacggcggtcgagtagtagaaacaggtacgcatagcgaactgcttgtttcgggcggtttctatgccaacctttacaaaagtcagttcaaaaaaggcatggcaatataa

SEQ ID NO: 7490 - protein, 615 aa, Methanosarcina barkeri str. Fusaro
MPQNNVMPHNMPHNITGRPAGGPSAFLQREKTEIKDVKGTFIRIIMYLGKWWRTLLIIFFCALVTTVITIIGIQLNGYAVDEFISKKDIAGLARICIIMILIYLVAVFSTYMQNSLMIRVAQKTSASIRNDLFSSLQKLPLKYFDTHSSGDLMSRLTNDVDNINLTLSQSVVQLFSGVISVVGMLIAMLLLSPLLTLIGLLTTPLMFFTSKVLAVKSQKFFKEQQYELGRLNGYIEEMVSGQKVIKVFSREKEVEGHFKEINEKLVSSSMKAQAISSVMGPVNNTINNLTYLIITVCGGVLIIKGFAGITVGVIFSFLLYMRNFTQPINNILNLFSTIQSALAGAERVFEVMDEEKEKDADNARDIQNIEGNVKIESVNFSYIPGKPVLKEATISAKKGQTIAIVGPTGAGKTTIINLLTKFYGIDDGAIYIDGKNINAITRKSLRQSISMVLQDTFLFSDTIRENIRYGRLTATDEEVEQAAKLAHAHDFIMQLPQGYDTILSDNGGNLSQGQRQLLSIARAMIAQSSVLILDEATSSIDTRTELIIQSALLKLMHGKTSFVIAHRLSTIKNADKIIVLDGGRVVETGTHSELLVSGGFYANLYKSQFKKGMAI

SEQ ID NO: 7491 - DNA, 1785 bp, Anabaena variabilis ATCC 29413
  CDS (1)..(1785): transl_table=11
atgagaactccagccccagttattgcctccgaacaacaagcaactaagcaactttcaaccttacggcgttttttacaatacttgcgtccctttcgcaaagaagttcccattgctttgagtttagtattaatcggtgctgtcacccaggcgatcgggccgtttttactaggttggtcagtagataacctcatagccaaaggcaatttaccaggattgctactgttattagtgttattaggcctaaattatagttttggtatctgggcaattcgggggcaaattatccgcgtcggctggattatgcagcgattactggctcagttgaggcaagatatttttaccaaaattcaaagtttgccactcagcttttttgaccgcagtgaagccggtgatttaatgagtcgtctgctaaacgatgtcaacactgttaatcaagcctttgggcaaacggtggcacaaatgctaggtaataccttcagtttggtaggtattgtcattgctatgctttcaattaacttacaacttgggttgttaagtaacttagttgtccctctgatgatttttaccaccagcttatttgcgcgttgggctaggactaaatttcgcgtcaccagacaaacaattggggaactttccgccaagttagaagaagatattggcagtgtgcgagaagcccaagcctttaaccgggtacatctcaacatcgcagaatttgacgttctcaacgccgctaatcgtgatgccaacgttgaagccgtagcaattacggcggcatttttaccatcaattgattttctcaacaccttagctacagcaggtgtccttgcctatggtggttatcttgccgtgacaggagccgcaactgtgggtgtggtaacatcatttttactttacgtccagcaattcttccgccccatccaaatcctcagtcagttttacacccaagctcagtcagcctttgccggattagagcgtattttcctcttactagatgaaccatcccaactcaatgacgcacccaacgccacccaaatgcctcctattcaaggtgaggtgacatttgaggatgttaagtttgggtataatccagagcaactagtcctcaaaggagttaatttacacgctgatgcaggacagatggtggcattagtaggggcgactggttcaggcaaaacaacaattattaacctcatattgcgtttttatgatgtgtctgacggtgcggtaaaaattgatggcgttgatgtgcgtagtgtgactcaagccagcctccgccatcagattggcattgtcctgcaagataatattttgtttagcggtactgttgccgaaaatattgcttttggcgcgccttatgccactcaagccgaaattgaagcggcggcacaaatggcaaacgtccatgagtttatcacttcactaccgcaaggttacacaaccaaattaggcgaacggggcgcacctctcagccaaggacaaagacaactgattagtattgctcgtgcagtattaattaatccccgcatcttgattcttgacgaagcaaccagtagtatagatacccgaacagaagctctagtacaggatgcgatcgcccgtttattacagggtcgcaccagttttgtcattgcccaccgcctcagcaccgttacccaagctaatcaagtattggttattcagcaagggcaaatcgtagaacgaggtactcacgcagaacttgtcaggcagcaaggtatttacgctaatctgtatgcactccaactgggggcagcgacagcacaataa

SEQ ID NO: 7492 - protein, 594 aa, Anabaena variabilis ATCC 29413
MRTPAPVIASEQQATKQLSTLRRFLQYLRPFRKEVPIALSLVLIGAVTQAIGPFLLGWSVDNLIAKGNLPGLLLLLVLLGLNYSFGIWAIRGQIIRVGWIMQRLLAQLRQDIFTKIQSLPLSFFDRSEAGDLMSRLLNDVNTVNQAFGQTVAQMLGNTFSLVGIVIAMLSINLQLGLLSNLVVPLMIFTTSLFARWARTKFRVTRQTIGELSAKLEEDIGSVREAQAFNRVHLNIAEFDVLNAANRDANVEAVAITAAFLPSIDFLNTLATAGVLAYGGYLAVTGAATVGVVTSFLLYVQQFFRPIQILSQFYTQAQSAFAGLERIFLLLDEPSQLNDAPNATQMPPIQGEVTFEDVKFGYNPEQLVLKGVNLHADAGQMVALVGATGSGKTTIINLILRFYDVSDGAVKIDGVDVRSVTQASLRHQIGIVLQDNILFSGTVAENIAFGAPYATQAEIEAAAQMANVHEFITSLPQGYTTKLGERGAPLSQGQRQLISIARAVLINPRILILDEATSSIDTRTEALVQDAIARLLQGRTSFVIAHRLSTVTQANQVLVIQQGQIVERGTHAELVRQQGIYANLYALQLGAATAQ

SEQ ID NO: 7493 - DNA, 1881 bp, Anabaena variabilis ATCC 29413
  CDS (1)..(1881): transl_table=11
atgagcatctaccaactttcccaaaaatcttataaacaaaaccgttggcgtaacaacgactggcggctgttttcacgtttggttccttacgcccggcgtaatactaaactactgattctggcaatggtattgctattaccacttgctttggctaatgccgtacagcccttgttaattggacaagctgtatccttaattcgtaatgaatctagcgcatacgagtttttgagaagtcgtccattgtctcaagggctacatattattgaaggaatattactctttacaattgttatccgtttagcgttgacgggttaccaaggctatttgttacagaaattaggacaaaaaatcacagccgctattcgccaagacttatttcatcatgtaacatctctggcggtacgtttcttcgaccgtacacccgttggtaaactcattacccggctcaccagcgatgtggaagtattgggagacgtattttccactggcgctattggcattgtctctgacgtagttttgatggtggtaattactggtttaatgttttctatccagtggcaacttgcttccttgctcctggtgatgttgttaccagttacttggttaattatttacttccaacaagagtaccgcaaagctaattacaaagctagggaagagctatctttactgaattcccaactacaagagaatgttctggggattaacgtagtccagttattccggcgggaaagctttaatgctgagttatttcgcactacaaaccaacgctataccaaacaggtggatcaaactatcttttttgattcggctgtttccgcaactctggaatggattggcttaattgcgatcgctggtgtattgtgggtgggtggctggttgctttcagaaaatcaacttgattttgggactttatcgacctttattttatacgcccagcgcttattcgaccctttacgagattttgcggaaaaattcacagtcattcaatctggatttacggctattgaacgggttagcgatattttagatgaaccgatagaaataagcgatcgctccaactctcgattttccgtctttgatgctaaattcggttacattgatgaaattgtcgctgatttagaatctcaaaatatcagcgacactccaaacatgggagaaatccgttttgaacacgtttggtttgcctataaagacgacgattacgtcattaaagacttagactttatcattcgtcctggcgaaaaagttgcattagtagggcctactggcgcaggtaaaagttctatcatccgtcttttatgtcgtctttacgaacccacccaaggacgcatcttagtagatggaattgatatccgtgagttacctcaagcagaattacgccgttatatggcggttattctacaagagggttttttgtttgctggtaatgtcaaaagtaacattactttaggtgattactatacttttgaggaaattcaagcagctgcacagcaaacaaatattgctgaatttattgaagaactacccttaggttacgatactaaattgcgagaacggggtacaaacctttccagtggacaaaagcaactgttagcttttgctcgtgctgcaattcgcaatcctcaaattttagttttagatgaagccaccgcgagtctcgatgttggcacagaagcgttagtccaggaagcattaaacgaattattaatcggacgaactgcaatcattattgctcaccgcctgtctacaattcgcaacgtagatagaatttttgtgttgaagcgtggtgaattagtggaacaaggtagccatgaggaactgttaaattcaggagggctttattctactctgcataatctacaaatgctgggaacctag

SEQ ID NO: 7494 - protein, 626 aa, Anabaena variabilis ATCC 29413
MSIYQLSQKSYKQNRWRNNDWRLFSRLVPYARRNTKLLILAMVLLLPLALANAVQPLLIGQAVSLIRNESSAYEFLRSRPLSQGLHIIEGILLFTIVIRLALTGYQGYLLQKLGQKITAAIRQDLFHHVTSLAVRFFDRTPVGKLITRLTSDVEVLGDVFSTGAIGIVSDVVLMVVITGLMFSIQWQLASLLLVMLLPVTWLIIYFQQEYRKANYKAREELSLLNSQLQENVLGINVVQLFRRESFNAELFRTTNQRYTKQVDQTIFFDSAVSATLEWIGLIAIAGVLWVGGWLLSENQLDFGTLSTFILYAQRLFDPLRDFAEKFTVIQSGFTAIERVSDILDEPIEISDRSNSRFSVFDAKFGYIDEIVADLESQNISDTPNMGEIRFEHVWFAYKDDDYVIKDLDFIIRPGEKVALVGPTGAGKSSIIRLLCRLYEPTQGRILVDGIDIRELPQAELRRYMAVILQEGFLFAGNVKSNITLGDYYTFEEIQAAAQQTNIAEFIEELPLGYDTKLRERGTNLSSGQKQLLAFARAAIRNPQILVLDEATASLDVGTEALVQEALNELLIGRTAIIIAHRLSTIRNVDRIFVLKRGELVEQGSHEELLNSGGLYSTLHNLQMLGT

SEQ ID NO: 7495 - DNA, 1740 bp, Streptococcus agalactiae A909
  CDS (1)..(1740): transl_table=11
atgaagtctaatcaatggcaagtctttaagagattaatctcctatttacgcccttataaatggtttacagtattagctctatctctcttattgttgacgactgttgttaaaaatattattcctttaattgcttcacattttattgatcactatctgacaaatgttaatcaaacagcagttcttattttagtgggatattattcaatgtatgtcttgcagaccttaattcaatattttgggaatctcttttttgcgcgtgtttcttatagtattgttagagatattcgtagagatgcttttgctaatatggaaaggcttggcatgtcttattttgataggacaccggcaggatctatagtgtcacgtattactaatgatactgaagcaatatctgatatgttttcgggtattttatcgagttttatctcggcgatatttatttttacagttactctgtacactatgttgatgctagacattaaactaacaggacttgtcgctcttttattacctgttatctttatattagtgaatgtctatcggaaaaaatcagtcactgtcattgctaaaacgagaagtttacttagtgatatcaacagtaaattatcagaaagtattgaaggaattcgcattgtacaggcttttggtcaagaagagcgcttgaagactgaatttgaggaaattaacaaagagcatgttgtgtatgccaatcgttctatggctcttgatagtctcttcttaagaccggcgatgtctcttttaaaactcctagcatatgctgttcttatggcttattttggatttacaggagttaaaggaggtcttacggcaggattgatgtatgcttttattcagtacgttaatcgtctctttgaccctttaattgaagtaacgcaaaatttttcaaccttacaaacatcaatggtatcagcagggcgtgtgtttgatttgattgatgaaacaggttttgaaccaagccaaaaaaatacagaagcttttgtgagagaaggaaatatcgaatttaaaaatgtatcattctcatatgatggaaaaaaacaaatccttgataatgtttcttttagtgttaaaaaaggtgaaacgattgcttttgtaggagcgacaggttctggaaaatcatctattattaatgtctttatgaggttttacgaatttcaatctggacaagttttattagatgggaaggatattagggattactcacaagaacaattgcgaaagaatattggactcgtcttacaagacccctttttatatcatggcactattaaatctaatatcaaaatgtaccaagacatcaccgatcaagaggtacaggacgcagcagagtttgttgatgctgatcaatttattcagaagttgccagataagtacgatgcagctgtttcagaacgtgggtcaagtttttcgactggacaacgccaactattggcgtttgccagaactgtggctagtaaacctaaaattttaatcttagatgaagcgacagcaaatattgattcggaaacagagcagattgtacaagattcgttagcaaaaatgcgtcaaggtcgaacaacaattgccattgctcaccgcttatcaaccattcaagatgctaattgtatctatgttcttgatagaggaaagataattgaaagtgggaatcacgagtctttattagacctaaaagggacttattatcgtatgtaccaattacaagctggcatgatggaggtctag

SEQ ID NO: 7496 - protein, 579 aa, Streptococcus agalactiae A909
MKSNQWQVFKRLISYLRPYKWFTVLALSLLLLTTVVKNIIPLIASHFIDHYLTNVNQTAVLILVGYYSMYVLQTLIQYFGNLFFARVSYSIVRDIRRDAFANMERLGMSYFDRTPAGSIVSRITNDTEAISDMFSGILSSFISAIFIFTVTLYTMLMLDIKLTGLVALLLPVIFILVNVYRKKSVTVIAKTRSLLSDINSKLSESIEGIRIVQAFGQEERLKTEFEEINKEHVVYANRSMALDSLFLRPAMSLLKLLAYAVLMAYFGFTGVKGGLTAGLMYAFIQYVNRLFDPLIEVTQNFSTLQTSMVSAGRVFDLIDETGFEPSQKNTEAFVREGNIEFKNVSFSYDGKKQILDNVSFSVKKGETIAFVGATGSGKSSIINVFMRFYEFQSGQVLLDGKDIRDYSQEQLRKNIGLVLQDPFLYHGTIKSNIKMYQDITDQEVQDAAEFVDADQFIQKLPDKYDAAVSERGSSFSTGQRQLLAFARTVASKPKILILDEATANIDSETEQIVQDSLAKMRQGRTTIAIAHRLSTIQDANCIYVLDRGKIIESGNHESLLDLKGTYYRMYQLQAGMMEV

SEQ ID NO: 7497 - DNA, 1818 bp, Pseudomonas fluorescens PfO-1
  CDS (1)..(1818): transl_table=11
gtgtctgacccggccgatgacacgccagccgtcaagcgtgtcgaccggctgagctgggctgaagtccggcgactggcacttcatcacaaaaaatccctgtggatcgccaacggcgtggccgtactggcgacgctgtgcagcgtgccgattccgctgctgttgccgttgctggtggacgaagtcttgctcggccatggcgacgccgcgctgaaagtcatgaaccacctgctgccctcgatgtggcagcaggcggcgggctatatcggcctgatgctggtggtgacgctgaccctgcgttgcagcgccctgtgttttggcgtgttgcaggcgcgattgtttgcgcgactggccaaggacatcgtgtaccgcatccgcgtgcggctgatcgagcgtctgaaacggatctcgctgggtgaatacgaaagcctgggcagcggcaccgttaccacgcacctggtcaccgacctcgacaccctcgacaagtttgtcggcgaaaccctcagccgttttctggtggcgatgctgacgctggtcggcactgccagcatcctgatgtggatgcactggaaactggcgctgctgatcctgctgttcaaccccttggtgatttacgccacggtgcagttgggcaaacgggtcaaacacctgaagaaactggagaacgacagcacctcgcgtttcacccaggcgctgagcgaaaccctcgatgcgatccaggaagtgcgtgccggcaaccgtcagggcttcttcctggggcgccttggcctgcgggctcaggaagtgcgcaactacgcggtcaactcacagtggaagaccgacgcttcgaaccgcgccagcggcctgttgtttcagttcggcatcgatatctttcgcgcggcagccatgttgacggtgttgttctctgacctgtcgattggccagatgctcgcggtgttcagctacctgtggttcatgatcggcccggtcgaacaactgctgaacctgcaatacgcctactacgcggcaggcggggcgctgtcgcggatcaacgaactgctggcccgcgccgacgagccgcaataccccggcggcgtcgacccgttcaagggccgcgatacggtcgggattcaagtgcagggtctgagcttcggttacggcgacgaactggtgctggatcagttgaacctgtccatcgcccccggtgaaaaagtggcgattgtcggcgccagcggtggcggcaaaagtaccctcgtgcaattgctgctgggcctgtacacgccactggcggggacgatccgtttcggcggctcgagccagcaggaaatcggcctggaaacggttcgggaaaacgtcgctgtggtgttgcaacatccggcgctgttcaacgacaccgtgcgcgccaacctgaccatgggtcgtacccgcagcgatgaagcctgctggcaggcactggaaatcgcccagctcgaacccaccatccgcgccttgccggacggcctcgacagcatcgtcggccgctccggcgtgcgtctgtccggggggcagcggcaacggctggctatcgcccggatgatcctcgccgaacccaaagtggtgatcctcgacgaagcgacgtcagccctcgatgccgcgaccgagtacaacctgcaccaggccatggcgcgcttcctccatggccgcacaacgctgatcatcgcccaccgcttgtcggcggtgaaacaggcagaccgggtgctggtgttcgacggcgggcaagtggccgaagatggcgaccatcagcaactgattgccgatggtgggttgtacgccaagctttatgggcatttgcagcggttgtag

SEQ ID NO: 7498 - protein, 605 aa, Pseudomonas fluorescens PfO-1
MSDPADDTPAVKRVDRLSWAEVRRLALHHKKSLWIANGVAVLATLCSVPIPLLLPLLVDEVLLGHGDAALKVMNHLLPSMWQQAAGYIGLMLVVTLTLRCSALCFGVLQARLFARLAKDIVYRIRVRLIERLKRISLGEYESLGSGTVTTHLVTDLDTLDKFVGETLSRFLVAMLTLVGTASILMWMHWKLALLILLFNPLVIYATVQLGKRVKHLKKLENDSTSRFTQALSETLDAIQEVRAGNRQGFFLGRLGLRAQEVRNYAVNSQWKTDASNRASGLLFQFGIDIFRAAAMLTVLFSDLSIGQMLAVFSYLWFMIGPVEQLLNLQYAYYAAGGALSRINELLARADEPQYPGGVDPFKGRDTVGIQVQGLSFGYGDELVLDQLNLSIAPGEKVAIVGASGGGKSTLVQLLLGLYTPLAGTIRFGGSSQQEIGLETVRENVAVVLQHPALFNDTVRANLTMGRTRSDEACWQALEIAQLEPTIRALPDGLDSIVGRSGVRLSGGQRQRLAIARMILAEPKVVILDEATSALDAATEYNLHQAMARFLHGRTTLIIAHRLSAVKQADRVLVFDGGQVAEDGDHQQLIADGGLYAKLYGHLQRL

SEQ ID NO: 7499 - DNA, 1839 bp, Rhodobacter sphaeroides 2.4.1
  CDS (1)..(1839): transl_table=11
atgagcgaagcgagacagaggccgggcccgacgcccgttgatccgccggaaatgagcggctgggcgaccatgaagcgcatggcgccctacctttggccgaagggccagacctgggtgaagcggcgcgtcgtcatcgccatggcgatgctggtgctggccaaggtgatctctgtctcgacccccttcttctacaaggccgcggtggatgcgctcgcgggcgatgcgcccacgcccgccttcatgctgggcctcggcgcggtcgggatgacggtggcctacgggctggcgcggctcggcgccgtggccttcggggaactgcgcgacgcgatcttcgtgcgcgtgggccagcgtgccctgcgccagctcgcgctcgagaccttcacccacatccaccggctctcgctgcgctaccacatcagccgcaagaccggcggtctcagccgcatcatcgagcgcggcgtgaagggcgtcgatttcctgctgcgcttcatgctcttctcgatcgggcccctcttcatcgagctgacgctggtcgcgatcatcttcgcggttgtgttcggctggcaatatatggtcgtggtggtggccaccgtcgcgctctatgtggccttcaccttcaaggtcaccgagtggcgggtgcagatccgccgccagatgaacgagcaggacaccgacgcgaaccagaaggccatcgactcgctcctgaatttcgagacggtgaaatatttcggcgccgagctgcgcgaggccgaacgctacgatgcggccatggcgggctacgagaaggcggcggtcaagaccggccagtcgctcgccgtcctgaacgcggggcagagccttctcatcaccgcggggctcgtggcggtcatggtcatggcggcctacggcgtgcaggcgggtcggctcacggtcggggatttcgtgatggtcaatgcctacatgatccagatcaccctgccgctcggcttcctcggcaccgtctaccgcgagatccggcaggcgctcgtggacatggggcagatgttcggtctgctcgcccagccggccgaagtcagcgacgcgcccggggcgcggccgctcgcggtggcgggcggcacggttgagctcgagaatgtccgcttcggctatgacgcgggccgcacgatcctcaagggcatctcgctccgggtcgaggcgggcgagacggtggcgctggtcggtccctcggggtcgggcaagtccacgatcggccggctcctcttccggttctacgacgtgaacgagggcgccatccgcatcgacgggcaggatctgcgcgcggtcacgcaggactcgctccatgcgcagatcggcgtggtgccgcaggacacggtgctcttcaacgacacgatcttctacaacatcgcctacggccgccccggtgccacgcccgaacaggtcgaggccgcggcgcgggccgcgaagatccacgacttcattctgcgcctgcccgagggctaccgcacgatggtgggcgaacgcggcctgaagctctcggggggcgagaagcagcgggtgggcatcgcgcgcaccctgctcaagaacccgccgatcctgcttctcgacgaggcgacctcggcgctcgacacccagaccgagcgcgacatccaggattccctgcgcgagatgggcgaggggcgaaccgtcatcaccatcgcgcaccggctttccaccatcgccgatgccgaccggatcgtggtgctggaagaggggcggatcgtcgaggaggggcggcacgaacagcttctcgcccgcagcgggcgctatgcctcgatgtgggcgcggcaatcggccgaggaagaggacgaggcggcggcctga

SEQ ID NO: 7500 - protein, 612 aa, Rhodobacter sphaeroides 2.4.1
MSEARQRPGPTPVDPPEMSGWATMKRMAPYLWPKGQTWVKRRVVIAMAMLVLAKVISVSTPFFYKAAVDALAGDAPTPAFMLGLGAVGMTVAYGLARLGAVAFGELRDAIFVRVGQRALRQLALETFTHIHRLSLRYHISRKTGGLSRIIERGVKGVDFLLRFMLFSIGPLFIELTLVAIIFAVVFGWQYMVVVVATVALYVAFTFKVTEWRVQIRRQMNEQDTDANQKAIDSLLNFETVKYFGAELREAERYDAAMAGYEKAAVKTGQSLAVLNAGQSLLITAGLVAVMVMAAYGVQAGRLTVGDFVMVNAYMIQITLPLGFLGTVYREIRQALVDMGQMFGLLAQPAEVSDAPGARPLAVAGGTVELENVRFGYDAGRTILKGISLRVEAGETVALVGPSGSGKSTIGRLLFRFYDVNEGAIRIDGQDLRAVTQDSLHAQIGVVPQDTVLFNDTIFYNIAYGRPGATPEQVEAAARAAKIHDFILRLPEGYRTMVGERGLKLSGGEKQRVGIARTLLKNPPILLLDEATSALDTQTERDIQDSLREMGEGRTVITIAHRLSTIADADRIVVLEEGRIVEEGRHEQLLARSGRYASMWARQSAEEEDEAAA

SEQ ID NO: 7501 - DNA, 1779 bp, Synechococcus sp. CC9605
  CDS (1)..(1779): transl_table=11
atgggagccgtcgccgactggcgccgggtccgtcgtctcggccgttacctcgtgcgggatcgccggcggcttttggtcgccctgctgctcttgcttcctttggcctttgcgggagcactccagcccgttctattggggcaggctgtcagcgttctgcgcggagagcccagtcttccctggttgtcggggttgagcctgtccgcttcgatccgcgtgatcatctggctctacttcggctcggtgttgctgcggttcgccctgcagggcgtgcagcaattcagcatcctcgccgtcggacaacggctcaccgcccgcatccgcgacgacctgtttgaacatgcgttgtcgctgtccctgcgtttccacgaccgcatgccggtgggcaagttgctcacacggctcaccagcgatgtggatgccctggctgaggtgtttggcagtggtgccgtgggggtgctcaatgatctggtgagcctgctggtgctggcctcaacgatgctgttcattgagtggaggctggggctgctgctgttgttcacacaggtgcccgtcaccttggccgtgctttggctgcagcgccgttaccggaagtccaactaccgcgtacgggaagagctctcccagctcaatgctgatttccaggagaacctccaaggccttgaggtggtgcagatgtacggccgtgaaacggtcaacagcgcccgtttcctgcgtacgggcagggactaccgcagcgctgtgaatggcaccatcttttacgacagcagcatttcagccttcttggaatgggtggccctggccgccattgccctggttctggcccttggcggcttgatggtgaccaatggtgcgatgggcttgggcaccctcaccaccttcatcctggcctcccagcgtctgttcgaccctttgcgtcagttggccgagcgtttcacccagattcagggtgggctgacggccgtcgaacgcattggcgaattgatggaggagcccctcgagattgccgaggccaagaacgtccttcctcacctgagcggcggaggcggcgaggtgatcttcgagaacgtgagctttgcgtaccggccggatgacccgatcctccgcaacctgtccttccgtatcgcccccggcgagcatgtcgccctggtgggccccacgggttccggcaaaagcacgatcatccgtctgctctgccgcctctatgaaccacagcagggacgcattcttctcgatggacgggacatccgaacgatccccatggcggatctccggcgtgagctgggcgtcgtgcttcaggacacgtttctgttcagcggcaatgtggccgacaatctccggctcagtgcttcggtgagcgacggtgagttggctcaggtctgtgctgagctcggcctcaacgagctgctctcgaagcttcccaagggtctggagacgaagctgcgcgagcggggaggcaacctctcctcaggtgaacgccaactgctggcggtggccagggtggcgatccgccagccaacggtgttggtgatggatgaagccaccgccttcatggacccttcaacggaggcgacgctccaagccgatctcgaccgggtcctgcaaaagcgcaccgccattgtcatcgcccaccgcctggccacggtggaggcctcggatcgcatccttgtgctgggccgcggcgaactgattgaacagggcacccatcaagagctcagggcccgcggtgggctttatgcccagctcgctgagctgcaggaacgggggttggcgcgtctgtga

SEQ ID NO: 7502 - protein, 592 aa, Synechococcus sp. CC9605
MGAVADWRRVRRLGRYLVRDRRRLLVALLLLLPLAFAGALQPVLLGQAVSVLRGEPSLPWLSGLSLSASIRVIIWLYFGSVLLRFALQGVQQFSILAVGQRLTARIRDDLFEHALSLSLRFHDRMPVGKLLTRLTSDVDALAEVFGSGAVGVLNDLVSLLVLASTMLFIEWRLGLLLLFTQVPVTLAVLWLQRRYRKSNYRVREELSQLNADFQENLQGLEVVQMYGRETVNSARFLRTGRDYRSAVNGTIFYDSSISAFLEWVALAAIALVLALGGLMVTNGAMGLGTLTTFILASQRLFDPLRQLAERFTQIQGGLTAVERIGELMEEPLEIAEAKNVLPHLSGGGGEVIFENVSFAYRPDDPILRNLSFRIAPGEHVALVGPTGSGKSTIIRLLCRLYEPQQGRILLDGRDIRTIPMADLRRELGVVLQDTFLFSGNVADNLRLSASVSDGELAQVCAELGLNELLSKLPKGLETKLRERGGNLSSGERQLLAVARVAIRQPTVLVMDEATAFMDPSTEATLQADLDRVLQKRTAIVIAHRLATVEASDRILVLGRGELIEQGTHQELRARGGLYAQLAELQERGLARL

SEQ ID NO: 7503 - DNA, 1809 bp, Geobacter metallireducens GS-15
  CDS (1)..(1809): transl_table=11
atgcatttcggtggtgcctacgaagacgagatagttggcaaggcctatgacgggaggctcatggcgcggtttatccgctacgtgctcccctaccggtggctcgccgtggcagccctctgcctccttcccctctcggcggcggcccggctggcccagccgtggatcatgaaggtggccatcgatgagcacattatcaccggccggatggagggtctgccgctggtggcggccggatttctcgccctgatccttgccgagtcgctcctgacgttctttgaggtctggctcctccagtacctggggcagagggtgatgttcgatctccgcatggagctcttcagccacgtccagcggcttccggtcgcctttttcgaccggactcccaccgggagcctcgtgacaaggctcaccagcgacgtggaagtcctcggcgagatgttcgccgcagggatcattacggtggtgggggacatcctcttcctggccgggatcgtcggggtgatgctctggatgaacctgaagctctccctagtcaccttcgcagtcctgccggtgctcatctgggtcgcctttacgtttcgggtcaggatgcgcaaggccttccgggaggtacgtgcccggctggcgaacctcaacacctttctggccgagaccatcggcggcatggcggtggttcagcttttcaaccggcaagaaaccgagcggcgggagttttcgcggctcaacgccgcttaccgggacgccaacctcccggtcatcacctgggacgcctccctctatgccttggtggagaccctttcctccatcgccgtggggctcatcatctggtacggcgggggggagatcgtcagcggcgcccttaccttcggggcactggtggccttcatccagtacaccgaaaaatttttcggccccatccgggatctttcggccaagtactccatcatgcagggagccatggcggccctagagcggattttcaacctgctggacaccgagaaggatggatacccctcacccggccttcggccaccctctccctccaggcggggggccggggatgagggggcagtcaacaccatcgccttcaaggatgtctggttcgcttacaaggacgaggagtacgtcctccgggggatagacctcaccatccggcggggggagaaggtggcgttggtgggggagacgggcggcggcaagacgacggtgacccggctcctctcccgcttctacgacgtgagcagggggagcatcctctttgacggcgccgacatccgggagctgccccttcccgacctccggcgccggatcggcgtggtcctccaggaaccgtatcttttcaccggcaccatcgggttcaatatctccctgggggacgagggggctgctgccaggatggaggaggcggcacggcttgtgggggccgcccggttcatcgaggcgcttcccaaaaagtacgacgaggaggtgcgggagcggggggtgaacctctccgccggcgagcggcagctcatttcctttgcccgtgccgtggctttcgacccggagatcctcgtcctcgacgaggccacctccagcgtcgacagcgagtctgagcggctcatccaggaggggctccgggcgctcatggcgggccgtacgtctctggtggtggctcaccgcctctccacggttcaggatgccgaccggatcgtcgtcatccaccggggtgaaaaggtggaggaggggacccaccgcgaactcctggccgccggaggagtctacgcacggctctatcagcttcagttcagggagcaggacaatccatga

SEQ ID NO: 7504 - protein, 602 aa, Geobacter metallireducens GS-15
MHFGGAYEDEIVGKAYDGRLMARFIRYVLPYRWLAVAALCLLPLSAAARLAQPWIMKVAIDEHIITGRMEGLPLVAAGFLALILAESLLTFFEVWLLQYLGQRVMFDLRMELFSHVQRLPVAFFDRTPTGSLVTRLTSDVEVLGEMFAAGIITVVGDILFLAGIVGVMLWMNLKLSLVTFAVLPVLIWVAFTFRVRMRKAFREVRARLANLNTFLAETIGGMAVVQLFNRQETERREFSRLNAAYRDANLPVITWDASLYALVETLSSIAVGLIIWYGGGEIVSGALTFGALVAFIQYTEKFFGPIRDLSAKYSIMQGAMAALERIFNLLDTEKDGYPSPGLRPPSPSRRGAGDEGAVNTIAFKDVWFAYKDEEYVLRGIDLTIRRGEKVALVGETGGGKTTVTRLLSRFYDVSRGSILFDGADIRELPLPDLRRRIGVVLQEPYLFTGTIGFNISLGDEGAAARMEEAARLVGAARFIEALPKKYDEEVRERGVNLSAGERQLISFARAVAFDPEILVLDEATSSVDSESERLIQEGLRALMAGRTSLVVAHRLSTVQDADRIVVIHRGEKVEEGTHRELLAAGGVYARLYQLQFREQDNP

SEQ ID NO: 7505 - DNA, 1926 bp, Frankia sp. CcI3
  CDS (1)..(1926): transl_table=11
atgcgaccgggaacggacggttggtccacgatgcgtaccttccaacaggaccgttcggtcacccggacctcgctgcggcctggcaccctgcgcaggatcgtcgccttcgcccgcccccatcggcggcagctcgcctactttctcgcgctcatcgtgctcagctcggctgtcggtgcggttgttccgatgatcttcaagacgatcatcgacgacggcatcgtgcgccaccgggtggggttcgtgcaggcgctcgccgcggtcgtcgcgggcctggcgttcctggacgccggtctgtcgctcgcgcagcgctggttctcggcccggatcggcgagggtctgatctacgagatgcgcagccaggtgttccggcacgtgcagtgccagccgctcgccttcttcacccggacccagaccggggcgctcatcagccggttgaacaacgacgtgctcggcgcgcagtcggcgttcaccaacacgctgtcgtcggtgctgtcgaatatcctgtccgccggattcgtgctcgccgcgatgctggtgctgtcctggcggatcacgctcgtgtcgctcgtgttgctgccggtatttattattccggcccgcttgttggcgccccgcctggccaggctgacccgggagagctacgggttgaacgccgagatgaacacgacgatgacggaacgattcaacgtgtccggagcgatgctcgcgcaactgtatggttcggcggaacgggaggacgagaacttccgtgttcgggccgggcgggtgcgtgacatcggggtgacccaggccatgtacggccgcatattcttcgtctcgctcaccctggtcgcctcgctcgcgaccgcgatcgtctacgggataggcggtcggttcgctgcccagggcagcttggaggtcggtaccctggtcgcgctcacggcctacctcgggcggctctacgggccgctcactcagctctccaacgtgcacgtcgacgtcatgacggcgctggtgtccttcgagcgggtcttcgaggtgctcgatttggagccggcgatcgccgaccggccgggcgctgtcgatctgccggcaggcgcggcgaccatcgagttcgatcatgtcggtttccgttatccggccgccgacgaggtctccctggcgtcgctggagtcggtcgccgtactcgacccgcgggtgcccacgccggtgctgcacgatgtcaccttccgggtcgagccggggcaggtgatcgcgttggtcggcccgtccggagcgggcaagacgacgatcagccagctcgttccgcgcatgtacgacgtgcggtcggggtcggtacgcatcggcgggcacgacgtccgcgatctcacccttcggtccctgcggtccgccgtcggtgtggtcacccaggacgcgcatctgttccacgacaccatccgcgcgaacctggccttcgcccgggcggacgcctcggacgagcagatgtggaccgctctggacgcggcgcggatcgggccgctcgtgcgctccctgccggacggcctggacacggtcgtcggtgaccggggctaccgcctgtccggcggggagaagcagcggctggccatcgcccggctgctgctgcgcgaaccgggcatcgtcgtgctggacgaggccaccgcgcacctcgacagcgagtccgaggccggcgtgcagcaggcgctgaccgccgcgctggtgggacggacatccctggtcatcgcgcaccggctgtccacggtgcgcgacgccgaccgcattctggtggtcgacgacgggcggatcgtgcagagcgggacccatgaggagctgctggcccgcggcgggctctatgccgagttgtaccggacccagttcgccccggtcacgcccgtcggtgctgatgcggggtgggccgaaggggccagtgccccaccggtcggggtctga

SEQ ID NO: 7506 - protein, 641 aa, Frankia sp. CcI3
MRPGTDGWSTMRTFQQDRSVTRTSLRPGTLRRIVAFARPHRRQLAYFLALIVLSSAVGAVVPMIFKTIIDDGIVRHRVGFVQALAAVVAGLAFLDAGLSLAQRWFSARIGEGLIYEMRSQVFRHVQCQPLAFFTRTQTGALISRLNNDVLGAQSAFTNTLSSVLSNILSAGFVLAAMLVLSWRITLVSLVLLPVFIIPARLLAPRLARLTRESYGLNAEMNTTMTERFNVSGAMLAQLYGSAEREDENFRVRAGRVRDIGVTQAMYGRIFFVSLTLVASLATAIVYGIGGRFAAQGSLEVGTLVALTAYLGRLYGPLTQLSNVHVDVMTALVSFERVFEVLDLEPAIADRPGAVDLPAGAATIEFDHVGFRYPAADEVSLASLESVAVLDPRVPTPVLHDVTFRVEPGQVIALVGPSGAGKTTISQLVPRMYDVRSGSVRIGGHDVRDLTLRSLRSAVGVVTQDAHLFHDTIRANLAFARADASDEQMWTALDAARIGPLVRSLPDGLDTVVGDRGYRLSGGEKQRLAIARLLLREPGIVVLDEATAHLDSESEAGVQQALTAALVGRTSLVIAHRLSTVRDADRILVVDDGRIVQSGTHEELLARGGLYAELYRTQFAPVTPVGADAGWAEGASAPPVGV

SEQ ID NO: 7507 - DNA, 1821 bp, Desulfitobacterium hafniense Y51
  CDS (1)..(1821): transl_table=11
atgagcacccttatctccgaagagttggaacataaagccggtctcagcggacagggcgggaccatcctcaggctccttgcctatttaaaaccccatcttaaacccctggcttttgcctttgccttgctcgttgcgggtaccgcggccgatgtagccggacctgtactgatcaagatctttttggatgattacctgacccctggacgtctggaacctctggctttaacaatcctgggcggcgggtatctgctgctggtcatcttagcttctttccttcaatatcaccaattggttcgtttcaataaaatcgccttgctggttattcaacaaatcagggtggatattttcactaaggttcagtatttggccatgagtgtctttgaccggactccggcgggagctttagtctccagggtcaccaatgatacggaggcgattaaggaactttatatcggcgtgctctcaacctatgttcagaacattgtctttctgctgggcatatttattgccatgttcagcctggatgtgcggttagcggccttctgcctggtgctgctccccgtcatcgttgttttgatgcaaatctaccgcaggatcagctccaagatatacaggatctcccgggcggagctgggcaggttgaatgctatactcaatgagtccatccaaggcatgaatatcatccaaatcatgagacaggaagaaacctttcaaaagaaatttgccggtattaacgagaagtattacggtgcggccattgccaatattaaactggaaagcaccctgatgcgcccggccgtggatctgctctataccctggcgctgattttggttctgggtttctttggtctggaatccatcattggtccggtggaagtgggagtgctctatgcctttatcaattatctggatcgttttatcgacccggtgaatatgatcttaatgcgcctttctcagcttcagcaggcgattatcgccgcggaaagggtctttgaagtgctggatgacgggcgaaccaccacagcccttggcctgaatgctgttcaggaagccggtgatcctcctgctcctggtatcgaaaaaggtgagattgaatttcgcaatgtcagtttttcctatgatggtgtcactgaagtcttaaaaaacatctcctttacggttcaccctggggagacggtagctttagtcggccataccggcagcgggaaaagcacgatttccaatctcttaatgaaattttacccggttaatcaaggggaaatcttgattgatggtatatccttgcatgacttttcccaggaagagctgcgcactcaggttgggctggttgcccaggatcctttcctctttgtcggggatattgccggtaatattgctctcaaccggccccaggttaaggaaggagaggtggaggcagcggcagaatttgtggaggctgatcaattcattaccaagctggggcagggatatcaggaacctgtcagtgaaaggggctccacactctccagtggtcaacggcagcttatctgctttgcccgcaccattgccggagaacctaaaattcttattctcgatgaagccaccgccagtgtggatacagagacagaggaggctattcaaaccgccttaaacaaaatgcgccaagggcgcagtaccatcgctattgctcatcggctttccaccatacaggatgccgatcttatccttgttttgcatcagggacaaatagtcgagcgaggcaatcataacgaactcctcgctcaaaaaggcctgtattacaaaatgtttctgcttcaacaaggggcaggcaaaggttattga

SEQ ID NO: 7508 - protein, 606 aa, Desulfitobacterium hafniense Y51
MSTLISEELEHKAGLSGQGGTILRLLAYLKPHLKPLAFAFALLVAGTAADVAGPVLIKIFLDDYLTPGRLEPLALTILGGGYLLLVILASFLQYHQLVRFNKIALLVIQQIRVDIFTKVQYLAMSVFDRTPAGALVSRVTNDTEAIKELYIGVLSTYVQNIVFLLGIFIAMFSLDVRLAAFCLVLLPVIVVLMQIYRRISSKIYRISRAELGRLNAILNESIQGMNIIQIMRQEETFQKKFAGINEKYYGAAIANIKLESTLMRPAVDLLYTLALILVLGFFGLESIIGPVEVGVLYAFINYLDRFIDPVNMILMRLSQLQQAIIAAERVFEVLDDGRTTTALGLNAVQEAGDPPAPGIEKGEIEFRNVSFSYDGVTEVLKNISFTVHPGETVALVGHTGSGKSTISNLLMKFYPVNQGEILIDGISLHDFSQEELRTQVGLVAQDPFLFVGDIAGNIALNRPQVKEGEVEAAAEFVEADQFITKLGQGYQEPVSERGSTLSSGQRQLICFARTIAGEPKILILDEATASVDTETEEAIQTALNKMRQGRSTIAIAHRLSTIQDADLILVLHQGQIVERGNHNELLAQKGLYYKMFLLQQGAGKGY

SEQ ID NO: 7509 - DNA, 1761 bp, Methylobacillus flagellatus KT
  CDS (1)..(1761): transl_table=11
ttgttcagtgatttatggccgttattgcggccatatcgctggcaaatcctgctcgcattctgtttgctcagcctggcttccgccattctgctgctcgtgccctgggcgttccgcgacctgatcgaccaagggttcggcacaggcaccgctgccgcgcagaacgctcaggacattaaccgtcatttcgtctttatctgcggcctggtgattgtctgggccttgatcgtggcatgccgctattacatcgtgtcctggataggcgaacgcgtcaccgcagacctgcgctccctggtgtatgagcgagtgcttacccagtcgccgcaattcttcgaaaccctgcagacgggagaggtgctgtcccgcctgaccgcggacaccaccttgatccagaccgttgtcggcagctcaatctccctcggcctgcgcagcctgttccaattcattggcggcatgatcatgctcgcggtcacgagttggtatttattcagcctcaatctcggactcatgctgttgctgacactgccgatcatgctgattggccgctcggtgaagacattgtcacgggaatcccaggatcgcattgccgacagctcggccatggcgggtgaaatcctcaatgccatgccgacagtgcaatccttcacccaggagccccgcgaacaacagcgtttccgccacagcgtggaaaccagcttcaaggctgccgtccgccgtatccgcgtgcgtgccttcctggctgcattcgtcattgccggcatcagtgcggccatcatcttcgtgttgtggctgggggcgcaccaggtcacgcaaggcgagttgtcgggcggcgagctcgcctccttcattctctatgcggcgctggttgccggcagcgtcagcaccatcgccgaggtatggggcgacatcatgcgcgccgcgggagcggccgaacgcctgctggagctgctgaacagcaagcctgcgatccgcgacccgtcaacgccggtactccccagcagcaccgacatggcaagcatcaagttcgacaacgtgagtttttactatccggcaaaacctgatcagccagcgcttgaccatatttctctcgagatcaatgcgggcgaaaccgttgccctggtcggaccatcgggcgcaggcaagactaccctgttccaactcctgttgcgcttttacgacatcttcgaaggatccatcagtatcaacggcctggacatccgcaacctgtccctcgacacattgaggggcatgattgccatcgtgccacaggacccggtgatcttttccgcgaatgcgcttgagaatattcgttatggcaggcccgatgccagcgatgaagagatcaagcacgcagcccaggcggcgcaagcccatgcattcatcgaacgcctgccgcaggggtatgacaccttcctgggagagcgcggcacccggctttcgggcggccagcgccagcgcatcgccatcgcccgtgccatgctcaagaatgcgcccatcctcttgcttgatgaagcaaccagcgccctggatgcggaatcggaaaccttggtacagcagggcctggcttcggccatgcacggcaggaccacactggtgatcgcccatcgccttgctaccatccagaatgccgaccgcgtcgtggtactggagcatggccgcatcgtcgaaaccgggacgccgaatgaattacgccggcaatccgggctgtacagccgcctcgccaagcttcaactggatatccatcccgatcacgcaccgcaataa

SEQ ID NO: 7510 - protein, 586 aa, Methylobacillus flagellatus KT
MFSDLWPLLRPYRWQILLAFCLLSLASAILLLVPWAFRDLIDQGFGTGTAAAQNAQDINRHFVFICGLVIVWALIVACRYYIVSWIGERVTADLRSLVYERVLTQSPQFFETLQTGEVLSRLTADTTLIQTVVGSSISLGLRSLFQFIGGMIMLAVTSWYLFSLNLGLMLLLTLPIMLIGRSVKTLSRESQDRIADSSAMAGEILNAMPTVQSFTQEPREQQRFRHSVETSFKAAVRRIRVRAFLAAFVIAGISAAIIFVLWLGAHQVTQGELSGGELASFILYAALVAGSVSTIAEVWGDIMRAAGAAERLLELLNSKPAIRDPSTPVLPSSTDMASIKFDNVSFYYPAKPDQPALDHISLEINAGETVALVGPSGAGKTTLFQLLLRFYDIFEGSISINGLDIRNLSLDTLRGMIAIVPQDPVIFSANALENIRYGRPDASDEEIKHAAQAAQAHAFIERLPQGYDTFLGERGTRLSGGQRQRIAIARAMLKNAPILLLDEATSALDAESETLVQQGLASAMHGRTTLVIAHRLATIQNADRVVVLEHGRIVETGTPNELRRQSGLYSRLAKLQLDIHPDHAPQ

SEQ ID NO: 7511 - DNA, 1869 bp, Acidobacteria bacterium Ellin345
  CDS (1)..(1869): transl_table=11
atggcccaacacgaggaagaacaactaggcaaggcgtacgacagtcgcttaatgaagcgcctgctcggctatttgcgtccatatcagtggcaggtctatgtcgcgatcgcggccatcattctaaaggccggtgcggacgtagtcgggcctgtcctgacccaagtcgcgattgataaatacctcgccaagaggtccgtctctcatctgttcgaccgcttcctgagcgtgaacccgctcaccggtatcggacagattgccggcctctacgtcattctgctcctcctgagtttcgccttcgaatacgcgcaaacatatctcatgcagtgggtcggacagaaagccatgttcgacatgcgggccgagatcttccgccatctccagcgcctgcacattggcttcttcgacaagaaccccgtcggccgcctcgtgacccgcgtcaccagcgacgttgatgctctgaacgagatgttcacttcgggagtggtctcgatcgttgaggacgtcttcgtgctctccgggatcatgtacgtcatgctccggatgaactggcgcctggccttgttggtcttcgccgtgctgccaatcatcacatgggcgaccggtatattccggcgggcggtgcgcgatgcctatcgcaagattcgcgtagccatcgcgcgtattaattcgtacctccaggaacacataaccggcatcgtcgtcctccagctcttcaaccgtgagaagcgttcgtacgacaagttcgaagaagtaaaccgcgcacacatggacgccttcaaagacgcgatcatggcgcacgccgtctattaccccatcgtcgagttcctgtcggcagtggcaattgcaagcgtcatctggttcggtggcggacaatttctccgcaatgcacccggaatcagcatcggcatcctggtcgcgtttattcagtactcgcagcgcttctttcgtcctatccaggatttcagcgaaaagtacaacatcgtgcagcaggccatggccgcttgcgagcgcatcttcaagctcctggacaccccggttgagatcgacgagttggcccagccgaaatccgctaccggttcgggccgcatagagtttgaccatgtgtggttcgcctatcgcaaggacccgaataagaacgacgaatgggattgggttctgcgcgacgtgagcttcacgctagaacccggggaaaccgtggctgtcgtcggccacaccggggctggcaagacaacgctcatttccctgctcctgcgcttttacgacgtgcagcaaggcgcgatcaagattgacggcatcgacattcgcgaaatgtcgttagccgaccttcgccgccgttacggtgtggtcctgcaggatccgttcctcttcacgggcaccatcggcgagaatattcgcctgggtaccgagtggatcaccgacgagcaaatgatgaaggccgccgaagaagtgaacgtcgccgagttcatccgctcgcaaccggcgggattcgagcagggtgtgcatgaacgcggcagcacgctatccacgggacaaaagcagctcatctccttcgcgcgagcgttggcgcacaatccgaagatcctcatcctcgacgaagccacgtcgagcgtagacaccgagacagagtttcgcgtgcgcgctgcactgtctaagctcgtcgaaggacgcacttcgctcatcatcgcgcaccgactttcgactattcagcgcgccgacaagatcatcgtgatgcacaagggcaaggtccgcgagatgggcagccatcagcaactcctcgcacaacgaggcatctattacaagctctaccagttgcagtacaaggaccaggaattgccgctggcgcccacgcttagccctgctaccgactag

SEQ ID NO: 7512 - protein, 622 aa, Acidobacteria bacterium Ellin345
MAQHEEEQLGKAYDSRLMKRLLGYLRPYQWQVYVAIAAIILKAGADVVGPVLTQVAIDKYLAKRSVSHLFDRFLSVNPLTGIGQIAGLYVILLLLSFAFEYAQTYLMQWVGQKAMFDMRAEIFRHLQRLHIGFFDKNPVGRLVTRVTSDVDALNEMFTSGVVSIVEDVFVLSGIMYVMLRMNWRLALLVFAVLPIITWATGIFRRAVRDAYRKIRVAIARINSYLQEHITGIVVLQLFNREKRSYDKFEEVNRAHMDAFKDAIMAHAVYYPIVEFLSAVAIASVIWFGGGQFLRNAPGISIGILVAFIQYSQRFFRPIQDFSEKYNIVQQAMAACERIFKLLDTPVEIDELAQPKSATGSGRIEFDHVWFAYRKDPNKNDEWDWVLRDVSFTLEPGETVAVVGHTGAGKTTLISLLLRFYDVQQGAIKIDGIDIREMSLADLRRRYGVVLQDPFLFTGTIGENIRLGTEWITDEQMMKAAEEVNVAEFIRSQPAGFEQGVHERGSTLSTGQKQLISFARALAHNPKILILDEATSSVDTETEFRVRAALSKLVEGRTSLIIAHRLSTIQRADKIIVMHKGKVREMGSHQQLLAQRGIYYKLYQLQYKDQELPLAPTLSPATD

SEQ ID NO: 7513 - DNA, 1767 bp, Myxococcus xanthus DK 1622
  CDS (1)..(1767): transl_table=11
gtgtcttcccccgcgaacgattcgaaaagcagtgcctcccctggcgtcaccgtccggcgactgctgaagctggcgcgccccgaactgctgcccctggccgcgggcaccctcttcctcctcatcagcagcggagccacgctggcctatccccgcgccattggcgacctggtggaccaggccctcaccgcgcgcgaccggtatgtggtggaccggctcgcgatgctgatgctcgccgtgttcacggtgcagggcatcgccatggcgctgcgcatctacctcttcaccaacgccggcgaacgcgtggtgtcgcggctgcgcaaggacctcttccgcgccctgctgtcccaggaggtgggcttcttcgattcgcgccgcacgggcgagctcaccagccggctctcctcggacaccaccgtcctgcagaccaccgtcacggccaacgtgtccatgatgctgcgctacgtcgtcacggccctgggcggcgtgggcctgctgctctacacgtccgtccagctcacgctggtgatgctggccgtcatcccgcccgtggccattggcggcgtgttctacgggcgccgggtccgggtgatttcccgtcaggcccaggacgcgctcgccgccagcggcgaggtggccgaggaagacctgtccggcatccgcaccgtgcgctccttcgccgcggagcggcacgaggtggagcgctacagcgtcgccgtggagcgctccttcacgctggcgaagaagcgcgcgctccagacctccgtcttcatgggcgtggcctccatcgcggggtatggctccatcgccgcggtgctctggtacggaggccggctggtggtggaaggcggcctctccgtgggcgagctcacctcgttcctcatctacaccatgctggtggccttctcgttcagcggcatcgcggagctgtgggcggacttcatgcgcgccagtggcgccgccgagcgcgtcttcgaactgctggaccgcaagcccgccatcggcgctggcggcgagcagctgaccgacctgcgcgggcacgtgcagttccgcggcgtgcacttcgcctaccccagccgtcccgacgtgccggtgctccagggcctggacctggagctgcggccgggcgaggtggtggcggtggtgggcccctccggcgcgggcaagtccacgctggcctccctgctgtcgcgcttctacgacccgcagaacggcgaggtgctgctggacggccatccgctcaccgccctggagccggagtggctgcgccgcaacatcggcatggtggcgcaggagccccagctcttctcctgctccatcgcggacaacatccgctacggccggcccggcgccaccgacgcccaggtggaggaggccgcccgcgccgccaacgcccacgcgtacatcgagcgcttcccggaaggctacggcacccaggtgggcgagcgcggcgtgcagctctccggtggccagaagcagcgcgtggccatcgcccgggcggtgctgaaggaccctcgcctgctcatcctggacgaggccaccagcgccctggacgcggagagcgagcacctggtgaaggacgcgctggagcgcctgatgaagggccgcaccacgctcatcatcgcccaccgcctgtccaccgtggccaacgcggaccgggtgctggtgctcgacggcggcgtcgtcatccagagcggcacccacgcctccctcatgagccaggagggcctgtaccggcgcctggtggagcggcagtttgtcgcagcttga

SEQ ID NO: 7514 - protein, 588 aa, Myxococcus xanthus DK 1622
MSSPANDSKSSASPGVTVRRLLKLARPELLPLAAGTLFLLISSGATLAYPRAIGDLVDQALTARDRYVVDRLAMLMLAVFTVQGIAMALRIYLFTNAGERVVSRLRKDLFRALLSQEVGFFDSRRTGELTSRLSSDTTVLQTTVTANVSMMLRYVVTALGGVGLLLYTSVQLTLVMLAVIPPVAIGGVFYGRRVRVISRQAQDALAASGEVAEEDLSGIRTVRSFAAERHEVERYSVAVERSFTLAKKRALQTSVFMGVASIAGYGSIAAVLWYGGRLVVEGGLSVGELTSFLIYTMLVAFSFSGIAELWADFMRASGAAERVFELLDRKPAIGAGGEQLTDLRGHVQFRGVHFAYPSRPDVPVLQGLDLELRPGEVVAVVGPSGAGKSTLASLLSRFYDPQNGEVLLDGHPLTALEPEWLRRNIGMVAQEPQLFSCSIADNIRYGRPGATDAQVEEAARAANAHAYIERFPEGYGTQVGERGVQLSGGQKQRVAIARAVLKDPRLLILDEATSALDAESEHLVKDALERLMKGRTTLIIAHRLSTVANADRVLVLDGGVVIQSGTHASLMSQEGLYRRLVERQFVAA

SEQ ID NO: 7515 - DNA, 1980 bp, Rhodococcus sp. RHA1
  CDS (1)..(1980): transl_table=11
atgagcgatcgcgcaaccaccaccactgccgaaaggcccgccggcccgcgtattccaggaccggtcgctccgggtgccccggggtccaagccgaacgacctgtggccgtccaccaagcggctgctgaggcggctgggtccccaccggatcgccgtcggcatcgttatcctggtcgctgccgtgtcggtggtgctcacctcgatcgcgccgcggatgctcggtcagggcacgaacctgatcttcgacggcatcatcggcgcgcagttgcccgccgggatgtcgaaggatcaggccgtagccgcgttgcgggccgacggtcagaacacgttcgccgacatggtgtccggcatggccgtcgtgcccggtgtcggaatcgacttcagtgcgctcggccgggtgctggcgatcgtgctggccctgtacctggggtcggcggtgttcatgtggctgtcgggtttcctgctgaacatcatcgtgcagggtgtcgtgaagaatctgcgcgccgaggtcgaacggaagatccatcgacttccgctgcgctacttcgactcccactcccgcggcgacctgctgagccgggtcaccaacgacatcgacaacgtctcgcagtcgttgcagcagacgatgagtcagctgatcgtgtcggcgatgacggtgatcggcatcctcgtgatgatgatcgtcatctcgccgctgctcgccttgatcgcggtgctgacggtgccgctgtcgatcctggtgaccgcgcagatcgcgaaacggtccaagacccacttcgtgtcgcagtggaagtcgacgggagcgctcaactctcacgtggaggaggcgtacacgggccacgaactggtcaccgtgttcggccgcagccgcgaggtggaggcccggttcgaggagcagaacgaggcgctctaccaggccagttaccgggcccagttcatctcgggcctgatcatgccggcgatcatgttcctcggaaatctcaacttcgtggccatcgccgtgctcggtggcatgcgggtggcgtccggcacgatgagcctcggcgacgtgcaggcgttcatccagtactcgcgccagttcacccagcccctcacccagatcggggccatggtcaacctcatgcagtcgggtgtggcgtccgccgagcgggtgttcgccatcctcgacgaggacgaggaggaacccgacctcgccgaagcgcccacgccggccgagccccgtgatgcgggtcgcgtccatacgttcggccgggtggagttctcggacgtgtcgttcagctactcgccggagaagccgctgatcgagaacctgtcgctggtggcggaacccggtcagatggtcgccatcgtcggacccaccggcgccggcaagaccacactcgtcaacctgatcctgcggttctacgaactcgacggcggcaagatcctcctcgacggcgtcgacaccgccgagatgtcgcgcgacgacctgcggtcccgcatcggcatggtgctgcaggacgcctggttgttcggcggcaccatccgcgacaacatcgcgtacggacgtcccgacgccaccgaggacgagatccaggcggccgcacgaatcagctacgtcgaccggttcgtccactcgctgcccgacggctacgacaccgtcatcgacgaagagggcagcaacatcagcgccggtgagaagcagctgatcaccatcgcccgcgcgttcatctcgcagccgtcgatcctgatcctcgacgaggcaaccagttccgtcgacacccgcaccgagttgctcgtgcagcacgccacggcggtcctgcgcagcgatcgcacgagtttcgtgatcgcacaccgcttgtcgaccatccgcgacgccgacctcatcgtcgtcatggaggacggtcgcatcgtcgagcagggcagccacgacgacctgctcctcacccgcggcgcgtactaccgcctctacaacagccagttcgtcggcgccgaagtctga

SEQ ID NO: 7516 - protein, 659 aa, Rhodococcus sp. RHA1
MSDRATTTTAERPAGPRIPGPVAPGAPGSKPNDLWPSTKRLLRRLGPHRIAVGIVILVAAVSVVLTSIAPRMLGQGTNLIFDGIIGAQLPAGMSKDQAVAALRADGQNTFADMVSGMAVVPGVGIDFSALGRVLAIVLALYLGSAVFMWLSGFLLNIIVQGVVKNLRAEVERKIHRLPLRYFDSHSRGDLLSRVTNDIDNVSQSLQQTMSQLIVSAMTVIGILVMMIVISPLLALIAVLTVPLSILVTAQIAKRSKTHFVSQWKSTGALNSHVEEAYTGHELVTVFGRSREVEARFEEQNEALYQASYRAQFISGLIMPAIMFLGNLNFVAIAVLGGMRVASGTMSLGDVQAFIQYSRQFTQPLTQIGAMVNLMQSGVASAERVFAILDEDEEEPDLAEAPTPAEPRDAGRVHTFGRVEFSDVSFSYSPEKPLIENLSLVAEPGQMVAIVGPTGAGKTTLVNLILRFYELDGGKILLDGVDTAEMSRDDLRSRIGMVLQDAWLFGGTIRDNIAYGRPDATEDEIQAAARISYVDRFVHSLPDGYDTVIDEEGSNISAGEKQLITIARAFISQPSILILDEATSSVDTRTELLVQHATAVLRSDRTSFVIAHRLSTIRDADLIVVMEDGRIVEQGSHDDLLLTRGAYYRLYNSQFVGAEV

SEQ ID NO: 7517 - DNA, 1833 bp, Trichodesmium erythraeum IMS101
  CDS (1)..(1833): transl_table=11
atgagtagaaactcaagcaaaaataataatagcaaatattacactaaaaacattgaaacagactggcaactaattcaacgcttgctaaactacacccgaccttacaaaaccttagtagcaacatcactaatattattattaccactatcaattgcaggtacaattcaaccactattagtcggacaagcaatttctctaattttaagagaaaaaacttggctatttctccaacaaatatcattatctcaaggactaaatactttagcaataatattaaccctaagcatcattgtacaattcctatttcaatctgtacaaggttttttagtagaaaaaatcggacagcaaattaccgctgatattagaaatgatttatttaaacacgttctttccctaggagtaaaattttttgacactgcccctgtaggtaaattaattactcgccttaccagcgatgttgaagctttaggagatgtcttttctacaggtgctattgggataataagggatttattctcaattttaatcattgcagtcaccatatttattcttcaatggcaattggccttaacactcatactaatgatgttaccagtaacagcaattgttatctatttccagcaaaaatatcggcacgctaattacaaagctagagatgaactttccgatttaaattctcagctacaagaaaacttagttggcattgaaatagtgcaattatttcgcagagaaaagttcaactcagaattatttagagccaataatataaattatgtaaaagcattagataaaactatcttttatgactctgctatctctggtattttagaatggatttctttaattgctatcgctacagttttattcttaggaggacaattttttttagcaggaaatctagactttggtactctatcttccttcattttatatgctcaacgtttattcaaccccttacgacaatttgctgaaaaatttacagctattcaagctggattaaccgccattgaacgcattgcaaatattctcaacgaaaaaattgaaattattgacccagaaaaagaaattcaaaagttatcaaaccttcaaattaataattcccaaataggtgaaattagatttgaaaatgtctggtttgcctacaaatcaaatcaatatattctcaaaaacattaactttactattaaaccaggagaaaaaattgccttagtcggaccgactggagccggaaaaagttctataattcgcttactttgtcgtttatatgatgtaaataaaggtaggattttagttgatggaattaatattaaaaacttacctcaagcagaattacggaaacatattggtgtgattctacaagatggatttttatttactggagatgtaaaaagtaatattactctcggagaaaaatattcatttgaagaaattaaagcatcagcaaaaagcacaaatatagataaattcattgccgaattaccccaaggatataatactcaattacgagaacgaggatctaacatttcaggtggtcaaaaacaattattagcatttgcccgtgctgctattcgtaacccgaaaattttagtacttgacgaagcaactgctagtttagatgtcagaacagaagctttaattcaatcagcattagaaaaaattttagcacaacgaacaggtattattattgctcatcgactttccacaattagaaatgttaatcggatatttgtactgaaaacaggagaattaactgagtcaggtacccatcaagaattactacaacaaaacggtacttatgctagtttatataaattgcaaacgttaggaacttga

SEQ ID NO: 7518 - protein, 610 aa, Trichodesmium erythraeum IMS101
MSRNSSKNNNSKYYTKNIETDWQLIQRLLNYTRPYKTLVATSLILLLPLSIAGTIQPLLVGQAISLILREKTWLFLQQISLSQGLNTLAIILTLSIIVQFLFQSVQGFLVEKIGQQITADIRNDLFKHVLSLGVKFFDTAPVGKLITRLTSDVEALGDVFSTGAIGIIRDLFSILIIAVTIFILQWQLALTLILMMLPVTAIVIYFQQKYRHANYKARDELSDLNSQLQENLVGIEIVQLFRREKFNSELFRANNINYVKALDKTIFYDSAISGILEWISLIAIATVLFLGGQFFLAGNLDFGTLSSFILYAQRLFNPLRQFAEKFTAIQAGLTAIERIANILNEKIEIIDPEKEIQKLSNLQINNSQIGEIRFENVWFAYKSNQYILKNINFTIKPGEKIALVGPTGAGKSSIIRLLCRLYDVNKGRILVDGINIKNLPQAELRKHIGVILQDGFLFTGDVKSNITLGEKYSFEEIKASAKSTNIDKFIAELPQGYNTQLRERGSNISGGQKQLLAFARAAIRNPKILVLDEATASLDVRTEALIQSALEKILAQRTGIIIAHRLSTIRNVNRIFVLKTGELTESGTHQELLQQNGTYASLYKLQTLGT

SEQ ID NO: 7519 - DNA, 1839 bp, Synechococcus sp. CC9311
  CDS (1)..(1839): transl_table=11
atggctggttcggattttcagagggtcaagcggctaggtcgttatttgggccgagaccgacgacggctgacgctcacgttggtgctgctcattccggtggcacttgccggcgcgattcagccgctgttggtcggccaggcgattgccgttctacggcgtgttggtggggccgctaacgaatcggtgatccctctctttcaggggctcgacagcacagttgcgatccgactgatcattctgatgttgctgggctccgttctggttcgcttggcacttcagggggtccagacgttcaatattcaagccgtcggccagcgtctcaccgctcgaatccgaaaggacttgtttgcacatgcgatgagtttgtccttgaggtttcatgacagcatgcctgtgggcaagctcctgacccgcctcactagcgatgtggatgcattggctgaagtttttgggagcggtgccgtcggtgtgctcggtgaccttgtcagcctgttggtcattgcggtttcgatgctgctgatcgagtggcgtttgggtttgttgctgttggtgacccaagtgcctgtaacactcgtgattgtttggctgcagaggcgatatcgcagggccaattatcgagtgagagaggagctatctcaactcaatgctgattttcaggaaaacctccagggccttgaggtggtgcagatgtttcgccgtgaagctgtcaacggagaccggtttcagagaactgggttggcatatcggagtgcagtgaatggcacgatcttttttgacagcagcatctctgcttttttggaatgggtgtctttaggcgctgttgccctagtgcttgctcttggcggatggatggtgacagcaggagcgatgggccttggcactctcacaaccttcatcctctattcacagcgtttgtttgatcctctgcgtcaaatggctgagcggtttacacagattcaggggggactgaccgccgtggaacggatcggagagctattggaggaacctctcgagattgttgaccatggcgcaacccgtggttcagcgcttgcttccgcttttggttccacgctgctccagaacgcttcatcctctcaatcccgtggtgaggtgatctttgaagaggtggactttgcctaccgacaagacgagccgatccttcgcaatctgagttttcggattgcgcccggtgagcatgttgcgcttgttggacctaccggatcaggcaagaccacggtgattcggctcctctgcaggttgtacgagccccagcggggacgaatccttcttgatggccaggacattcgcactttgcctttgcaagagctgcgtcgtcagttgggtgtggtgcttcaagacacctttctcttcagtggaacggtggctgacaacttgcgtttggatcgccccctcgatgaccagaaattgcaggaggtttgccgtgatctcggcctggatcccctgttaggtcgattgcccgaaggcttggaaaccgaattgagagagcggggcggaaatctcagctctggagaaagacagctgcttgctgtggccagggtggcgattcgcaacccaacggtcctggtgatggatgaagccactgcgtttatggatccctccacggaagccacccttcagcgggacttagatcgtcttctcaaccgccgcaccgcagtggtaattgcccaccggctcgctactgtcgaggcggctgatcgaattttggtacttcgccgaggaagcctgatcgaacagggcacccatcttcaattgagggccagtggcggtttgtatgccgaacttgcggatcttcaggagcgagggctcgccagactttga

SEQ ID NO: 7520 - protein, 612 aa, Synechococcus sp. CC9311
MAGSDFQRVKRLGRYLGRDRRRLTLTLVLLIPVALAGAIQPLLVGQAIAVLRRVGGAANESVIPLFQGLDSTVAIRLIILMLLGSVLVRLALQGVQTFNIQAVGQRLTARIRKDLFAHAMSLSLRFHDSMPVGKLLTRLTSDVDALAEVFGSGAVGVLGDLVSLLVIAVSMLLIEWRLGLLLLVTQVPVTLVIVWLQRRYRRANYRVREELSQLNADFQENLQGLEVVQMFRREAVNGDRFQRTGLAYRSAVNGTIFFDSSISAFLEWVSLGAVALVLALGGWMVTAGAMGLGTLTTFILYSQRLFDPLRQMAERFTQIQGGLTAVERIGELLEEPLEIVDHGATRGSALASAFGSTLLQNASSSQSRGEVIFEEVDFAYRQDEPILRNLSFRIAPGEHVALVGPTGSGKTTVIRLLCRLYEPQRGRILLDGQDIRTLPLQELRRQLGVVLQDTFLFSGTVADNLRLDRPLDDQKLQEVCRDLGLDPLLGRLPEGLETELRERGGNLSSGERQLLAVARVAIRNPTVLVMDEATAFMDPSTEATLQRDLDRLLNRRTAVVIAHRLATVEAADRILVLRRGSLIEQGTHLQLRASGGLYAELADLQERGLARL

SEQ ID NO: 7521 - DNA, 1821 bp, Solibacter usitatus Ellin6076
  CDS (1)..(1821): transl_table=11
gtggaagaagaggttcttggcaaggcatatgacgggcggctgatgcgccgcctgctcgggtacatgcgtccctaccggttgctggtggcgctatcgctggttttcctgctgctgcaatccgcgttgcaagtgctgggaccgttgctgaccaaaacggcggtggaccgctacatcgcgcccaccggcggacaaatcccggagtttctggcgcgcttcctgccggccgacgcgtgggatgggctgacgcgaataggtctagtatacctaaccgtactggccgcaaatttcgtgtgcgagttcattcagatgtatgtgatgcagtacacgggacagctggcgatgttcgatttgcggcgcgagctgatggagcacctgcagggacttgacctggccttctatgaccgcaatccggtggggcggctggtgacccgggtgacgaccgacgtggacgtgctgaacgaactgttcgcatcagggctggtgacgattctcggcgacattctggtgctggtcttcattctggcgatcatgttcagcttcagtccgacgctgacggcgatcatgttgacggcgatgccgttcgtgattctgacgacggtgatcttccggcgcagcgtgtcgcagagctaccggcggatccgcgtggccatcgccaagatcaactcattcttgcaggagcacattacgggcatcgcagtgctgcagttgttcaatcgcgaagaacgcagctgcaaggaattcgagcaggtgaatcgcgagcacatggaagcgttcaaggatgcgatcacggcttacggatggttctatcctgtggtggaatttctctccatgatggcgctggccgggattctgacgtacggcggattccgggtgcaggcggggcggctttcgttgggagtggtagcggcgtttctgcagtatggactgcggttcttccggccgattcaggatttgagcgagaagtacaacattctgcaatcggcgatggcgagttcggagcgggtgttcaagttgttggatacggaggcggcggtgctgcccccggaatccgcgcagccggcgccggcggggatcgcgccgatcgagttcgaccacgtatggttcgcgtataaggatgaggactgggtgttgcgtgacgtgagctttacgatcgcgccgggagagacgatcgcggtggtggggcacacaggcgcgggcaagactacgctgatcagcctgctgctgcgcttctatgacgtgcagagggggagcatcaaggtcggaggcgtggatgttcgcctatacggtccactggatctgcggcggatgttcggcgtggtgctgcaagatccctacctgttcacggggacgctggaagagaatatccggctcgggacagagaacatccgcgccgaagaggtggaggcggcggcggagcaggtgaacctgatggattttatccgcacgctgcccgagggattcgggcacacgatccgggagcgcgggagcgggctatcgacgggtcagaagcagttgattagcttcgcgcgggcgctggcgcacaatccgcggtacctgattttggatgaggcgacatcgagcgtggacacggagacggaatttcgcgtgcgggaagcgttgaaccggatggtggcgggcaggacgtcgatcgtgattgcgcaccggctttcgacaattcagcgggcggaccggattctggtgatgcataaggggcatctgcgcgagagcgggacgcaccaggagttgctggcgcagcgggggatttactggaagttatatcagctgcaatataaggatcaggagcgcgtggcggctgactga

SEQ ID NO: 7522 - protein, 606 aa, Solibacter usitatus Ellin6076
MEEEVLGKAYDGRLMRRLLGYMRPYRLLVALSLVFLLLQSALQVLGPLLTKTAVDRYIAPTGGQIPEFLARFLPADAWDGLTRIGLVYLTVLAANFVCEFIQMYVMQYTGQLAMFDLRRELMEHLQGLDLAFYDRNPVGRLVTRVTTDVDVLNELFASGLVTILGDILVLVFILAIMFSFSPTLTAIMLTAMPFVILTTVIFRRSVSQSYRRIRVAIAKINSFLQEHITGIAVLQLFNREERSCKEFEQVNREHMEAFKDAITAYGWFYPVVEFLSMMALAGILTYGGFRVQAGRLSLGVVAAFLQYGLRFFRPIQDLSEKYNILQSAMASSERVFKLLDTEAAVLPPESAQPAPAGIAPIEFDHVWFAYKDEDWVLRDVSFTIAPGETIAVVGHTGAGKTTLISLLLRFYDVQRGSIKVGGVDVRLYGPLDLRRMFGVVLQDPYLFTGTLEENIRLGTENIRAEEVEAAAEQVNLMDFIRTLPEGFGHTIRERGSGLSTGQKQLISFARALAHNPRYLILDEATSSVDTETEFRVREALNRMVAGRTSIVIAHRLSTIQRADRILVMHKGHLRESGTHQELLAQRGIYWKLYQLQYKDQERVAAD

SEQ ID NO: 7523 - DNA, 1752 bp, Magnetococcus sp. MC-1
  CDS (1)..(1752): transl_table=11
gtggttcaagatacccaactcatccgccgtctgctgcgcttgatctggccgttccgttggtatgtcattaccgcactgctctgtatgggggtgatggcggctaccaatggggccatcgcctttatggtcaaaccgctggtggatgacgtctttatgcagaaagacgcctccctcgttacccttattcccattgtggttatgggtatttttatcgtgcgggcggtggtcttttttctgcaatcctatctgatgcagagcttgggctttaagattgtgcggctgttgcaggtgcggctctacaaaaagattctgcatttggatatggagcgttttaataccgaatccaccggtagttttatctctcgcatgatctttgatattgatcagctcaagcgggtggtctccaccgccttggccgatattacccgggagctgttgacggtcacttttctgtttggggtggtggtctatcgcgccgcagagctggcctgggtctcggtggttggggtgcctttagcggtctatctgatctacctgttcgggcgaaaaatgcgcaccatcagccgccgccaacaagagctgatggaggatgtcaccagccatctggaggagaccatcgccggggttaaggtggtcaaagcctactgtatggagggctatgaacatggggtgtttcggcgtattagccagcgggtattaaaaaacaacctgcgctcagcctttatcaacgccatctccaagccctccattgatctggtggcgggtattgccatctcgctggtggtgttgacctcggcccatgccattttggatggtaaaaccacccctggtacgctcttttcgttccttaccgcgctcatgatggcttacagtccattgaagcgtattacgatgctctataatgggttacaagcgggattggcggcggcgcaacgggtgtttgagcggctggatcaatatcctgccattcaaaatgtgccggaggccggtaagctgcaaccccttaccaaagcgctgcgttttgaaaatattggctttcgttatcagagcagcgaggggccggtgctgcgaggcatcaacctacacattggggtgggcgaaaaggttgcgctggttggtcaaagcgggtgtggtaaaagcaccctggccaatctggtgccgcgcttttatgagccgcagcagggggcgattctgtttgatggggtcgatattcgcagtgtgaccatgcgctctttacgccagcagattgccatggtgacccaggagaatgtgctgtttaacgataccatccgcaacaatgtggcctatggcaagctcagagccagcgatgaggagatctgggcagccctggaggcggccaatgccaagagctttgtggagcagttacccgaggggctggatgccatgatcggcaataagggggccaagctttcgggtgggcagcggcaacgcattgccattgcccgcgccctgctcaaatcggcctctgtgttgattttggacgaagcaaccagcgccttggatagcgagagtgaacagttggtgcaagaggcgctggatcgtctgatggaccgctacaccacgctggtgattgcccatcgtctatccaccattcgcaatgccgaccgcattgtggtgatgcatgaaggggcggtggcggagatgggcacccatgatagcttgctggcgcaggggggcctctatgccaaactctgtgagattcaatttgatacccaaacggcgaaagagtaa

SEQ ID NO: 7524 - protein, 583 aa, Magnetococcus sp. MC-1
MVQDTQLIRRLLRLIWPFRWYVITALLCMGVMAATNGAIAFMVKPLVDDVFMQKDASLVTLIPIVVMGIFIVRAVVFFLQSYLMQSLGFKIVRLLQVRLYKKILHLDMERFNTESTGSFISRMIFDIDQLKRVVSTALADITRELLTVTFLFGVVVYRAAELAWVSVVGVPLAVYLIYLFGRKMRTISRRQQELMEDVTSHLEETIAGVKVVKAYCMEGYEHGVFRRISQRVLKNNLRSAFINAISKPSIDLVAGIAISLVVLTSAHAILDGKTTPGTLFSFLTALMMAYSPLKRITMLYNGLQAGLAAAQRVFERLDQYPAIQNVPEAGKLQPLTKALRFENIGFRYQSSEGPVLRGINLHIGVGEKVALVGQSGCGKSTLANLVPRFYEPQQGAILFDGVDIRSVTMRSLRQQIAMVTQENVLFNDTIRNNVAYGKLRASDEEIWAALEAANAKSFVEQLPEGLDAMIGNKGAKLSGGQRQRIAIARALLKSASVLILDEATSALDSESEQLVQEALDRLMDRYTTLVIAHRLSTIRNADRIVVMHEGAVAEMGTHDSLLAQGGLYAKLCEIQFDTQTAKE

SEQ ID NO: 7525 - DNA, 1797 bp, Shewanella sp. ANA-3
  CDS (1)..(1797): transl_table=11
atgcgcccaacattgtattttgaaggtcccatcgataagctcaattggcacgtagttaagttgctctggccttatttgctcgaatacaagggccgggtggctctagccatgtcttgccttatcgtcgctaagcttgccagcgtgggcttgccctttattctgaaagacttagtcgatactttggatgccaataaaaccgcgcaggccttgagtgtgcctatcggattagttttagcctacggcgcagtgcggctgttaacagtcatcacgggtgaaatccgtgacaccttatttggccgtgtcacagagcgtgcaattcgccgattgggcctcgcggtgttcgaccacctgcatcgactcgatttggattttcaccttgagcggcgtacgggcggcttatcgcgagatattgaacgcggtaccagtggtgtgagcttcttgatgcgctttatggtgtttaacatagtgccgaccctgctagaaatcgccatggttattggtattttcttttttaattatggcattgcctttgccgctatcacttttacctctgtgatggcctacatttggttttctgtggtggcgactgagtggcgcaccgaatacgtccgggatgcggccaaggccgactccctctccaacacccgcgccatcgacagcctgctcaactatgaaaccgtgaagtattttaataatgagaaatatgaatcggaccgttatgaccaagccttagaccaatgggaagtggctaaacgtaagaatcgtttatcactatttgctctcaacggtggccaggcgctgattatcgcgttggctatgacggcgatgatggcgttagccgcctataaggtgactaataatgagatgaccttaggtgactttgtactgatcaatgcctttatgatgcagctctttatgccgctcaactttttaggatttgtctaccgtgaaatccgcggagccctagccaatattgaacggatgttcagtttgctcgataaacaccctcgcatagtagataaacccgatgcctttgactttgagcctaagcgcggcgagctcagttttgagcatgtgagttttagctacgatgacaggcccatattgcgtaacgttagctttaaggtgacggcggggaaaaaagttgccgtcgttggagatagcggcgccggaaaatcaacactcatcaagttgctgttccgtttttacgatgtggagcaagggcgcattttgattgatggacaagatattcgccaattaacccaagatgcattgcgccgcgccattgccatagtgccgcaggatacagtgttatttaatgattccttagtggagaacattcgttatggtcgtcccgatgcgacggatgaagaagtgcgccatgccatcaaactcgcgcatttagagcattttatcgcgtcgctctcccaaggttgggataccaaagtgggtgagcggggcttaaagctctcgggaggggagaaacagcgcgtggccattgcgcgggcgattttaaaaggctctccggtgttagtgtttgatgaggctacatcctccctcgatagtcgctcggaacaggcgattctgtcggcactgcgcgaggtcgccaaagggcataccagtttagtggtggcgcatcggttatcgaccatagtcgacgccgaccaaatcgtggtcttaagccaaggggaaattgtcgagcaggggaatcatcagtccttactggctcagaatggtctctacgctaagttgtggcgcatacaaaatgagcaacaacagctttcggtagaagtgtaa

SEQ ID NO: 7526 - protein, 598 aa, Shewanella sp. ANA-3
MRPTLYFEGPIDKLNWHVVKLLWPYLLEYKGRVALAMSCLIVAKLASVGLPFILKDLVDTLDANKTAQALSVPIGLVLAYGAVRLLTVITGEIRDTLFGRVTERAIRRLGLAVFDHLHRLDLDFHLERRTGGLSRDIERGTSGVSFLMRFMVFNIVPTLLEIAMVIGIFFFNYGIAFAAITFTSVMAYIWFSVVATEWRTEYVRDAAKADSLSNTRAIDSLLNYETVKYFNNEKYESDRYDQALDQWEVAKRKNRLSLFALNGGQALIIALAMTAMMALAAYKVTNNEMTLGDFVLINAFMMQLFMPLNFLGFVYREIRGALANIERMFSLLDKHPRIVDKPDAFDFEPKRGELSFEHVSFSYDDRPILRNVSFKVTAGKKVAVVGDSGAGKSTLIKLLFRFYDVEQGRILIDGQDIRQLTQDALRRAIAIVPQDTVLFNDSLVENIRYGRPDATDEEVRHAIKLAHLEHFIASLSQGWDTKVGERGLKLSGGEKQRVAIARAILKGSPVLVFDEATSSLDSRSEQAILSALREVAKGHTSLVVAHRLSTIVDADQIVVLSQGEIVEQGNHQSLLAQNGLYAKLWRIQNEQQQLSVEV

SEQ ID NO: 7527 - DNA, 1884 bp, Nocardioides sp. JS614
  CDS (1)..(1884): transl_table=11
gtgtcggggatgcacggaggcggggccgcctggcgactgctgcggtcggaccgcagcatcgtccacaaccggctcgagcgcggcacggtacgccgcgtggtcggcttcgcccgaccgcaccgcaggctgatcggcgtcttcctggtgctgaccgtgatcgacgccggcctcgtcgtggtcagcccgctcctggccaagagcatcatcgacgacgggatcaagcagggcgaccgcaccctgatcacgctgctcgcgctcgcgatggccgcgaccgccctggtcagcgccgtgctcgcggtcggtgtgggctggctctcgtcccgcatcggtgagggcctgatctacgacctgcggacccgcgtgttcgcccacgtgcaacgtcagtcgctcgcgttcttcacccgcacccagaccggggccctggtctcccggctgaacaacgacgtgatcggggcgcagcgcgccttcacctcgacgctctccacgacggtcgccagcaccatctcggtggtggtcgtcggcatcaccatggtcgccctgagctggcaggtgaccctcctctgcctggcgatcttcccgctcctggtgctggtctcgcggtgggtgagcgcccgcctcgccggcctgacccgtgaccagatggacggcaacgccgacatgggcaacgcgatgaccgagcggttcaacgtcggcggcgcgatgttgctcaagctgttcgggcgccgagccgacgaggatgcgctgttcgccgtcaaggccgcccgggtccgcgacctgggggtccggatcacgctgctcacccgcctgttcggggcctcgatgatggccgtcccggcgctggcgaccgcactggtctacgggctcggcggacagctcgtcgtcgacgagacgctcacggtcggcaccctcatcgccctcgccaccctgctcctgcggctcctcgggccgttgcagagcctctcgaacgtccggatcgacgtgatgaccgcgctcgtgagcttcgagcgggtcttcgaggtgctcgacctgccctcgctgatcgaggagcggccggacgcgacgaggctgcctccgggcgccgcccgcctggagttcgaccacgtcgcgttcgcctacccccgcgcggacgagatctcgctcgcctcgctcgaggtggtcgcccgcagcgagtcccgggacaccggccaggtgctcaccgacatcagcttcaccgccgagccgggccagatggtcgcgctcgtgggtccctccggtgccggcaagaccaccgtcacccacctcgtcgcccgcctgtacgacgccggcgccgggtcggtgcgggtcggcggccacgacgtacgtgacgtgaccctgcagtcgctggaggacgccgtcggctacgtcacccaggacgcgcacatgttccacgacacgatccgcgccaacctgctctacgcccgcccgggcgccacggacccggaggtctgggcggcgctggaggccgctcagatcgccaccctggtgcgcgggctgccggacggcctggacacggtcgtcggcgaccgcggctaccggctctccggaggcgagcggcagcggctggcgatcgcgcggctcctcctgaaggccccggcgatcgtcgtgctcgacgaggcgaccgcgcacctggacagcgagtccgaggccgcggtccagcgggcgctggacgcggcgctcgagggccgcacgtcgctggtgatcgcgcaccggttgtccacgatccgcgacgccgaccagatcctcgtgctcgacgacggccggatcgtccagtccggcactcacgcggagctgctcgcccggggcggcctgtacgccgacctgtaccgcacccagttcatcgaggaccagccgtccgcgacggtctga

SEQ ID NO: 7528 - protein, 627 aa, Nocardioides sp. JS614
MSGMHGGGAAWRLLRSDRSIVHNRLERGTVRRVVGFARPHRRLIGVFLVLTVIDAGLVVVSPLLAKSIIDDGIKQGDRTLITLLALAMAATALVSAVLAVGVGWLSSRIGEGLIYDLRTRVFAHVQRQSLAFFTRTQTGALVSRLNNDVIGAQRAFTSTLSTTVASTISVVVVGITMVALSWQVTLLCLAIFPLLVLVSRWVSARLAGLTRDQMDGNADMGNAMTERFNVGGAMLLKLFGRRADEDALFAVKAARVRDLGVRITLLTRLFGASMMAVPALATALVYGLGGQLVVDETLTVGTLIALATLLLRLLGPLQSLSNVRIDVMTALVSFERVFEVLDLPSLIEERPDATRLPPGAARLEFDHVAFAYPRADEISLASLEVVARSESRDTGQVLTDISFTAEPGQMVALVGPSGAGKTTVTHLVARLYDAGAGSVRVGGHDVRDVTLQSLEDAVGYVTQDAHMFHDTIRANLLYARPGATDPEVWAALEAAQIATLVRGLPDGLDTVVGDRGYRLSGGERQRLAIARLLLKAPAIVVLDEATAHLDSESEAAVQRALDAALEGRTSLVIAHRLSTIRDADQILVLDDGRIVQSGTHAELLARGGLYADLYRTQFIEDQPSATV

SEQ ID NO: 7529 - DNA, 1803 bp, Azoarcus sp. BH72
  CDS (1)..(1803): transl_table=11
atgtctcgcgccgatgcgccggctccatccagtctcagaatctactttcgcctgctcggttacgtccgcccctacgtcggacaattcgtcctgagcattgtcggctttctgatctttgcttcatcccagcccatgctcgccggggtgatcaagtatttcgtcgacgggctcaacgacccgggcgcgacgccgttcaccggcgtgccgctgctcgccagcctgccgctgatgtcggcggtgccggtgctgatcatcctgatcgtggtgtggcagggcatcggctcctacctgggcaactactttctcgccaaggtttcgctggggctggtgcacgacttgcggatggcgctgttcgacagcctgctgcggctgcccaaccgctatttcgacaaccacaactccggccatctggtatcgcgcatcaccttcaacgtcacgatggtcaccggcgccgccaccgatgcgatcaaggtggtgatccgcgaagggctgaccgtggtgttcctgttcggctacctgttgtggatgaactggaagctgaccctggtgatggtggccatcctgccggtgatcgggctgatggtgaccagcgcaagccgcaagttccgcaagcagagcaagaagatccaggtggcgatgggcgatgtcacgcacatcgcctcggagaccatccagggctaccgcgtcgtgcgcagcttcggcggcgaggcttacgagtcgcgccgtttccaggccgccagcgaagacaacaccgccaagcagttgcgcatggtgaagaccggcgccacctacacgccgatgctgcaactggttacctatgtggcgatggcggcgttgctgttcctggtgctgttgctgcgtggcgacgcttcgcccggcgacctcgtcgcctacatcaccgccgcaggcctgttgcccaagccgatccgccagttgtccgaagtcagttccacggtacagaagggcgtcgccggcgcggagagcatcttcgagcagctcgacgagccggccgagctggaccgcggcacggtggagcgcgagcgcatcgccggcaggctggaagtgcgcggcctgagcttccgctatccgggtaccgagcgggtggtgctggacgacatcagcttcgtcgtcgaaccgggccagatggtggcgctggtggggcgttccggcagcggcaaatcgacgctggcgagcctggtgccgcgcttctaccaccatgagcagggccagatcctgctcgatggcgtcgaggtcgaggattacacgttgcgcaacctgcgccgccacatcgcgctggtgacccagcaggtgacgctgttcaacgataccgtcgccaacaacatcgcctacggcgatctcgccgaagcgccgcgcgcgcaggtcgaggccgccgccgaagccgcctacgcgcgcgagttcatcgaccgcctgccgcagggcttcgacaccctggtgggcgagaacggcgtgatgctgtcaggggggcagcgccagcgcctcgcgatcgcgcgcgcgctgctgaaggacgcgcccatcctgatcctcgacgaagccacctcggcactcgacaccgagtccgaacgccatatccaggccgcgctcgacagcgcgatgcgcggccgtaccacgctggtgatcgcgcaccggctgtcgaccatcgagaaggccgacgtgatcatggtgatggagcagggccgcatcgtggagcgcggcagccacgccgaactgctggcggccggcggcgcgtatgcgcggctgcatgcgatgcagttccgcgacgaggcggaggccgccgaaagctaa

SEQ ID NO: 7530 - protein, 600 aa, Azoarcus sp. BH72
MSRADAPAPSSLRIYFRLLGYVRPYVGQFVLSIVGFLIFASSQPMLAGVIKYFVDGLNDPGATPFTGVPLLASLPLMSAVPVLIILIVVWQGIGSYLGNYFLAKVSLGLVHDLRMALFDSLLRLPNRYFDNHNSGHLVSRITFNVTMVTGAATDAIKVVIREGLTVVFLFGYLLWMNWKLTLVMVAILPVIGLMVTSASRKFRKQSKKIQVAMGDVTHIASETIQGYRVVRSFGGEAYESRRFQAASEDNTAKQLRMVKTGATYTPMLQLVTYVAMAALLFLVLLLRGDASPGDLVAYITAAGLLPKPIRQLSEVSSTVQKGVAGAESIFEQLDEPAELDRGTVERERIAGRLEVRGLSFRYPGTERVVLDDISFVVEPGQMVALVGRSGSGKSTLASLVPRFYHHEQGQILLDGVEVEDYTLRNLRRHIALVTQQVTLFNDTVANNIAYGDLAEAPRAQVEAAAEAAYAREFIDRLPQGFDTLVGENGVMLSGGQRQRLAIARALLKDAPILILDEATSALDTESERHIQAALDSAMRGRTTLVIAHRLSTIEKADVIMVMEQGRIVERGSHAELLAAGGAYARLHAMQFRDEAEAAES

SEQ ID NO: 7531 - DNA, 1881 bp, Nostoc punctiforme PCC 73102
  CDS (1)..(1881): transl_table=11
atgagcatctatcaatctctcaaaaaatcttatacgcaacctcgtcggcgtgaaaatgactggcggttgtttttgcgtctagtgccttacgcccgtcgtaacggacaactattggcgctgtcgatgtgcctactcatacccatcgccctagctaatgccgtccaacctctgttgattggccaagttatctccctaattcgcaatgaaccaagcgcttacgaatttctcaggaatcgccccttgtccgaaggattaaatatcctggagggattgttgtttgtggcgatcgcaatccgattgatttttacaggctaccagggttatttagtacagaagctagggcaacaaatcaccgccgcaattcgccaagatttatttcagcacgtaacatccctagcagtacgcttttttgaccgcacacccgtaggtaaattaatcaccagaatcaccagcgatgtggaagtcttaggcgatgtcttttctactggggcaattggcatcgtgtccaatttgttttccatgctggtgattttaggtttaatgttttccattgaatggcaactgacttgtttgctgctattgatgctattaccagttacctggttaattgtttacattcagcaacagtaccgcaaagccaattacaaagggcgggaagaactttctatattgaactcacagctacaagaaaatgtccttgggattaacgtagtgcagttattccgtagggaaaaatttaatgccgaactgtttcgtgccaccaacagccgctacacacagcaaatggatcaaaccattttttatgattcatttatttcagcaaccttagaatggattgggctgattgcgatcgcagctgttttgtgtatgggtggttggttactgttaggaaaaagtatagcttttgggactttatcggcatttgtcttgtatgcccagcgattatttgaccctttaagggattttgccgaaaaatttacagtaattcaagctggttttactgccattgaacgcgtaggcgatatattagatgaaccgatagaaatccgcgatcgcgccaatgtgcgcttctcaatatttgatgctaaattcggctacatagacgaaatcgttgcaaatctagaatccccagatactacttccccgcctgaactgggagagatttgctttgatcgtgtctggtttgcttataaaaatgatgattacgtaattaaagacttagatttcaccattcgtcctggtgaaaaagtggcattagtcggtcccacaggtgccggcaaaacttcgatcatccggcttttatgccgcctctatgaacccaccaaaggacgcattctcatcgatggcgtagatattcgagaagtcccacaggcagaactgcggcgctacatggcagtaattttacaagaaggttttttatttgctggcgatgttaaaagcaacatttctttaggagatggttataccattgaacagattcaacaagcagcagagcaaaccaacattgcccaatttatagaagaactaccccagggttatgatactcaacttcgagaacggggcacaaatatttctagtggtcaaaagcaacttttagcctttgcacgggctgctattcgcgatcctcaaattttggtgttagatgaagctactgctagtttagatgttggcacagaagctttagtgcaagaggcattaaaccagctaatgctcagacgtaccgctattattattgctcaccgcctgtctacgattcgcaatgtagaccggatttttgttctcaagcgtggcgaattaatcgaacagggaagtcacgaccaactactggaacagggagggctttatgcaactttgcataacttgcagatgttgggaagttag

SEQ ID NO: 7532 - protein, 626 aa, Nostoc punctiforme PCC 73102
MSIYQSLKKSYTQPRRRENDWRLFLRLVPYARRNGQLLALSMCLLIPIALANAVQPLLIGQVISLIRNEPSAYEFLRNRPLSEGLNILEGLLFVAIAIRLIFTGYQGYLVQKLGQQITAAIRQDLFQHVTSLAVRFFDRTPVGKLITRITSDVEVLGDVFSTGAIGIVSNLFSMLVILGLMFSIEWQLTCLLLLMLLPVTWLIVYIQQQYRKANYKGREELSILNSQLQENVLGINVVQLFRREKFNAELFRATNSRYTQQMDQTIFYDSFISATLEWIGLIAIAAVLCMGGWLLLGKSIAFGTLSAFVLYAQRLFDPLRDFAEKFTVIQAGFTAIERVGDILDEPIEIRDRANVRFSIFDAKFGYIDEIVANLESPDTTSPPELGEICFDRVWFAYKNDDYVIKDLDFTIRPGEKVALVGPTGAGKTSIIRLLCRLYEPTKGRILIDGVDIREVPQAELRRYMAVILQEGFLFAGDVKSNISLGDGYTIEQIQQAAEQTNIAQFIEELPQGYDTQLRERGTNISSGQKQLLAFARAAIRDPQILVLDEATASLDVGTEALVQEALNQLMLRRTAIIIAHRLSTIRNVDRIFVLKRGELIEQGSHDQLLEQGGLYATLHNLQMLGS

SEQ ID NO: 7533 - DNA, 1806 bp, Listeria monocytogenes str. 1/2a F6854
  CDS (1)..(1806): transl_table=11
atggaagcgatgaatgaacaagatgaaatgttagtgatgtccggtaaggaacatcgcgaggttttaaaaagaatgcttagttataccaaatatcatattccgagtttaatttggaccggtgtgcttgttcttctcgtaacgcttgcggatgtgtttgcaccaatcttgattaaaatatttttggatgattatttaacaccgatgaatttggaaatgcaggctttgctaattcttggtgcgggatatttgggacttacgattgggaaatcagttgtttggtatttccaattgctgttcttccaaaaaatcgcgcttgaaattgtgcaacaaatgcggattgatatttttacaaaacttcattcgctaggaatgcgctacttcgacaaaacgcctgcaggaagcattgtgtcgcgcgtgacaaatgataccgaagcggtgaaagatatgtttattaatgtgctttcaacagcgattcaaagtttgtttatgctcgttgggatttatgcagcgatgtttgcgctcaatgttcaattagcgttatatagtttacttttattcccgcttattgtctttattatttttgtttaccggaaatacagttcgcagttttaccgggcacgacgagaaaaattaagtcaattaaatgcaaaaattgctgagtcgatttcaggaatgtcgattgttcaacaatttaatcaagagcgtcggttagtaaaagaatttgagaaaatcaataaagattactatgacgtcggaatgaaaaatatcaaatttaatgcgctattacttggaccggcaattgatttgatttacgcgttggctgtagtgattattcttagtttctttggtgcagagtcattaataggaccggtagcgattgggacgatttatgcctttattagttactttgatcgttttttagaagcgatttataatgtaatggaacggctagcaatgtatcaagaggcgattacagcggcttcccgagtatttcgtattatggatgaaacggaagaagtaccagcccaattaaacgatccagaggcgaaaatcacgcgtgctaaaattgagtttaaagatgtttcgtttgcttatgaaggtgggcgtgacgttcttaaaaatattagctttacggctgaacctggacaaacagtggcacttgttggtcatacaggaagcgggaaaagctcgattatcaatttaatgatgcgtttttatgaatttgaacgtggcgatattttaattgatggtaagtcgattaagtctcatgaaattacagaactgcgtaagaaaactggactagttttacaagatagttttatgttttacggcgatattaatacaaacattcgcttgtatgataaaaacattacagatgaacaaattatagatgctgcgaaatttgttcaagcggacggctttattcaaactttgtccgatcagtacaaacataaagtaatcgagcgaggtgcttcgttttcaagtggacaaagacagctgatttcatttgcaagaacggttgtaaccaatccacaaattctcgttttagacgaagcaacggcaaatattgatacagaaacagaaagcttaattcaaacggggttaaaacgaatgcgagaaggacgcacgacaattgcgattgcgcatcgactttcgacaattaaggatgccgatttaattttagttttatccaaaggaagaattattgagcgtggtacacatgacagtttgattgcagaagaaggggtatatcattcgatgtatcaattacaaaatagtgggatggatttagacgaagcgctttaa

SEQ ID NO: 7534 - protein, 601 aa, Listeria monocytogenes str. 1/2a F6854
MEAMNEQDEMLVMSGKEHREVLKRMLSYTKYHIPSLIWTGVLVLLVTLADVFAPILIKIFLDDYLTPMNLEMQALLILGAGYLGLTIGKSVVWYFQLLFFQKIALEIVQQMRIDIFTKLHSLGMRYFDKTPAGSIVSRVTNDTEAVKDMFINVLSTAIQSLFMLVGIYAAMFALNVQLALYSLLLFPLIVFIIFVYRKYSSQFYRARREKLSQLNAKIAESISGMSIVQQFNQERRLVKEFEKINKDYYDVGMKNIKFNALLLGPAIDLIYALAVVIILSFFGAESLIGPVAIGTIYAFISYFDRFLEAIYNVMERLAMYQEAITAASRVFRIMDETEEVPAQLNDPEAKITRAKIEFKDVSFAYEGGRDVLKNISFTAEPGQTVALVGHTGSGKSSIINLMMRFYEFERGDILIDGKSIKSHEITELRKKTGLVLQDSFMFYGDINTNIRLYDKNITDEQIIDAAKFVQADGFIQTLSDQYKHKVIERGASFSSGQRQLISFARTVVTNPQILVLDEATANIDTETESLIQTGLKRMREGRTTIAIAHRLSTIKDADLILVLSKGRIIERGTHDSLIAEEGVYHSMYQLQNSGMDLDEAL

SEQ ID NO: 7535 - DNA, 1767 bp, Bacillus anthracis str. A2012
  CDS (1)..(1767): transl_table=11
atgatgactgagaaaaaacagagcgatttaagaagattgctttcttatatgaagccatataaaggactattagcattagcatttttatttctagttggtgcaactgtaactgaaatgatgggaccttttttaattaaacaatttcttgatgaacatttagtaccacgtaactttgatcaatcagcacttgttacactatttgtagtgtatattgttgctcacttattaaaagtattatttacttatttagacttgttatattttcaaaatatcgcttttaaaattgttcaagatatgcgtgttgaagtatatgagcatgttcaaaagttatcattaagtttctttgatcgtacgccgattggtacgcttgtatcacgcataacgaatgatacggaagcaattaaagacttttatgtgagtgtattatcaacatttgttaaaaatatcgtatttttaataggtattttagtagcgatgtttttattaaacgtaaaattagcgctattttctctcgtattaattccaataatgtttgcgattatggtgctatatcgccggaaaagtgcagctttttatttagaagtgcgtaatcaattaagcgtgttaaatgcaaagttaaacgaatccattcaagggatgaatattgttcaagtgtttagacaagaaaagcgtatgagaaaagagtttgaagaagtgaacaataaacattatagtgcagggcgacgtacgttaaagttagatgcattgcttttacgtccagctacagatttagtacatattgtagcgattgcattagtacttggtttatttggaattgatgctttgaaaagtcctgttgaagtaggcgttttatatgcgtttgttaactatatacatcgtttcttccagccggtaaatgagatgatgatgaaattatcatttttccagcaggcacttgtttcatcatcacgtgtatttcatttaatggatgagaaagatttagcaccagttcaaaaaggggatggaaatcctcaagtcattaatggagatattgaatttaaaaatgttactttttcttatgatggaaaacgtgatgttttaaaaaatgtatcttttcacgtgaaacaagggcaaacggttgctttcgttgggcacacgggtagcggaaaaagtaccattatgaatttattaatgcgattttataatattaagtctggaaatattgtaatagatggtgtagatttagaaaaatttgaagaacaagaaattagaaagaaaataggacttgtactgcaagatgcatttttatttgcgggaaatgtgaaacaaaatattcgtatgtataatgaagaaattacggatgaagaagtaaaagaagcggcacaatttgtgcaagcgaatacgtttattgaaaaattaccagagcagtatgaaacagaagtagtagaaagaggagctgcattttctagtggtcaacgacaattaattgcttttgctagaacgatagcaacgaatccgaaagtattagtattagatgaagcaacagctaatattgatacagaaactgaagatgcgatccaaacagcgttacagcaaatgcgaaaagggagaacgactatagccattgcgcaccggttatctacaattcaagatgcagaccaaattttcgttatgcatgatggagagatagtagaaagaggaacacaccaagaattactgagtgaacaagggttgtattataatatgtatttactacaaaataaaggaagtttacaaaaggccttgtag

SEQ ID NO: 7536 - protein, 588 aa, Bacillus anthracis str. A2012
MMTEKKQSDLRRLLSYMKPYKGLLALAFLFLVGATVTEMMGPFLIKQFLDEHLVPRNFDQSALVTLFVVYIVAHLLKVLFTYLDLLYFQNIAFKIVQDMRVEVYEHVQKLSLSFFDRTPIGTLVSRITNDTEAIKDFYVSVLSTFVKNIVFLIGILVAMFLLNVKLALFSLVLIPIMFAIMVLYRRKSAAFYLEVRNQLSVLNAKLNESIQGMNIVQVFRQEKRMRKEFEEVNNKHYSAGRRTLKLDALLLRPATDLVHIVAIALVLGLFGIDALKSPVEVGVLYAFVNYIHRFFQPVNEMMMKLSFFQQALVSSSRVFHLMDEKDLAPVQKGDGNPQVINGDIEFKNVTFSYDGKRDVLKNVSFHVKQGQTVAFVGHTGSGKSTIMNLLMRFYNIKSGNIVIDGVDLEKFEEQEIRKKIGLVLQDAFLFAGNVKQNIRMYNEEITDEEVKEAAQFVQANTFIEKLPEQYETEVVERGAAFSSGQRQLIAFARTIATNPKVLVLDEATANIDTETEDAIQTALQQMRKGRTTIAIAHRLSTIQDADQIFVMHDGEIVERGTHQELLSEQGLYYNMYLLQNKGSLQKAL

SEQ ID NO: 7537 - DNA, 2061 bp, Exiguobacterium sibiricum 255-15
  CDS (1)..(2061): transl_table=11
gtgaaggaagaagaattatatctattagatcccgttcgtcggaaaacgacgattcgatcacttgttcgttatgcgatgtatgaaaaacaagcaattttcctcggattatttctcttgattctggcagtcggagcagaattgaccggaccatatattgcgaaagtcatcatcgatgaacatattgttgcgattgaaaaggattgggttgaagtgaaggacggaggaagggtcgagtatgacgggcgccagtttgcgaagaagcaggatgtgccgtcttccgatgtcattcaagcgatttcagttgttcaatcgaagagcggttattattttgtgcccgaacaagtcgtcagcggaggagaacgcaacgtgaccggtggaacgttaaccgtcacgcgtggggaagaaacgtttcgttattcgggcgtcaagaagctgacgcaaggacaggtgtatgatttttatgcctctgacttaaaagcggtcggctggctgtctttgctgtatatcgtcctgctgttaatcgcggccggtttgaactgggtccaacaaatcctgcttcagcggtcggcgcataaaatcgtcaaatggatgcggctcgatgtctttacacatttacaacggttaccggtccgctattttgaccagacaccgatcggaaagattgtcagtcgtgtcacgaacgatacggaaacaatccgcgatttgtacttgggtgtgctcgcacgcgtcttttcgggattgattacgatggccggaattttagtggcgatgtttttcctcgatgtccgtctcggactcgtttcgctgttgattattccgatcgtctacttctggattcagctgttccagaaacttgcaacggaaaataacttcaaggtccggtcgcttgtcgcagatatgaatggtcagttaaacgagaacattcaaacgatgccgatcattcaagcgtatgcgcgggaaaaagaagtgttggcggaatttgaacaaaaaaatgaagagaattatcaaacccgttcgaagttgttgcggcttgatgccttaatgtcgcataacttatcgtatttcctgaaaaacctgacgctggccttattgatctgggtcgtggcgggtaaaagtctgaccgacggaacctttttatcgctcgggattttatatgcctacatcgactatgtctcgcgtctctttgaaccggtcacacaaatcatgaatcagttgtcgccgttgcaacaagcactcgtttcagcagaccggatgttccaactgctcgacgaaaagggagaagacgtcggaaagggacgtttaccccgtttcgccggacgtgtggagttcaagcaggtcggtttcagctatgatccgggtcatcctgtcttacaggacatcgaaattgatgcccgtcccggagcgacaatcgctctcgtcggacatacgggtagcgggaaaagttcaatcatgaatctgctgatgcgtttttatgatccatcgtccggtcaattgctgattgatggacaggatgtcacgtcactgccgaaacaggcggtccgcgatcatatgggcatcgtcctgcaggatccgtttttgttcacgggaacaatccgttcgaacatcacgctcggcaatccgatgatttccgaggaacggattcgggaagcgatcgtcgccgttggggcagaccggttcatcgaccgtcttcctaaaggtcttgatgaacccgtcatcgaaaaaggcgcgaccttatctgccggcgaacggcagttgatcagttttgcccgggctttggcgtttgatccggccattttagttctcgatgaagcgacggcaagcgtcgattcggaaacggaagcgatgattcaggacgccttattgacgttgacgaaagggcgcacgaccttcatcattgcccaccgtttgtcgacgatcaaagacgctgacgaaatcatcgtcctcgaccatggacggatatccgaacgcggaacgcatgaagagttactcgcaaaacaaaaaatctatgccaaaatgtatgcgttgcaaagtaaacgcaatctcgaattgaaatcaagctaa

SEQ ID NO: 7538 - protein, 686 aa, Exiguobacterium sibiricum 255-15
MKEEELYLLDPVRRKTTIRSLVRYAMYEKQAIFLGLFLLILAVGAELTGPYIAKVIIDEHIVAIEKDWVEVKDGGRVEYDGRQFAKKQDVPSSDVIQAISVVQSKSGYYFVPEQVVSGGERNVTGGTLTVTRGEETFRYSGVKKLTQGQVYDFYASDLKAVGWLSLLYIVLLLIAAGLNWVQQILLQRSAHKIVKWMRLDVFTHLQRLPVRYFDQTPIGKIVSRVTNDTETIRDLYLGVLARVFSGLITMAGILVAMFFLDVRLGLVSLLIIPIVYFWIQLFQKLATENNFKVRSLVADMNGQLNENIQTMPIIQAYAREKEVLAEFEQKNEENYQTRSKLLRLDALMSHNLSYFLKNLTLALLIWVVAGKSLTDGTFLSLGILYAYIDYVSRLFEPVTQIMNQLSPLQQALVSADRMFQLLDEKGEDVGKGRLPRFAGRVEFKQVGFSYDPGHPVLQDIEIDARPGATIALVGHTGSGKSSIMNLLMRFYDPSSGQLLIDGQDVTSLPKQAVRDHMGIVLQDPFLFTGTIRSNITLGNPMISEERIREAIVAVGADRFIDRLPKGLDEPVIEKGATLSAGERQLISFARALAFDPAILVLDEATASVDSETEAMIQDALLTLTKGRTTFIIAHRLSTIKDADEIIVLDHGRISERGTHEELLAKQKIYAKMYALQSKRNLELKSS

SEQ ID NO: 7539 - DNA, 1872 bp, Exiguobacterium sibiricum 255-15
  CDS (1)..(1872): transl_table=11
ttgaacggggaacacacgacgaattgcttgcgcggaacggttggtataaagaaacatacgaccgccagcaactggaatcactcgtcgaacagggaggtggaacgcttgaatcatgatattaatgaaaaagcggtcttgcgacgattgcttggcttcgtcaaaccgtttaaaaaacaggtgttagtcgccttcttactgttgctggtgacgaccggagcaaagctcgggggaccttatctcgtcaaaatctttatcgataattatgtggccgtcgggaactatccggtccaggaagttgcgttattgtttggtgtctacttgctgttgcatacgaccggtatcgtcgtcgattatttgcaggcatttgagttccaaaaaattgccctgaaagtcattcaacggctccggattgatgtgttccgtcacgtcatgcatcttcggctcggttacttcgaccggacaccggccggagtgctcgtttcacggattacgaatgatacggaagcaatcaaagagctgtacatcggcgttttgtcgacattcgtccaaagcggggtccaattgattggaacgtatatcttcctgtatctgcttgaaccgcgcctggcgacgattgcgttagtcttattgccgctgttttatttcatcatctggatttaccgtcgttactcgacgaaatactatgcagaagtccgggatttattatcgaagattaacggacaattaaatgagtcgatcaacggaatggccatcatccaacaatttcggcaggaaaaacggctgatggcggagttcgaagaaacgaacatcgcccatcaaaacggccgttacaagaacctgaaacttgacagttggctgttgcgtccgatcattgaactgatgcttgcactgacgattgcgtccctgattacgtacttcggtgtcctgtccttttcgcaaacggtgcaagtcggggtcgtctatgcttttatcagttacatggaacggatttttcaaccggtccagcaaatcatgcaacgcttgtctgaattccaacaggctatcgtttcggcggaccgggtctttaaagtgctcgatacggatgagccggaacccgcgaagacgattgcaggtgatgctgacatcacagaaggacatatcatctttgataacgtccgcttcagttacgacggggaaaaggaagtcttaaaagggatttcgtttgaagcgaaaaaagggcagacggttgccctggtcggtcagaccggcagcggaaaaagttcaatcatcaatattttgatgcgcttttattcctatcagtcgggtcggatcctgattgatggacagccgctcgaacaattgccggaagacgaattgcggcgtcatgtcggactggtcttacaggattcattcctgtttacaggcagtgtcgccgataacatccggttgtttgatccgtccattccattcaaaaaagtggaggaagcggctcgctttgttcaagcagacgggttcatcaatcagctcgacgaacaatatgacagtccggttgcggagcggggagctaccttctctgccggagaacgtcaactcgtttcgtttgcccggacgatggcacgtgacccgaaagtcttgattctcgacgaagcgacaagttcaatcgatacggaaacggaagaaaaagtgcaggtcgccttaaaacggatgcggcagggacgaacaacgattgcgattgcccaccggttgtcgacaatccaggatgcggatctgattttagtcctgcatcaaggggaagtcgtcgaacaagggaaccatcagacactgattgaaaagaacggattatataaaaagatgtatgaactgcaatccggtcacgtttcgtcggtatcataa

SEQ ID NO: 7540 - protein, 623 aa, Exiguobacterium sibiricum 255-15
MNGEHTTNCLRGTVGIKKHTTASNWNHSSNREVERLNHDINEKAVLRRLLGFVKPFKKQVLVAFLLLLVTTGAKLGGPYLVKIFIDNYVAVGNYPVQEVALLFGVYLLLHTTGIVVDYLQAFEFQKIALKVIQRLRIDVFRHVMHLRLGYFDRTPAGVLVSRITNDTEAIKELYIGVLSTFVQSGVQLIGTYIFLYLLEPRLATIALVLLPLFYFIIWIYRRYSTKYYAEVRDLLSKINGQLNESINGMAIIQQFRQEKRLMAEFEETNIAHQNGRYKNLKLDSWLLRPIIELMLALTIASLITYFGVLSFSQTVQVGVVYAFISYMERIFQPVQQIMQRLSEFQQAIVSADRVFKVLDTDEPEPAKTIAGDADITEGHIIFDNVRFSYDGEKEVLKGISFEAKKGQTVALVGQTGSGKSSIINILMRFYSYQSGRILIDGQPLEQLPEDELRRHVGLVLQDSFLFTGSVADNIRLFDPSIPFKKVEEAARFVQADGFINQLDEQYDSPVAERGATFSAGERQLVSFARTMARDPKVLILDEATSSIDTETEEKVQVALKRMRQGRTTIAIAHRLSTIQDADLILVLHQGEVVEQGNHQTLIEKNGLYKKMYELQSGHVSSVS

SEQ ID NO: 7541 - DNA, 1749 bp, Streptococcus suis 89/1591
  CDS (1)..(1749): transl_table=11
atgctctctaaaaccaagcaagccagtgttttttggcgactcttgtcctatctcaaagcctatcgactgctgacagtccttgccttgagctttttattgctgactaccgtagtccgcagtctaattccccttctagcctcttactttatagaccactatatttcctcgatttctgagacagctgcggctattctagcggcctactttgccctctatctgctccaaatggtgcttcaatattttggaaatctctggtttgcaaaagtttcttacagcattgtcagagatattcgccgggatgcttttgggagaatagaaaagctgggaatggcttactttgaccagactcctagtggctccattgtctcgcgaatcaccaatgatacggagagcatttcagagatgttttcagggattttatccagttttatctcagctctctttattatcatcacgactctttcgaccatgtttgctctggattggaaattgacctgtctgatcgtcctctttcttcccttgattttcttattggttgatcaatatcggaagcggtcagctcccattgtggccaaaactagaagtctgttgagtgccatcaacagcaaactggctgaaagtattgaaggaattcggattatccaggcgttttctcaggaagaccgattgaaagaagagttcgaagctatcaaccaggaacatctggactatgccagtcgttccatggccttggacagtctctttctccgccctgccctgtcacttgttaagattttggcctatgccctactcatgacctattttggtttggactggtcacaggctggaatttctgctggtcttatctatgctttcatccagtatgtcaatcgtcttttcgatcccttgctggatgtcacgcagcatttttccaccctccaaacctctatggtatctgccggacgggtctttacgctcatggaccagaccatcgaggagccactacagctggaccgaggggccaagattgacaaggggcatattgtctttgaggatgtttacttttcctatgacggcaagcggcaaattctggacaaggtttcctttgaagtgagacaggggcagaccatcgcctttgtgggtgctacaggatcaggcaaatcttctatcatcaatgtctttatgcgtttctatgaattccaatctggacggattttgattgacggtcaggatattcgtagcttttcgcaggaagaattgcggtccgcgattggcctagtcctgcaagatcccttcctttttcacggaaccattgcgaccaatatccagatgtatcaggatatttcccgagaggagattgaggaagcggctcgatttgtggatgctgctccctttattgagaaacttcctgagaaatacgaccacctggtcactgagcggggcacctctttttcgacaggtcaacggcaacttctggcctttgcacgcaccatggccagtcagcctaagattcttattttagacgaggctaccgccaatatcgattcggagacagagcaaacggtccagacttctcttgagaaaatgcgaaaagggcggacaactattgccatcgcccaccgcctatcgaccattcaagatgctgactgtatctatgtcttggacaaggggaaaatcatcgagtctggaaaccacgaacagctcctatccctcaagggtcactaccaccgcatgtaccagttacaagcaggccagttaacagcaacctag

SEQ ID NO: 7542 - protein, 582 aa, Streptococcus suis 89/1591
MLSKTKQASVFWRLLSYLKAYRLLTVLALSFLLLTTVVRSLIPLLASYFIDHYISSISETAAAILAAYFALYLLQMVLQYFGNLWFAKVSYSIVRDIRRDAFGRIEKLGMAYFDQTPSGSIVSRITNDTESISEMFSGILSSFISALFIIITTLSTMFALDWKLTCLIVLFLPLIFLLVDQYRKRSAPIVAKTRSLLSAINSKLAESIEGIRIIQAFSQEDRLKEEFEAINQEHLDYASRSMALDSLFLRPALSLVKILAYALLMTYFGLDWSQAGISAGLIYAFIQYVNRLFDPLLDVTQHFSTLQTSMVSAGRVFTLMDQTIEEPLQLDRGAKIDKGHIVFEDVYFSYDGKRQILDKVSFEVRQGQTIAFVGATGSGKSSIINVFMRFYEFQSGRILIDGQDIRSFSQEELRSAIGLVLQDPFLFHGTIATNIQMYQDISREEIEEAARFVDAAPFIEKLPEKYDHLVTERGTSFSTGQRQLLAFARTMASQPKILILDEATANIDSETEQTVQTSLEKMRKGRTTIAIAHRLSTIQDADCIYVLDKGKIIESGNHEQLLSLKGHYHRMYQLQAGQLTAT

SEQ ID NO: 7543 - DNA, 1794 bp, Oceanospirillum sp. MED92
  CDS (1)..(1794): transl_table=11
atgactgaaccgacattacctgaaacgggcatgaagatatatcttcgtctcttaacctatgtaagaccctacctaatcgctttttttcttgggattgcagggtttatcctttatgcaagtacccaaacaggttttgccatgttgatggaatacctcgtcgatgccataggcgaggagaagaaagatgcttatatctatggtccacttgccttgatgggaatcgctttagcgcgaggggtgggaacctttacaggtaattattttacttcttatgtggcacgtaatgttgtgcatcaattgcgtttggttatgtttgataagttactcgtccttccaatgcagtattttcatgataattcttctggccacattatttcgaagatttcttataacgttgaacaggttaccgaagcggcaactgattcattaaaaattagtattcgtgaaggagcgacggtcattggcctcttgggctatttgattttcctcaattggaaactgactttgatatttgcagcggtctcaccggtgatcgctgtcgttgttatcgttgcgtcaaagcgttttcggcgcttaggtcaccgaatacaagattcaatgggtgatgtgacccacgtagcatcagaaaacgtagatgctgtccaagtggtacgtgtttttggcggcacagatagcgaaaaatcccggttttctgcagcgagtaaacaaaatttgcgacagagtatgaaaatggcggtaaccgaagccttgagtactcctgttgttcagttaatagtttccggagcattggcattactaattttctttgccttacatcctgttatgaatacaggaatgagtgccggggagttcatcgcttttattactgcagcggggctgattgcaaaaccattacgctcattaactgaggtgaatggggcaatccagagaggcatagcggcggcacaaagtatttttgaattggtcgatcagacgtctgaacctgaagccggagattttaaaaatcaggagtgtaagggccgaatagaaatgaaagacctgcatttctcttatattcaggataagccggttttgaaaggcctggatcttgttgtagagcccggccagacagtggcgctggtcggacggtcaggaagtggtaagtcgaccatggcaaaccttttgcccaggttctatgaaccgagttccggagccattttgcttgatgggaagccgttatcagcgtacgaattaaagaatctgagggacaaaattgcgcttgttacgcagaatgtggtgctttttgccggatcgattcgtgacaatatcgcgtacggagctaccagtggagccagtgatgaagaggtcatcgcggcggctgaagcagcccatgtgatggagtttgtatccaggcttccgcaaggtttagatactgaaattggcgagaaaggcaccaagctttcaggtggtcagaggcagcgtattgctattgccagggcaatcctgaaaaatgcgccagtcctgattttagatgaagcaacatctgcattggacaccgaatcagaaaggcatattcaggcggcgcttgaaaatgtcatgcagggccgaacgactctggttattgcgcataggctgtccactattgagaatgccgatcaaatagttgtgatggatcagggtaagattgtcgaacagggtagccatacacagttgttggcactcaatggagcttattcggccctgcataatatgcaactaagtgaagagaaagagcagccaaacagcgctgtagagagacaggagatttcagaatga

SEQ ID NO: 7544 - protein, 597 aa, Oceanospirillum sp. MED92
MTEPTLPETGMKIYLRLLTYVRPYLIAFFLGIAGFILYASTQTGFAMLMEYLVDAIGEEKKDAYIYGPLALMGIALARGVGTFTGNYFTSYVARNVVHQLRLVMFDKLLVLPMQYFHDNSSGHIISKISYNVEQVTEAATDSLKISIREGATVIGLLGYLIFLNWKLTLIFAAVSPVIAVVVIVASKRFRRLGHRIQDSMGDVTHVASENVDAVQVVRVFGGTDSEKSRFSAASKQNLRQSMKMAVTEALSTPVVQLIVSGALALLIFFALHPVMNTGMSAGEFIAFITAAGLIAKPLRSLTEVNGAIQRGIAAAQSIFELVDQTSEPEAGDFKNQECKGRIEMKDLHFSYIQDKPVLKGLDLVVEPGQTVALVGRSGSGKSTMANLLPRFYEPSSGAILLDGKPLSAYELKNLRDKIALVTQNVVLFAGSIRDNIAYGATSGASDEEVIAAAEAAHVMEFVSRLPQGLDTEIGEKGTKLSGGQRQRIAIARAILKNAPVLILDEATSALDTESERHIQAALENVMQGRTTLVIAHRLSTIENADQIVVMDQGKIVEQGSHTQLLALNGAYSALHNMQLSEEKEQPNSAVERQEISE

SEQ ID NO: 7545 - DNA, 1821 bp, Desulfitobacterium hafniense DCB-2
  CDS (1)..(1821): transl_table=11
atgagcacccttatctccgaagagttggaacataaagccggtctcagcggacagggcgggaccatcctcaggctccttgcctatttaaaaccccatcttaaacccctggcttttgcctttgccttgctcgttgcgggtaccgcggccgatgtagccggacctgtactgatcaagatctttttggatgattacctgacccctggacgtctggaacctctggctttaacaatcctgggcggcgggtatctgctgctggtcatcttagcttctttccttcaatatcaccaattggttcgtttcaataaaatcgccttgctggttattcaacaaatcagggtggatattttcactaaggttcagtatttggccatgagtgtctttgaccggactccggcgggagctttagtctccagggtcaccaatgatacggaggcgattaaggaactttatatcggcgtgctctcaacctatgttcagaacattgtctttctgctgggcatatttattgccatgttcagcctggatgtgcggttagcggccttctgcctggtgctgctccccgtcatcgttgttttgatgcaaatctaccgcaggatcagctccaagatatacaggatctcccgggcggagctgggcaggttgaatgctatactcaatgagtccatccaaggcatgaatatcatccaaatcatgagacaggaagaaacctttcaaaagaaatttgccggtattaacgagaagtattacggtgcggccattgccaatattaaactggaaagcaccctgatgcgcccggccgtggatctgctctataccctggcgctgattttggttctgggtttctttggtctggaatccatcattggtccggtggaagtgggagtgctctatgcctttatcaattatctggatcgttttatcgacccggtgaatatgatcttaatgcgcctttctcagcttcagcaggcgattatcgccgcggaaagggtctttgaagtgctggatgacgggcgaaccaccacagcccttggcctgaatgctgttcaggaagccggtgatcctcctgctcctggtatcgaaaaaggtgagattgaatttcgcaatgtcagtttttcctatgatggtgtcactgaagtcttaaaaaacatctcctttacggttcaccctggggagacggtagctttagtcggccataccggcagcgggaaaagcacgatttccaatctcttaatgaaattttacccggttaatcaaggggaaatcttgattgatggtatatccttgcatgacttttcccaggaggagctgcgtacccagattggtcttgtcgctcaggatcctttcctctttgtcggagatattgccaacaatattgccctgaaccgacctgcggtcggggagagagaggtcaaggcggcggcagaatttgtggaggctgatcaattcattaccaagctggggcagggatatcaggaacctgtcagtgaaaggggctccacactctccagtggtcaacggcagcttatctgctttgcccgcaccattgccggagaacctaaaattcttattctcgatgaagccaccgccagtgtggatacagagacagaggaggctattcaaaccgccttaaacaaaatgcgccaagggcgcagtaccatcgctattgctcatcggctttccaccatacaggatgccgatcttatccttgttttgcatcagggacaaatagtcgagcgaggcaatcataacgaactcctcgctcaaaaaggcctgtattacaaaatgtttctgcttcaacaaggggcaggcaaaggttattga

SEQ ID NO: 7546 - protein, 606 aa, Desulfitobacterium hafniense DCB-2
MSTLISEELEHKAGLSGQGGTILRLLAYLKPHLKPLAFAFALLVAGTAADVAGPVLIKIFLDDYLTPGRLEPLALTILGGGYLLLVILASFLQYHQLVRFNKIALLVIQQIRVDIFTKVQYLAMSVFDRTPAGALVSRVTNDTEAIKELYIGVLSTYVQNIVFLLGIFIAMFSLDVRLAAFCLVLLPVIVVLMQIYRRISSKIYRISRAELGRLNAILNESIQGMNIIQIMRQEETFQKKFAGINEKYYGAAIANIKLESTLMRPAVDLLYTLALILVLGFFGLESIIGPVEVGVLYAFINYLDRFIDPVNMILMRLSQLQQAIIAAERVFEVLDDGRTTTALGLNAVQEAGDPPAPGIEKGEIEFRNVSFSYDGVTEVLKNISFTVHPGETVALVGHTGSGKSTISNLLMKFYPVNQGEILIDGISLHDFSQEELRTQIGLVAQDPFLFVGDIANNIALNRPAVGEREVKAAAEFVEADQFITKLGQGYQEPVSERGSTLSSGQRQLICFARTIAGEPKILILDEATASVDTETEEAIQTALNKMRQGRSTIAIAHRLSTIQDADLILVLHQGQIVERGNHNELLAQKGLYYKMFLLQQGAGKGY

SEQ ID NO: 7547 - DNA, 1818 bp, Synechococcus sp. RS9916
  CDS (1)..(1818): transl_table=11
atggcgggctctgatctcaggcgcgttaagaggctgggccgttatctcggtcgcgatcgtcgccggctctcgctcaccttggtgctgctgatccccgtggctctggccggagccattcagccgttgctggtgggtcaggcgatcgccgtgctccgccgggtcggtggtgagaccaaggaatcggtgcttccgctgcttcaggggcttgagacgcctgtggccttgcgcctgatcgtggctgtgctgttggtctcagtgcttctgcgtctggggcttcagggggtgcaaaccttcaatattcaggcggtgggccaacggctcacggcccgcattcgagaagacctcttcgcccacgcgatcaatctttcggtccgctttcacgaccgcatgccggtgggcaagttgctcacccggctgacgagtgatgtggatgcccttgccgaggtgtttggtagtggggctgttggtgtgttgggtgatctggtgagtcttgtggtgattgcggtcaccatgctgttggtggaatggcgactgggactgctgttgctggctgctcagatcccagtcacctttgtgatcctctggctccaacgccgctatcgcaaagccaactaccgggtgagggaggaactctctcagctcaatgcggatttccaggagaacctgcagggtcttgaggtggtgcagatgttccggcgtgaggccgtgaatggccaacgcttcaacaccaccggtttggcctaccgcagggctgtgaatggcacgatttttttcgacagcagcatttcggccttcattgaatgggtcgctcttggggctgttgccctggtgttggccttgggtggatggatggtgacagcaggggcgatgggattgggcaccctcaccacgttcatcctttattcccagcgtctgttcgatccattgcgccagctggcagagcgcttcacccagatccaaggaggacttaccgccgttgagcgcattggcgagctgctcgaggagcctctcgagatcgtcgacaacgccgaggcggccaaagagggcaccatccgccagctcgcttccgcccgagctccccgcggtgaagtggtgttcgagaacgtgagctttgcctaccgccccgacgaaccgatcctgcgcaatctcaacttccgaattgcagccggagagcacgtggctctggtgggacccaccgggtcgggcaagagcacggtgattcgtctgctctgccgcctgtatgaaccccagaagggtcggatcctgctggacggtcgtgacatccgcagcctgccgatgcaggagttgcgtcgccagctgggtgtcgtgctccaagacacgttcctgtttagcggcaccgtcggtgacaacctgcgtctggatgtcccgatcgacgacgcccgccttcggagcatctgccgcgacctcggtctcgacccgctgttgcaacgactgcccgatgggctggacaccaccctgagggagcggggcggcaacctgtcttcgggggaacggcagttgttggccgtggccagggttgcgatccgtaatcccacggtgttggtgatggatgaagcaacggccttcatggatccctccaccgaagccaccctgcaacgcgacctggatcgtctgctcgaaaagcgcacagcagtggtgatcgcccaccgtttggccacggtggaggcggcggatcgaattttcgtgttgcggcgggggcagttgattgagcagggcacccatcaggagctccgcgccctgggagggctctatgccgaattggcggaattgcaagaacggggtctcgccaggctctag

SEQ ID NO: 7548 - protein, 605 aa, Synechococcus sp. RS9916
MAGSDLRRVKRLGRYLGRDRRRLSLTLVLLIPVALAGAIQPLLVGQAIAVLRRVGGETKESVLPLLQGLETPVALRLIVAVLLVSVLLRLGLQGVQTFNIQAVGQRLTARIREDLFAHAINLSVRFHDRMPVGKLLTRLTSDVDALAEVFGSGAVGVLGDLVSLVVIAVTMLLVEWRLGLLLLAAQIPVTFVILWLQRRYRKANYRVREELSQLNADFQENLQGLEVVQMFRREAVNGQRFNTTGLAYRRAVNGTIFFDSSISAFIEWVALGAVALVLALGGWMVTAGAMGLGTLTTFILYSQRLFDPLRQLAERFTQIQGGLTAVERIGELLEEPLEIVDNAEAAKEGTIRQLASARAPRGEVVFENVSFAYRPDEPILRNLNFRIAAGEHVALVGPTGSGKSTVIRLLCRLYEPQKGRILLDGRDIRSLPMQELRRQLGVVLQDTFLFSGTVGDNLRLDVPIDDARLRSICRDLGLDPLLQRLPDGLDTTLRERGGNLSSGERQLLAVARVAIRNPTVLVMDEATAFMDPSTEATLQRDLDRLLEKRTAVVIAHRLATVEAADRIFVLRRGQLIEQGTHQELRALGGLYAELAELQERGLARL

SEQ ID NO: 7549 - DNA, 1746 bp, Vibrio sp. Ex25
  CDS (1)..(1746): transl_table=11
atgtcttacccattatctcaaccaaagccaatgattaaaggacttgctttgctgtttatcgcagcgttagccagcgctggcggcccttggttgattcaatatttcattgatgagcacatcgctaaaggtgactattcacagaatgttctgatttcgctagcagtaggttatatcgctcttcagattgtatcggcaacatttcagtattttcagtcattgcaatttagcattgtcgcggctaacacgatcaaaacgattcgtaagcaagtattttctggtgtgattaagcagccgttatctgcgtttgattacactcctgctggaaaattggtatcgcgaatcaccaacgatacggaatctctacagcaattttatgagctcttgatcgcgaccgtggtgaaaaacgtggtcatgattgtggtgatgcttggcgttatgtttttcatgagctggaaactcacacttgttgtgcttgtattgctaccgatcgtcatcggctttatgtacttgtttaagcagctaagtacagaaagctaccgaaagatgcgtgacctattgactgatataaatgcgaatctgagtgaatccattcaagggatgagtgtcattcaattaatgcaacaagaagagcgttttaataaacagttcaacgagctaaccgcagagcacttggtggcatctaaacgagtgattcggctaaacggctatctgctaagaccattaatggatttgctcgcaggtcttgcgttgctttgcttggttgcgatctttggttttaatggtattgagttgattggtgtgggggtactgtatgcatttatcagttatcttgcgcgagttactgaaccactaattgagatgactcagcaacttgctctacttcagcaagcgttagtatcaagcgaacgtgtttttgaattgattgatgcgaaagaacaaacttacgggaacgatcatcaaccattaaggtcaggtgctatcgaacttaaagacctcacatttagctacgatggtaaacaggacgtcctaaaagacatttcgttgagggccaaccaccaagactttatcgcgcttgtcgggcatacaggaagcggtaaaagcacattagcgtcactgttaatgggcttttatccaacgcaatatggtgaactgctcatcgatagtcgtccacttaaaacactagggaaagacgtccttcgtaaagatgtggcaatggttcagcaagatccgcacattctccctgcttcagtcagagaaaacatctctcttagtcgagcggttgacgatactcaaatatgggatgcgttagacaaggtaggtttggcagagcaaattcaccgttatcctaatgggctagacacgcagttaggtcaaggtgaaaccaatctatctgctggacaaaaacagctcttagcgttagcacgtgtgcttgtggtaaaacctaaaatattgatattagatgaagcaacggccaatattgactcaggaacagaagctttaatacaaaagagcttggcagtactcagacaagacatgacactagtcgttatcgctcatcgactttcaactattttggatgcggaccaaatcattgttcttcatcatggggagttagtagagaaaggcacacacaaaacactgttgaaacaaaatggtcgttatgcccaaatgtatcagttacagcaagcaaaccgacatttacagcagattgaagaagaaaccaagcaactcgaagaagcggtgtga

SEQ ID NO: 7550 - protein, 581 aa, Vibrio sp. Ex25
MSYPLSQPKPMIKGLALLFIAALASAGGPWLIQYFIDEHIAKGDYSQNVLISLAVGYIALQIVSATFQYFQSLQFSIVAANTIKTIRKQVFSGVIKQPLSAFDYTPAGKLVSRITNDTESLQQFYELLIATVVKNVVMIVVMLGVMFFMSWKLTLVVLVLLPIVIGFMYLFKQLSTESYRKMRDLLTDINANLSESIQGMSVIQLMQQEERFNKQFNELTAEHLVASKRVIRLNGYLLRPLMDLLAGLALLCLVAIFGFNGIELIGVGVLYAFISYLARVTEPLIEMTQQLALLQQALVSSERVFELIDAKEQTYGNDHQPLRSGAIELKDLTFSYDGKQDVLKDISLRANHQDFIALVGHTGSGKSTLASLLMGFYPTQYGELLIDSRPLKTLGKDVLRKDVAMVQQDPHILPASVRENISLSRAVDDTQIWDALDKVGLAEQIHRYPNGLDTQLGQGETNLSAGQKQLLALARVLVVKPKILILDEATANIDSGTEALIQKSLAVLRQDMTLVVIAHRLSTILDADQIIVLHHGELVEKGTHKTLLKQNGRYAQMYQLQQANRHLQQIEEETKQLEEAV

SEQ ID NO: 7551 - DNA, 1824 bp, marine gamma proteobacterium HTCC2080
  CDS (1)..(1824): transl_table=11
atgactgatccaacaagacagaccagcggtgattgggggctatatcgtcgccttttgtcctacgttgtgccttactcggctgcgtttcttttcagcgttgccgggtttttggtgtactccctgggcagtgttctgttggcagatcttactcagtttttattagattcattgggccagagcagtcaagttgaattgggcttagtttccgcggcggcgcattggttttggcctccgggcgacaaagcccctctggattatgctcgagtggctgtgcctgttgctgcggtggtgctttcgctgggtcgggcgctgggatttttcgtaggtaactactacatgaatgtcgtggcgcgaagcgtggttcataccctccgagttgaattgtttgacgtgatgatggcagcgccgcgacgatattacgatgccaataccggcggtaatttgctgagtaagatcacatttaacgttgagcaggtgtcgggtgccgcaagtgacgccctaaaagcgattttgcgtgagggcctgacggttatggctcttgtgacttatatgttgtatctcaattggcgtttgacgctgatattttttgcggtcgcacctgcgattggcttggtcgttgtgattgtgggtcgtcattttcggcgttacagccgtcgtattcaagactccatgggctctgtcactcaagtcagtagcgaatccttgggggcctttgaagcccttcgcgtctttgctgcgacgcgacaacaagtcgccaaattcaccaatgcgagcctgttcaatcgcaaccaaagcttaaaattggcgtttgttcaggctgtttctacacctgtgattcaaacgttattagctctggctttaggcgcgctattttggtttgcgctggacccggcaatactcgctggatttaccgcgggctcattggtggcttttatcaccgcggcggctcaaatgggtaaaccaatacgaactctcagtggcgtgcagagcattattcagcgcgggcttgccgcagcggaggatgtttttgcacaaattgatattccacctgaacccaaccgtggcaccacacccgttaaacgcgcaaagggtgagatcgcgatcgagcatttaagctttcgatacccaggggctaccgaatacgcgctggaaaatatttcacttcagcttcaacccggtgaaacggttgcgcttgtcggacgttcaggcagtggaaagtcgacgttggtgcaactcttgctgcgcttctacgctcctgagcacggtgaaatccgtctcgacgatttagtgattgaagagtacgaattggctgattaccggaagcagttcggggttgtatctcaagaaattagcctgtttagcgatactattgctaacaacattgcttttggtgaaatgagagatgcgtcatacgatgcggtgctgatggcggctcagaaggctcacgcgattgagtttattgaggcacagcctcagggcctagataccctgttgggtgatgacggtgccggtttatctggaggtcaaaagcagcgcttagcgatcgcgagagcactgttaaaagatgcgccaattttgattcttgatgaggcaacctctgcgctagacacagaatctgaaacctatattcaagaggccttagcagctttttgtgaagatcgaacaacgctggtgattgctcaccgtttgtcgacgattgaaaacgcggatagagtcgtggtgatggatcaaggcagaattgtggccttcggtccacaccagcaactgctaacagagagcccactatatgcacgcctgcataagcaggaaatcgtccagtcatga

SEQ ID NO: 7552 - protein, 607 aa, marine gamma proteobacterium HTCC2080
MTDPTRQTSGDWGLYRRLLSYVVPYSAAFLFSVAGFLVYSLGSVLLADLTQFLLDSLGQSSQVELGLVSAAAHWFWPPGDKAPLDYARVAVPVAAVVLSLGRALGFFVGNYYMNVVARSVVHTLRVELFDVMMAAPRRYYDANTGGNLLSKITFNVEQVSGAASDALKAILREGLTVMALVTYMLYLNWRLTLIFFAVAPAIGLVVVIVGRHFRRYSRRIQDSMGSVTQVSSESLGAFEALRVFAATRQQVAKFTNASLFNRNQSLKLAFVQAVSTPVIQTLLALALGALFWFALDPAILAGFTAGSLVAFITAAAQMGKPIRTLSGVQSIIQRGLAAAEDVFAQIDIPPEPNRGTTPVKRAKGEIAIEHLSFRYPGATEYALENISLQLQPGETVALVGRSGSGKSTLVQLLLRFYAPEHGEIRLDDLVIEEYELADYRKQFGVVSQEISLFSDTIANNIAFGEMRDASYDAVLMAAQKAHAIEFIEAQPQGLDTLLGDDGAGLSGGQKQRLAIARALLKDAPILILDEATSALDTESETYIQEALAAFCEDRTTLVIAHRLSTIENADRVVVMDQGRIVAFGPHQQLLTESPLYARLHKQEIVQS

SEQ ID NO: 7553 - DNA, 1803 bp, Pseudomonas putida GB-1
  CDS (1)..(1803): transl_table=11
gtgccgggcaagccatacagtgcggccgatcgactgagctgggcggaaatccgccgcctggccctgcatcacaagaaaaacctctggtctgccaacctcatcgctgtgctggcggcatgctgcagtgtgcccattccgctgctgctgccgttgctggtggatgaggtgctgctcggccatggtgatgccgcgttgaagtggatgaaccacctgctgccgtccagctggcaggtggccgccggctacattggcctgatgctggcactcaccctgtgcctgcgcctggctgcgctggcgttcaacgtgattcaggccaagctgttcgccggcttggccaaggatatcgtctaccgcctgcgcattcgcctgatcgagcggctcaagcgtatttcgctgaaggaatacgaaagcctgggcagcggcacggtgaccacccacctggtcaccgacctggacaccctcgacaagttcgtcggcgaaaccctcagccgcttcctggtggccatgctgaccctgaccggcacggcagccatcctgatctggatgcactggcaactggccttgctgatcttgctgttcaacccgctggtgatctacttcaccgtgcagttgggcaagcgggtaaaacacctgaaaaagctcgaaaacgacagcaccgcacgctttacccaggcactggcggaaaccctcgatgccatccaggaaatccgcgcgggcaaccgccagggctatttccttggccggttgggcttgcgtgcccgtgaggtgcgcgactacgccgtggactctcaatggaaaagcgacgccagtggccgtgccagtggcctgctgttccagttcggcatcgacatcttccgcgccgcggcgatgcttaccgtgttgttttcagacttgtcgatcggccagatgctggcggtgttcagctacctgtggttcatgatcggcccggtggagcaactgctcaacctgcaatatgcctattacgccgccggtggtgcgctgagccgcctcaacgagctactggcgcgtgacgacgagccgcagtaccccgccgccagcgacccgttcgccggtcgccagaccgtgggtatcgaagtgcgcgacctgcgctttgcctatgccgacgagccggtgctggagcatctcgacctgtcgattgccccaggcgagaaggtggcgattgtcggtgccagcggcggcggcaagagcaccctggtgcaactgctgttgggcctttacagcgcccaggccggaaccatccgcttcggcggggccagcttgcaggaaatcggccttgaaaccctgcgcgagaacgtcgcggtggtgttgcagcacccgtcactgttcaacgacagcgtgcgtgccaacctgaccatgggccgtgattgcagtgacgatgcctgctggcaggcgctgcacattgctcaactggatgccaccatcgctgccttgccccagggcctggacagtgtgctggggcgttctggggtgcgcttgtctggcggccagcggcagcgcctggcgattgcccgcatggtgctggccgagcccaaggtggttatcctcgacgaggccacatcggccctggatgccgccaccgagtacaacctgcatcaggccctggcgcgcttcctcagcggccgcaccacgctgatcatcgcccaccggctttcggcggtgaagcaggctgatcgagtactggtgttcgatagtgggcatgtggctgaagatggcgaccaccagcagctgattgccgaaggcgggttgtatgccaagctgtatgggcacctgcagcagagctga

SEQ ID NO: 7554 - protein, 600 aa, Pseudomonas putida GB-1
MPGKPYSAADRLSWAEIRRLALHHKKNLWSANLIAVLAACCSVPIPLLLPLLVDEVLLGHGDAALKWMNHLLPSSWQVAAGYIGLMLALTLCLRLAALAFNVIQAKLFAGLAKDIVYRLRIRLIERLKRISLKEYESLGSGTVTTHLVTDLDTLDKFVGETLSRFLVAMLTLTGTAAILIWMHWQLALLILLFNPLVIYFTVQLGKRVKHLKKLENDSTARFTQALAETLDAIQEIRAGNRQGYFLGRLGLRAREVRDYAVDSQWKSDASGRASGLLFQFGIDIFRAAAMLTVLFSDLSIGQMLAVFSYLWFMIGPVEQLLNLQYAYYAAGGALSRLNELLARDDEPQYPAASDPFAGRQTVGIEVRDLRFAYADEPVLEHLDLSIAPGEKVAIVGASGGGKSTLVQLLLGLYSAQAGTIRFGGASLQEIGLETLRENVAVVLQHPSLFNDSVRANLTMGRDCSDDACWQALHIAQLDATIAALPQGLDSVLGRSGVRLSGGQRQRLAIARMVLAEPKVVILDEATSALDAATEYNLHQALARFLSGRTTLIIAHRLSAVKQADRVLVFDSGHVAEDGDHQQLIAEGGLYAKLYGHLQQS

SEQ ID NO: 7555 - DNA, 1809 bp, Pseudomonas putida GB-1
  CDS (1)..(1809): transl_table=11
atggccgaaaccccgcgaccggcggagcacacctccagcctgaagatctacttccggctgctgagctatgtgaaaccctatgtcggcattttcctgctgagcattgtcggtttcgtgatctttgcctcgacccagccgatgctggccggcattctcaagtatttcgtcgatggcctgagcaaccccgaagcggtgttgttccccaacgtgccctacctgcgtgacctgcaattgctgcaggcggtgccgctgctgatcatcctgatcgccgcctggcagggcctgggctcgttcctcggcaactacttcctggccaaggtgtccctgtgcctggtgcacgacctgcgtgtggagttgttcaacaagctgctggtgctgcctaaccgctacttcgacaaccacaactccggtcacctgatttcgcgcatcaccttcaacgtgaccatggtcaccggcgcggccaccgatgccatcaaggtggtgatccgcgaaggcctgaccgtggtgttcctgtttgcctacctgctgtggatgaactggcacctgaccctggtgatggtcgccatcctgccggtgatcgcggtcatggtcagcatcgccagcaagaaattccgcaagcagagcaagaagatccaggtggcaatgggcgacgttacccacgtggcgtcggaaaccatccagggctaccgcgtggtccgcagcttcggcggcgaggcctacgaggagcagcgtttcggcaaagccagccagagcaacaccgacaagcaactgcgcatgaccaagaccggctcgctgtacacgccgatgctgcaactggtgatctacagcgccatggccgcgctgatgttcctggtgctgttcctgcggggcgagtccaccgccggtgacctggtagcctatatcactgctgctggcctgctgcccaagccgattcgccagctgtcggaagtcagctcgaccatccagaagggcctggcaggtgccgagagcatcttcgagcagttggacgaagagcctgagctggacaccggtactgtcgagaaggagcgtgtggaagggcgcctggaagtgcgcaacctgagcttcacctacccgggtaccgagcgtgaagtgctgagcgacatcagttttgtcgccgaacctgggcagatgatcgccctggtcggccgttccggcagtggcaagtcgaccttggcggcgcttatcccacgcttctatcaccacgaccaggggcagattctgctcgatggcgtggaaatcgaaaactatcgcctgcgcaacctgcgtcgccatgtttcgcaggtaacccagcacgtcaccctgttcaacgacaccgtggccaacaacatcgcctacggtgacttggccggtgccccacgcgcagacatcgaagccgccgcagccgatgcctacgccaaggagttcgtcgaccggctgccgaagggcttcgataccgaagtgggagagaacggtgtactgctgtccggtggccagcgccagcgcctggcaattgcacgggcgctgctgaaaaacgcgccgctgctgatcctcgacgaggctacttctgcgttggataccgagtccgagcggcatatccaggctgccctggatcacgtgatgcaaggccgtaccacgctggtgatcgctcaccgcctgtcgacgatcgagaaggccgaccagatcctggtcatggaccagggccgcctggtcgagcgtggcacgcatgccgagctgcttgcggccaatggccattatgcccgcttgcatgccatgggcctggatgagccggccaaggccgatatcacctga

SEQ ID NO: 7556 - protein, 602 aa, Pseudomonas putida GB-1
MAETPRPAEHTSSLKIYFRLLSYVKPYVGIFLLSIVGFVIFASTQPMLAGILKYFVDGLSNPEAVLFPNVPYLRDLQLLQAVPLLIILIAAWQGLGSFLGNYFLAKVSLCLVHDLRVELFNKLLVLPNRYFDNHNSGHLISRITFNVTMVTGAATDAIKVVIREGLTVVFLFAYLLWMNWHLTLVMVAILPVIAVMVSIASKKFRKQSKKIQVAMGDVTHVASETIQGYRVVRSFGGEAYEEQRFGKASQSNTDKQLRMTKTGSLYTPMLQLVIYSAMAALMFLVLFLRGESTAGDLVAYITAAGLLPKPIRQLSEVSSTIQKGLAGAESIFEQLDEEPELDTGTVEKERVEGRLEVRNLSFTYPGTEREVLSDISFVAEPGQMIALVGRSGSGKSTLAALIPRFYHHDQGQILLDGVEIENYRLRNLRRHVSQVTQHVTLFNDTVANNIAYGDLAGAPRADIEAAAADAYAKEFVDRLPKGFDTEVGENGVLLSGGQRQRLAIARALLKNAPLLILDEATSALDTESERHIQAALDHVMQGRTTLVIAHRLSTIEKADQILVMDQGRLVERGTHAELLAANGHYARLHAMGLDEPAKADIT

SEQ ID NO: 7557 - DNA, 1740 bp, Marinobacter sp. ELB17
  CDS (1)..(1740): transl_table=11
atgccagagggcagttggcacacctacaagcgccttttacgctatgtgaaacctttttggatagcgtttaccctggcgataatcggcaacgttatctacgccgcggcgtcgaccggcatggcggcggccatggaatacgtcatcaaggccattgaaaatccgaccgatcagaatcggctgattttaactctgctgattgtcggggtgtttgcgtttcgtggcctgggcaccttcatgagccaatatttcatcagttacgtgggtcgtaacgtcatcaatgccctgcgcaccgatgtctttgactgcatgctaaccttgccgtcgcgctactttgatgacaacgcggccggccgattggtgtcgaagctgacctttaacgtggaacaagtggctgaagccgctaccgacgctatcaccattactctccgtgagggcctgaccattgtcgggctgatgggctatatgctctacaccaactggaaactcacgctggtatttctggcggtagggccgctgatcggagcggtggtcagctacgccagcaagcgcttccgtaaaatcagcaaacgcattcagggctccatgggcgacattacccacgttgcgtcggaatcgatcagcggttatcgggtggtgcgcacctttggcggtgaagacttcgaacgcaagcgttttcagaaggtcagcgaaagcaatctgaagcaaagcttgaagatgtcatctacccaggccatcagcgtgcctgtgattcaggttctggtggcaattgcgattgcggcgctggtgtggaccatgttgtcgccgacgattcgcggcgaaatgagtaccggtcaattagtcgcctttattaccgcagcaacaaccatggccaagcctattcgccaagtgacttccgtgcattcaaaaatccagaagggccttgcggcagcctacgatgtgtttgaaaccctggacgaacgcccggagccggattccggcatctttgccccgcagcgggttaaaggcgacatcgaatttcgtgacgtgggctttagctatcgcgaccagctcgacaaggtgttaaacaatatttcactgacggttccagcggggcagagcgttgccctggtcggtcgcagtggcagtggcaaatccacgctggtgagcctgttgccgcgattttacgattacaccgacggcgaaatccgtattgatggccatttgttggaagactttacgctgcaggccctgcgcgctcagattgcactggttacgcagagcgtagtcctgttcaacgatacgattgcagcgaacattgcctacggcgcgctgcgcgattgcagccccgaggccatccgtgaagccgccggcaaagcgcacgctctggaatttatcgaccgcatgcccgagggcctgaataccatgattggcgacaacggcgttatgctttccgggggccagcgccagcgtctggccattgcccgggcgctgctaaaagacgcccctattctgattttggacgaagccacatcggcgctggataccgaatctgagcgctacatccagaatgctatggaaacggtgatgaaaggccgcaccaccttggtgattgctcaccgcctgtcgaccattgaaaacgccgatcgcatactggtgatggacaatggccgcatagtggaatccggccgccatcaggagttgctggaccagggcggcgcctatgcccaactgcatcagatgcagttcagcgagcacgcatga

SEQ ID NO: 7558 - protein, 579 aa, Marinobacter sp. ELB17
MPEGSWHTYKRLLRYVKPFWIAFTLAIIGNVIYAAASTGMAAAMEYVIKAIENPTDQNRLILTLLIVGVFAFRGLGTFMSQYFISYVGRNVINALRTDVFDCMLTLPSRYFDDNAAGRLVSKLTFNVEQVAEAATDAITITLREGLTIVGLMGYMLYTNWKLTLVFLAVGPLIGAVVSYASKRFRKISKRIQGSMGDITHVASESISGYRVVRTFGGEDFERKRFQKVSESNLKQSLKMSSTQAISVPVIQVLVAIAIAALVWTMLSPTIRGEMSTGQLVAFITAATTMAKPIRQVTSVHSKIQKGLAAAYDVFETLDERPEPDSGIFAPQRVKGDIEFRDVGFSYRDQLDKVLNNISLTVPAGQSVALVGRSGSGKSTLVSLLPRFYDYTDGEIRIDGHLLEDFTLQALRAQIALVTQSVVLFNDTIAANIAYGALRDCSPEAIREAAGKAHALEFIDRMPEGLNTMIGDNGVMLSGGQRQRLAIARALLKDAPILILDEATSALDTESERYIQNAMETVMKGRTTLVIAHRLSTIENADRILVMDNGRIVESGRHQELLDQGGAYAQLHQMQFSEHA

SEQ ID NO: 7559 - DNA, 1797 bp, Bacillus sp. SG-1
  CDS (1)..(1797): transl_table=11
atggaaaagacaactaccatgtcagcaaaagaacagcgtcacgttttaaaaaggttattgcgttataccataccgcataaaaaatctattttccttgcgttttttctattggcattaacgactatcggcgatgttcttggaccatatctgattaaaatctttattgatgactatcttaccccaaggaactttccgtatgaaccgctagtctggctgggcgcagcttttcttggcatccagatttccaatgtcgtcatttcctattttcaattgttgaagtttcaggaaattgcactgaaaatcatccagcagttgagggtggatgtcttctcaaaagttcaaaacctgggaatgagatactttgacaggacgcctgctggaggaattgtatcaagggtgacaaacgatactgaggccattaaggatatgtttgtcagtgtgcttgtgagcttcatccaagggaatttcctgatcatagggatattcaccgctatgtttattttgaatgtcaagctggcactattctgcctgttcatcctgcctgtattatttttcataatcaaaacgtacaggaagtacagttccattttttatcatgatttgagagagcgcttgagccaattgaatgccaagctgagtgaatctctgcaaggaatggcgattgttcaggtttttcgacaggaaaaaaggttaagaaaagagtttgatgacatcaatgaggatcactataaagcagggatgcggaacataaaaatggatgggctgctccttcgcccggccaccgatttagtttatacggcggctctgattctagtattatcatactttggcatatcctcttttaacagtccagtcgaaattggtgttctatatgctttcatcaactatcttgaccgtttctttgagcccgttaataacgtgatgacgagactgtcgatgtttcagcaggcaatcgttgcctcttctcgagtgtttaccttacttgatgaaaaagaggagtcccctgctcaagacacaaacagcaaagggcagataaaagacgcagagatcgaattccgggacatcactttttcctatgatggccaaaaggatgtactgaaaaacatctcgtttactgctaagcccggcgaaacagtcgctttggtcggacacacagggagcggcaaaagctccattataaatttgttaatgagattttatgagttcagtagaggggaaattctcattgacggcaagtcgataaaagattatccaatggaagagctgagggagaaggttggtctcgtcctgcaagatccattcttgttctatggaaccgtagaagacaacattaagctgcatgcaggcgacatgaccgatgaggaagtgagagcggccgcagaattcgtgcaagctcatacgtttatcgaaaagcttcctgatggttattcccacaaagtagtcgaacgcgggtcgactttctccagcggtcaaaggcagttgatcgcttttgccagaacgattgcgaccaatcctaagattctggtgctggatgaagcgactgccaatatcgatacagaaacggaagacgccattcagcaggctttggccaagatgagaaagggccgtacgaccatagccattgcccaccggttgtctaccatccaggatgcagattgtatcttggtgcttcaccagggtgaaattgtcgaaagaggaaatcaccaggagcttctttcccagaaagggctgtatcataaaatgtatcttctgcaaaatggccttgttgaaggaattgaagatgccgtaagttcataa

SEQ ID NO: 7560 - protein, 598 aa, Bacillus sp. SG-1
MEKTTTMSAKEQRHVLKRLLRYTIPHKKSIFLAFFLLALTTIGDVLGPYLIKIFIDDYLTPRNFPYEPLVWLGAAFLGIQISNVVISYFQLLKFQEIALKIIQQLRVDVFSKVQNLGMRYFDRTPAGGIVSRVTNDTEAIKDMFVSVLVSFIQGNFLIIGIFTAMFILNVKLALFCLFILPVLFFIIKTYRKYSSIFYHDLRERLSQLNAKLSESLQGMAIVQVFRQEKRLRKEFDDINEDHYKAGMRNIKMDGLLLRPATDLVYTAALILVLSYFGISSFNSPVEIGVLYAFINYLDRFFEPVNNVMTRLSMFQQAIVASSRVFTLLDEKEESPAQDTNSKGQIKDAEIEFRDITFSYDGQKDVLKNISFTAKPGETVALVGHTGSGKSSIINLLMRFYEFSRGEILIDGKSIKDYPMEELREKVGLVLQDPFLFYGTVEDNIKLHAGDMTDEEVRAAAEFVQAHTFIEKLPDGYSHKVVERGSTFSSGQRQLIAFARTIATNPKILVLDEATANIDTETEDAIQQALAKMRKGRTTIAIAHRLSTIQDADCILVLHQGEIVERGNHQELLSQKGLYHKMYLLQNGLVEGIEDAVSS

SEQ ID NO: 7561 - DNA, 1761 bp, unidentified eubacterium SCB49
  CDS (1)..(1761): transl_table=11
ttgaaagattctggaaaagcatttgattttaagttatttaagcgactcgtttcatttgcaaacgtgtatcgttttatattttattttgtaggttttgctgctatagccatggcggcactttctattttaagaccttatatattaaaggtagctattgacgaatctattattgggaaagatagtgagggcttgttattctttgttcttttaatggccggagttctattggtagaagtactgtttcaattgtcttttatctattatgcaaactggttaggacagcatgttgttaaagatattcgtgtcaagctttttaagttgatgactagttttaaaatgcaatattttgataacagtgccgtaggaagattaactacacgtgcagtgagtgacttggagactatttcagccatatttagtcaagggctatttgttatagtaagtgatcttcttaaaatgtttgctatcgctggttttatgttggtgttaagttggagactagcgctgatagtatttttaatattacctgtgatacttgttgctacaagactttttcagcgtgctatgaaaactgcttttgaagaagtacgattgcaagtatctaaccttaattcttttgtgcaagaacgaattacggggatgaagatcttacaaatttttaatagagaagatacagagtttagagcctttgaaaagataaattctaaacataaaaaggcgtgggtaaaaactgtttggtataattcaatattcttcccaattgctgaaatgtcaagttctgtagccattggtttggtggtttggtacggaggtcttaatgcagagggaggtatagtaaccttagggattattaccgcttttattgaatattctcaaatgctctttaggcctttaaggcaaatagcagataagtttaacacattacagatgggaatggtggctgcaaaacgcgtttttgaagttcttgatacacattcgcacattgaagataaaggtgttttggctctagaaaatgcacaagggaaaatagactttaaagcagttcattttggctatattccagatgaagaagttattaaagggatatcattttctgtaaatcctggtgaaaccgttgcaattgttggagctaccggagcagggaaatctacaattattaatttgctgaatcgtttttacgagattaatagcggtgtcatttctgtagatggcacacctataaaagaatatgaactagcctctttaagaagccagatagctatagtgttacaagatgtttttctctttgcagatacaattttgaataacattactttaaatgaccctaacatttctgaagaagaagttaggagagctgcaaaagtaattggtgtagatgcctttatcgagacgttgccgggtggatatcactataatgttaaagagagaggtgccatgttatcttctggacaacgacagctcattgcgtttttaagagcctatgtgagtaagccaagtatattaatattagatgaagcaacctcaagtgtagacagctatagtgaagagttgatacagacagctacagaaaaaatcacaaaaggacgaacttctattgtcatcgctcacagactcgctaccattaaaaaagcagacaaaattattgtgatggaagctggtaaaattgttgagatgggaacccacaaagcactccttaaaaaagaagacggacattatcgtaatctttacgaagtccagtttacggtagataaagctatatag

SEQ ID NO: 7562 - protein, 586 aa, unidentified eubacterium SCB49
MKDSGKAFDFKLFKRLVSFANVYRFIFYFVGFAAIAMAALSILRPYILKVAIDESIIGKDSEGLLFFVLLMAGVLLVEVLFQLSFIYYANWLGQHVVKDIRVKLFKLMTSFKMQYFDNSAVGRLTTRAVSDLETISAIFSQGLFVIVSDLLKMFAIAGFMLVLSWRLALIVFLILPVILVATRLFQRAMKTAFEEVRLQVSNLNSFVQERITGMKILQIFNREDTEFRAFEKINSKHKKAWVKTVWYNSIFFPIAEMSSSVAIGLVVWYGGLNAEGGIVTLGIITAFIEYSQMLFRPLRQIADKFNTLQMGMVAAKRVFEVLDTHSHIEDKGVLALENAQGKIDFKAVHFGYIPDEEVIKGISFSVNPGETVAIVGATGAGKSTIINLLNRFYEINSGVISVDGTPIKEYELASLRSQIAIVLQDVFLFADTILNNITLNDPNISEEEVRRAAKVIGVDAFIETLPGGYHYNVKERGAMLSSGQRQLIAFLRAYVSKPSILILDEATSSVDSYSEELIQTATEKITKGRTSIVIAHRLATIKKADKIIVMEAGKIVEMGTHKALLKKEDGHYRNLYEVQFTVDKAI

SEQ ID NO: 7563 - DNA, 4035 bp, Vitis vinifera
  CDS (1)..(4035)
  misc_feature (2646)..(2646): r is g or a
  misc_feature (2662)..(2662): s is g or c
  misc_feature (3254)..(3254): r is g or a
  misc_feature (3649)..(3649): r is g or a
  misc_feature (3930)..(3930): y is t or c
atgcccaaaccctcatggcaaaatgtgcaaaccatcaaggcaaaatgcccaaaccctcaaggcaaaatgcccaaactcaaggcaaaatgctcaaccctcaaggcaaaattcccaaccctcaaggcaaaatgccaaaccttcaaggcaaaatggccaaccctcaaggcaaaatgtctaatcaagggttcagtgactgaaaatgttgtacatagtagcctggatcatggccccactgtgaaggataatgatcagtttaatctacgtgcttccatggaaggactagaacttcgctccattcagatttccgatcagaacccacttccagagaaggatcagcaatccaactcaagtccaaaagacactgtttccttcttcggcctatttgcagctgctgatacattggactgtttttttatgttctttggtagcattggggcttgcatccatggtgctgcacttcctgtgttctttgttttgtttggccgaatgattgattctttgggacgcctatcttcagatccagataaactttcctctcaagtttccaggcatgctctatacttggtctatcttggacttggggttttagcatcagcatggatcggtgttgcattttggatgcaaacaggggaaaggcagacggcccgtttgcgactcaagtatcttcagtcagtcttaagacaggatattaatttctttgacactgaggccagggataaaaatatcactttccacatttcaaatgatgcaattctgttgcaggatgcaattggtgacaagataggccatggtttacgttacctttctcaattctttgttggatttgcaataggattcacatcagtatggcagcttacacttctcaccgtggctgttgttccattgatggctattgctggaggagcctatacagtaatcatgaccaccttgtcagaaaaaggtgaggctgcctatgctgaagctgggaaggttgcagaagaggctatttcacaggttcgtactgtatactcatttgtgggagaggatagagcagttgaaacatattcaaggtcacttcaaaaggcccttaaactggggaaaaagagtgggtttgcaaagggaattggtattggctttacatatgggcttttgttttgtgcttgggcattacttctctggtatgccagcaaactagtcaggcatggggacacaaatggggggaaagcattcactacaattctcaacgtcatattcagtggatttgctcttggtcaagctgcccctaatcttgctgccattgctaaaggccgggctgctgcagccaatatagtaaacatgattgaaacagattctactgcttctaaaaggttagataatggaataatgttgccaaaagtagctggacagcttgaattttgtgaggtctgttttgcttatccctcacgacctagtatggtcttcgaaaatttgagcttttctatttatgctgggaagacctttgctgttgttgggccaagtggttcaggaaagagcaccattatttccatggttcaacgtttctatgagcccacttcaggtaaaatactgttggatggacatgatattaagaatctccgattaaaatggctgagagcacagatggggttggttagtcaagaacctgcattgtttgccacgactatagctgggaacattctgtatggaaaagaagatgctgatatggatcaggtcatagaagctgccaaagctgcaaatgcacattcttttgttcaaggcttacctgatggttatcaaactcaggtaggagagggaggaactcagctttctggagggcagaaacagagaattgcaattgcaagagcagtgctgaggaacccaaagatactgctgttagatgaggccactagtgctcttgatgcagaatcggaactcattgttcagaaggcactagataaaatcatgttgaatcgaacaacaatcgttgttgcacacagattatccacaattcgagacgttaataaaatcattgttttgaagaatggtcaggttgttgaaagtgggactcatttggaattgatttcccagggaggggagtatgcaactttagtgagcttacaagtatcagaacatggtaaaagtccaagtacaaaggtttgtcaagacacttctgggatttctaaaagttttccagaatcccccaacagtcagaaccaccaacaggaggttaagtcaattaccaaaggagagctacagccatatgatcagaacatggcctcatccagctctcctccaattccatcactttggcaactagttaaactaaacgcaccagagtggccctttgctgtgcttggatcagtgggcgcaattctggctgggatggaagctcctctgtttgccctggggatcacacatgtcttgactgcattctattctggcaaagatttccagattaagcgagaggttgaccacatttctctcatatttgttggagcggccattcttactattttcatatatctattgcaacactatttctatacattgatgggcgagcgtctcaccactcgcattcggttattaatgttctcagcaatcctttccaatgagataggctggtttgatttggatgagaacagtactggctctttgacatcaaaattagcrgcagatgcgacattastaagaagcgcacttgccgaccgcctctcaaccattgtgcagaatgttgcactcactgtgacagcatttgttattgccttcacattaagttggcgtatagcatctgttatcattgcctccttccctcttctaattggagcttccataactgagcaactatttctgaagggttttggaggagactacacacgggcctacgctcaagcaactgctgtggcacgagaagcaattgccaatattcgtaccgttgctgcatttggtgctgaagaccgaatctcactccagtttgcttctgaactgaaccaaccaaataaacaagcacttttacgtggccatatatcaggttttggatatggtgtatcacagctctttgcattctgttcctatgcacttggcctttggtatgcatcagttcttatcaaacacaatgactcgaactttggagacatcatcaagtccttcatggttttgataatcaccgcattttcagtagcagagacacttgctctaacacctgacattgtaaagggatcacaagcacttggatcagtcttcagtattctccaaagaaaaacagccattaaccgtgacartcctacatcttcagtggtaactgatatccagggagacatagagttcaggaatgtgagtttcagataccccgcaaggcctgatctcaccatcttcaaggacttaaatttgaaaatctcagcaggaaagagtcttgcaatagtgggccaaagtgggtcagggaagagtactgtgatctcactggttatgagattttacgacccaacttcaggggcagtcatgattgatggatttgatatcaaaggcttaaacttaagatcgttgaggatgaaaataggtttagttcagcaagaaccagcattgttctctaccacaatttacgagaacatcaggtatgggaatgaagaggcatcggaaattgagataatgaaagcagccagggcagcaaatgctcacrgcttcatcagcagaatgcctgaagggtaccaaactcaagtgggtgacagaggagttcagttatcagggggacagaagcagagggtggccatagctagagcaatattgaaagacccatccattctccttttagatgaagcaacaagtgccctggacacagcatccgaaaagctggttcaagaggctcttgatacactaatggaaggccgaacaacaattttgatagcacacaggttgtcaactatacacaatgcagacagcattgcggtactgcaacatggyaaggtagttgaaaccggagaccaccggcagctcatcacccggcctggcagcatctataagcagttagttagcctacaacaggaaaaaggtgaagttcccaattga

SEQ ID NO: 7564 - protein, 1344 aa, Vitis vinifera
  misc_feature (888)..(888): The Xaa at location 888 stands for Leu, or Val.
  misc_feature (1085)..(1085): The Xaa at location 1085 stands for Asn, or Ser.
  misc_feature (1217)..(1217): The Xaa at location 1217 stands for Gly, or Ser.
MPKPSWQNVQTIKAKCPNPQGKMPKLKAKCSTLKAKFPTLKAKCQTFKAKWPTLKAKCLIKGSVTENVVHSSLDHGPTVKDNDQFNLRASMEGLELRSIQISDQNPLPEKDQQSNSSPKDTVSFFGLFAAADTLDCFFMFFGSIGACIHGAALPVFFVLFGRMIDSLGRLSSDPDKLSSQVSRHALYLVYLGLGVLASAWIGVAFWMQTGERQTARLRLKYLQSVLRQDINFFDTEARDKNITFHISNDAILLQDAIGDKIGHGLRYLSQFFVGFAIGFTSVWQLTLLTVAVVPLMAIAGGAYTVIMTTLSEKGEAAYAEAGKVAEEAISQVRTVYSFVGEDRAVETYSRSLQKALKLGKKSGFAKGIGIGFTYGLLFCAWALLLWYASKLVRHGDTNGGKAFTTILNVIFSGFALGQAAPNLAAIAKGRAAAANIVNMIETDSTASKRLDNGIMLPKVAGQLEFCEVCFAYPSRPSMVFENLSFSIYAGKTFAVVGPSGSGKSTIISMVQRFYEPTSGKILLDGHDIKNLRLKWLRAQMGLVSQEPALFATTIAGNILYGKEDADMDQVIEAAKAANAHSFVQGLPDGYQTQVGEGGTQLSGGQKQRIAIARAVLRNPKILLLDEATSALDAESELIVQKALDKIMLNRTTIVVAHRLSTIRDVNKIIVLKNGQVVESGTHLELISQGGEYATLVSLQVSEHGKSPSTKVCQDTSGISKSFPESPNSQNHQQEVKSITKGELQPYDQNMASSSSPPIPSLWQLVKLNAPEWPFAVLGSVGAILAGMEAPLFALGITHVLTAFYSGKDFQIKREVDHISLIFVGAAILTIFIYLLQHYFYTLMGERLTTRIRLLMFSAILSNEIGWFDLDENSTGSLTSKLAADATLXRSALADRLSTIVQNVALTVTAFVIAFTLSWRIASVIIASFPLLIGASITEQLFLKGFGGDYTRAYAQATAVAREAIANIRTVAAFGAEDRISLQFASELNQPNKQALLRGHISGFGYGVSQLFAFCSYALGLWYASVLIKHNDSNFGDIIKSFMVLIITAFSVAETLALTPDIVKGSQALGSVFSILQRKTAINRDXPTSSVVTDIQGDIEFRNVSFRYPARPDLTIFKDLNLKISAGKSLAIVGQSGSGKSTVISLVMRFYDPTSGAVMIDGFDIKGLNLRSLRMKIGLVQQEPALFSTTIYENIRYGNEEASEIEIMKAARAANAHXFISRMPEGYQTQVGDRGVQLSGGQKQRVAIARAILKDPSILLLDEATSALDTASEKLVQEALDTLMEGRTTILIAHRLSTIHNADSIAVLQHGKVVETGDHRQLITRPGSIYKQLVSLQQEKGEVPN

SEQ ID NO: 7565 - DNA, 1953 bp, Amycolatopsis orientalis
  CDS (1)..(1953): transl_table=11
atggatatggtgttgcgcttcgagggggtggacaagagcgagaacgatcccgacccctgggtgaccacggtccgcaaggggacgctgcgccgggtgctcggctacttccgcccgcacgtcggcaaggtggcgctcttcggactcgtcgccgtgctggagtcgcttatcgtcgtcgcaactcccttgctgttgaaggagctcatcgacaacggcatcgaaaagaacgatctcggcctggtgatctggatggccgccctgaccgccgtgctcgccgtgctcgccgcggggctgacgctggtgtccggttacatctccgggaagatcggcgaggggatcacctacgacctccgggttcaggcgctcgaccatgtccggcggctgccgatcgcgttcttcacccgcacccagaccggtgtgctggtcggtcggctgcacaccgaactgatcatggcgcagcagcatttcaccggcttgctgatggcaaccaccagcctggtgatggcgctggtggtgctgatcgagctgttctacctttcgtggcttgtcgccgtcatctcgctggcgctgattccgctcttcctcgtgccctgggttcgcgtggggcgggtgatccagcggctgtccggacggcagatggacgcgaacaccggccttggcggactgctccaggagcggttcaacgtgcagggcgcgatgctctccaagctcttcggccgtccgaacgaggagatggccgagttcgaggaccgtgccagcgggatccgcaagatcggcgtgagcctttcggtatggggccggatggccttcgtcatgatggcgctgatggcctcgctcgccacggcgctcgtctacggcgtcggtggcgggctcgtgctcgccggggcattccaggtcggcacgctggtcgccatcgccaccctgctcgggcggctgttcgggccgatcacccagctgtccgggatgcaggagctcttccagaccgtcgtggtgagcttctcccgggtcttcgagctgctggacctgaagccgttgatccaggaacgccccgacgcggtcaagctcgacaaggacgtggccccggacatcgagttcgagaacgtgtcgttccgctatcccaccgcggacgaggtctcgctggcgtcgctggagcacctgaaggccaagcgggaacgcggggaagtgacaccggatgtcctgcgcgacgtgagcttccacgtgcaggccggaacgctcaccgcgctcgtcggcccctccggcgcgggcaagagcaccatcacccacctggtctcccggctgtacgacccgaactccgggaccgttcgcgtcggcggacacgatctgcgggacctcaccttcgactcgatccgcgaagcggtgggtgtggtcagccaggacgcctacctcttccacgacacgatccgggagaacctgctctacgcccgcccgacggccaccgaggacgagctgatcgaggcgtgcaagggggcccagatctgggatctgatcgaatcccttcccctcgggttggacaccgtcacgggtgaccgcggctaccgcatgtccggcggggagaagcagcggctggccatcgcccggctgctgttgaaggagccgaggatcgtcgtgctcgacgaagccaccgcgcacctggactccgagtcggaggccgccgtccagcgggcactcaagaccgcgctgcgcagccgtacctcgctggtgatcgctcaccggttgtccacgatccgcgaagccgaccagatcctcgtgatcgacggcggcggggtccgtgagcgtggcacccacgacgagttgatggccaagggcggtctctacgcggagctctaccacacacagttcgccgacccacgaatcaatgaagccaagccggaacgcgaagacgagctggacgagccggagccagagccggtggcttacatgggttttggaggatga

SEQ ID NO: 7566 - protein, 650 aa, Amycolatopsis orientalis
MDMVLRFEGVDKSENDPDPWVTTVRKGTLRRVLGYFRPHVGKVALFGLVAVLESLIVVATPLLLKELIDNGIEKNDLGLVIWMAALTAVLAVLAAGLTLVSGYISGKIGEGITYDLRVQALDHVRRLPIAFFTRTQTGVLVGRLHTELIMAQQHFTGLLMATTSLVMALVVLIELFYLSWLVAVISLALIPLFLVPWVRVGRVIQRLSGRQMDANTGLGGLLQERFNVQGAMLSKLFGRPNEEMAEFEDRASGIRKIGVSLSVWGRMAFVMMALMASLATALVYGVGGGLVLAGAFQVGTLVAIATLLGRLFGPITQLSGMQELFQTVVVSFSRVFELLDLKPLIQERPDAVKLDKDVAPDIEFENVSFRYPTADEVSLASLEHLKAKRERGEVTPDVLRDVSFHVQAGTLTALVGPSGAGKSTITHLVSRLYDPNSGTVRVGGHDLRDLTFDSIREAVGVVSQDAYLFHDTIRENLLYARPTATEDELIEACKGAQIWDLIESLPLGLDTVTGDRGYRMSGGEKQRLAIARLLLKEPRIVVLDEATAHLDSESEAAVQRALKTALRSRTSLVIAHRLSTIREADQILVIDGGGVRERGTHDELMAKGGLYAELYHTQFADPRINEAKPEREDELDEPEPEPVAYMGFGG

SEQ ID NO: 7567 - DNA, 1956 bp, Streptomyces fungicidicus
  CDS (1)..(1956): transl_table=11
gtgaccgtgggacacgacccgacgatgggcacgatcggactgcgggtcgaaggactggtggacccgcagccggtcaggtccggcacgttcaagcggatcattccctacgccatgcgctaccgccgggccatggcgatggtcatggtggcgacgatcgtcgactccctgatcacggtgtcgatcccgctgaccctcaaaatgatcatcgatgacggcatcatccccgggaagacgtccgtcgtgttcggcctcgccgggctcgtcgccggactggccctgctgaacgtcgtggcggtctacacgcagacgtggttctccggaagggtcggccagggcctcatcttcgacctgcggaccgcggtgttctcccacatccagcggcagccggtggcgttcttcacccgcacccagaccgggtcgctggtcagccggatcaacaccgacatcgtgggcgcccaacaggccctcacctcgctgctgtcgcagtcgctgtcgacgctgctgacgctggtcctggtgctcgcggcgatgctctacctctcgtggccgatcaccgtggcggcgctgatcatgatcccgctgttcttcatccccgggaagatcatcgcccagcggctggagaagctggcccgcgccggcatgcagaacgacgccaagctgggctcgatgatgaccgagcggttcaacatctccggcgcgatgctcgtcaagctctacggccgtccggaggacgagtccgccgagttctccaagaaggcgggcctcgtccgggacatcgcgatctcgatggacgtgcacgcacggctgctgttcatcctcgtcaccctgctcaccaccgtcaccacggcgatggtgtacggcttcggcggctggttcgtcatcgacggctcgctgcagatcggcacgctggtggccatggtcgccctgctgctgatgctgtacggccccgtcaaccagctgacgaacatccagagcgacgtcatgaccgcgctggtcagcttcgaccgcgtcttcgaggtgctggacctgaagccgctgatcaccgagcgtcccggcgcccgccccctgccggcccgcgcctcggcgaacggcgacggcaccgctccccccgtcgagttcgaccaggtcgccttccgctaccccagcgccgaggaagtgtccctgccctcactggagttgatgccgcagcgcaagagcgagcagggccccggcgcgctggtcctcaacgacgtgagcttccacgccccggccggccggctcacggcgctggtcggcccgtccggcgcgggcaagaccacgatcacccacctggtgccacggctctacgacgccacctcgggaacggtgcggatcggcggccacgacgtccgcgacctgaccctcggctcgctgcagaacacggtcggcgtggtcacccaggacgcgcacctgttccacgacaccatccgggccaacctgctgtacgcccgcccggacgcctccgagcccgagatcgtccaggcgtgcgaggcggcgcggatctggccgacgatctcccagctcccggacggtctcgacacggtcgtcggcgaccgcggctaccggctgtccggcggtgagaagcagcggctggccatcgcccggctcctgctcaagtcgcctccgatcgtcgtcctggacgaggcgacggcgcacctggactccgagtccgagctggccatccagcgggccctcaagaccgccctgaccgggcgcacctcgctcgtcatcgcgcaccggctgtccaccatccaggacgccgaccagatcctcgtcatcgacgacgggcggatccaggagcggggcacccacgaccagctgctggccggcggcggtctctactccgagctgtaccgcacccagttcgcccaccagcagggccgtggccgaccggccgaaagtacggccgccggcaacgggaaccgtgctttggactga

SEQ ID NO: 7568 - protein, 651 aa, Streptomyces fungicidicus
MTVGHDPTMGTIGLRVEGLVDPQPVRSGTFKRIIPYAMRYRRAMAMVMVATIVDSLITVSIPLTLKMIIDDGIIPGKTSVVFGLAGLVAGLALLNVVAVYTQTWFSGRVGQGLIFDLRTAVFSHIQRQPVAFFTRTQTGSLVSRINTDIVGAQQALTSLLSQSLSTLLTLVLVLAAMLYLSWPITVAALIMIPLFFIPGKIIAQRLEKLARAGMQNDAKLGSMMTERFNISGAMLVKLYGRPEDESAEFSKKAGLVRDIAISMDVHARLLFILVTLLTTVTTAMVYGFGGWFVIDGSLQIGTLVAMVALLLMLYGPVNQLTNIQSDVMTALVSFDRVFEVLDLKPLITERPGARPLPARASANGDGTAPPVEFDQVAFRYPSAEEVSLPSLELMPQRKSEQGPGALVLNDVSFHAPAGRLTALVGPSGAGKTTITHLVPRLYDATSGTVRIGGHDVRDLTLGSLQNTVGVVTQDAHLFHDTIRANLLYARPDASEPEIVQACEAARIWPTISQLPDGLDTVVGDRGYRLSGGEKQRLAIARLLLKSPPIVVLDEATAHLDSESELAIQRALKTALTGRTSLVIAHRLSTIQDADQILVIDDGRIQERGTHDQLLAGGGLYSELYRTQFAHQQGRGRPAESTAAGNGNRALD

SEQ ID NO: 7569 - DNA, 3645 bp, Medicago truncatula
  CDS (1)..(3645)
atgggtaaaaatattgttatgaatgaaaataagaacatgaatgggtctattaggtccattttcatgcatgctgatggggaagattggttccttatgattttaggtaccattggagcaattggtgaaggtttcaacgctcctttgattttgtatatttgtagccacatgattaacaatattggaagttcatctaccatggatgtagacactttcatccataacatcaacaagggatattgttggacaaggacaagtggaagacaagctgcaagaatgagatacaagtacttaaaagcagtacttaggcaagaagttgcttattttgatttgcaggttacaagcacctcagaaatcatcactagtgtctctaatgacactattgtaattcaagatgttcttagtgagaaggttccaaatttcttgatgaacatttcattgtttattgggagctacatagtggcatttacaatgttatggagaatggccattgtagcatttccatctgttattcttctggtaatccctggaataatctatggcaaggttttgatgggtttatcctgcaagattagagaagagtataatcaagctggtacaattgcagaacaaacaatatctaccattagaactgtctattcatttgtgggagaaaacaaatccatgtttgctttctctaatgctttgcaagggattgttaatttgggtttaaaacaaggattagctaaaggtttagcaattggaagcaatggtgttgtctttgcaatttggtccttcatgtgctattatggtagcaaattggttatgtatcatggtgctaaaggagggacagtttttgcagttggagcatccataactgttggtggattaggattaggagcaagtttattaaacataaagtatttctcagaagcatgttcagctggtgaaagaataaagagagtaattgaaagagttcccaagatagattccaacaacacaaaaggagagatattaaacaatgtttttggggaagtggaatttgaccatgtagaatttgcatatccaacaagaccagaaaccattatccttaaaaacttgtgtctcaagattccagcagggaaaacaatggcattggttggtgagagtggttcagggaaatcaactgtgatatctttattgcaacggttttatgatccaatcggtggtgagatacgtcttgatggagtagctattcgtaacttgcagattaaatggcttaggtcaatgatggggttggttagtcaagaacctgctttatttgcaacaagcattaaagagaatataatttttggtaaagaagatgctaccgaagatgagattgttgaagctgcgaaaatttgtaatgctcatgatttcatttctttgcttcctcaaggttacaatactcaggtaggagaaagagggattcaattatcaggtggacaaaaacaaagaatagcaattgctcgagcaataattaagaaaccgcgaatctttcttttggatgaagcaactagtgcgttagacactgagtcagaaaaaatggtccaacaagcactcgaaaatgcaacaaacggatgcactgccatcataatcgcccaccgcctctccacaatccaaaatgccgacattgttgccgttgtggacgatggaagagtcaatgagattggctcacaggatgaacttctagaaaatgaaaatggcatctactcgtcccttgtccgccttcaacaaaccaacaaatccaaaacacaatcagatgaaactgttacagctactttcaccaatgtagacacagatatcacgtgtctagtggaccctactagttcagctgaagatcacattagcgtccatcaagctagtactagtaacaacaaaaatgaagaagacgtgaagcaactaaataatccggtgtcattttggagattacttctactgaacgctccagaatggaagcaagcggttttagggtgtttgagtgcaatggtgttcggtgcagttcaacctgtttacgcatttgcaatggggtcgatgatatctgtgtattttcaaacagattacgaggagctaaaaaacaagattaaaatctattctctttgttttctgtgtctatcgttaatatcattggtggttaatgttgggcaacattataacttcgcttacatgggagaatatttgactaaacgtgtgagagagagcatgttttctaaaatgctcacgtttgaagttgggtggttcgatcgtgaagaaaattccagtggtgctatttgttctcgacttgccaatgatgctaatgtggtgaggtcattagttggtgatagaatggctttgttggtacaagctttctcagcagtagcaacagcatacactatgggtctgatcatttcatggaggctcaaccttgttatgatcgccattcaaccgattataatagcttgcttttacacaagaagtgtattactcaaaagcatgtcaagtaagtctatgaaggcccaacaacaaagtagtaagatagctgctgaagctgtttcaaatcatagaaccataactgctttttcttctcaagatagaatactcaaaatgcttgaaacctcccaacaagacccaattcaagagaattttcgacagtcgtggtttgctggtattgggcttgggttttcacaattcctcttatcttgttcttgggccatgaattattggtacggcgccaagcttgttgctgatgggaacataacaaggaaagcattgtttgagagttttatggtggtcgtgagcacgggacgggttataggtgatgctggcagcatgactaaagaccttgccaaaggcgttgatgttgtgagctctatttttgccattcttgatcggtctaccaaaatcaagccagacaaccctaacggatttaagcccgatacattaatgggccatatcgaactctacgacgtgcattttgcttaccccgctaggccaaatgtggctatctttcaaggtttttcaatcaaaattgaagcagggaaatcgacggcattagtggggcaaagcgggtctggcaaatcaaccatcataggattaatagagagattctatgatccaataaaaggaaatgtgacaatagatggtacaaacataaaatcatataacctaaagtcactaagaaaacacatagcacttgtgagccaagaaccaacattgataaatggaaccataagagacaacattgcatatggaacaacaacatgtgacaacatcgatgaaactgagatcatagaggcatcaagagtagccaatgctcatgatttcattgcaagtttgaaagatgggtatgagacatggtgtggggacaaaggagtgcaactttcaggggggcaaaaacaaaggatagcaatagctagagccatgttgaagaatccaaaggtgttgcttctagatgaagcaacaagtgcacttgataataattcagaaaaggtagtgcaagatgcattgaataaggtaatggttggaaggactagtgtggttgtagcacataggttgagtaccatacacaattgtgatgttattgctgttttagaaaaagggaaaatggttgaaattggaactcacaaagcattattggataaaggaccttttggtgcttattactctttgtga

SEQ ID NO: 7570 - protein, 1214 aa, Medicago truncatula
MGKNIVMNENKNMNGSIRSIFMHADGEDWFLMILGTIGAIGEGFNAPLILYICSHMINNIGSSSTMDVDTFIHNINKGYCWTRTSGRQAARMRYKYLKAVLRQEVAYFDLQVTSTSEIITSVSNDTIVIQDVLSEKVPNFLMNISLFIGSYIVAFTMLWRMAIVAFPSVILLVIPGIIYGKVLMGLSCKIREEYNQAGTIAEQTISTIRTVYSFVGENKSMFAFSNALQGIVNLGLKQGLAKGLAIGSNGVVFAIWSFMCYYGSKLVMYHGAKGGTVFAVGASITVGGLGLGASLLNIKYFSEACSAGERIKRVIERVPKIDSNNTKGEILNNVFGEVEFDHVEFAYPTRPETIILKNLCLKIPAGKTMALVGESGSGKSTVISLLQRFYDPIGGEIRLDGVAIRNLQIKWLRSMMGLVSQEPALFATSIKENIIFGKEDATEDEIVEAAKICNAHDFISLLPQGYNTQVGERGIQLSGGQKQRIAIARAIIKKPRIFLLDEATSALDTESEKMVQQALENATNGCTAIIIAHRLSTIQNADIVAVVDDGRVNEIGSQDELLENENGIYSSLVRLQQTNKSKTQSDETVTATFTNVDTDITCLVDPTSSAEDHISVHQASTSNNKNEEDVKQLNNPVSFWRLLLLNAPEWKQAVLGCLSAMVFGAVQPVYAFAMGSMISVYFQTDYEELKNKIKIYSLCFLCLSLISLVVNVGQHYNFAYMGEYLTKRVRESMFSKMLTFEVGWFDREENSSGAICSRLANDANVVRSLVGDRMALLVQAFSAVATAYTMGLIISWRLNLVMIAIQPIIIACFYTRSVLLKSMSSKSMKAQQQSSKIAAEAVSNHRTITAFSSQDRILKMLETSQQDPIQENFRQSWFAGIGLGFSQFLLSCSWAMNYWYGAKLVADGNITRKALFESFMVVVSTGRVIGDAGSMTKDLAKGVDVVSSIFAILDRSTKIKPDNPNGFKPDTLMGHIELYDVHFAYPARPNVAIFQGFSIKIEAGKSTALVGQSGSGKSTIIGLIERFYDPIKGNVTIDGTNIKSYNLKSLRKHIALVSQEPTLINGTIRDNIAYGTTTCDNIDETEIIEASRVANAHDFIASLKDGYETWCGDKGVQLSGGQKQRIAIARAMLKNPKVLLLDEATSALDNNSEKVVQDALNKVMVGRTSVVVAHRLSTIHNCDVIAVLEKGKMVEIGTHKALLDKGPFGAYYSL

SEQ ID NO: 7571 - DNA, 1854 bp, Streptomyces ribosidificus
  CDS (1)..(1854): transl_table=11
atgacgtcgctgcggcgctgcgtcccctatctgcgcccgcaccgctggctgatggcgggcgtgtgcggcgcggccttcgggtcgatgctggcgggtctggccatgccgctggtgctgcagcggctggtggacgggccggttgcggagcgggacagcgccgcgctgccgtggtgcatcggcgggttcaccctcctcggcctggtcgaggcggtgctgctgggcgcgcgccggctgctggtggtgcgcccggcgacccggctggagacgcagatgcgggccgatgtgtcggcgcacatccagcggctgccgctgtcgttccactcccgctggcagtcgggtcagctgctctcgcggaccgtctcggacgtgacagagatcggccggttcgtggcgttctccgccgtctatctaatggtgaacgtcgcggcgctcgccgtcggtctggtcgtactggcatggctcgggccggtgctcgcgctgatcgtgtttctggcgtacgcgccgatggtgggggccaccacggtgttcgagcagcggttccgggcggtggcgcgctccgcgaaggaggtgagcggcgatctgtccacgactgtggaggagtcagtgctcggcgtgcgggtgctgaaggtgttcgggcgcggcccggagacggtgcgccggttcaccgggcaggcgcgccggctgcgcggcctggagctgcggaagctgtcgtacacggcggccctgtggtggatcatcacggcgctgccggacctggcgatcgtggcggtgatcgggtacggcggctacggcgtcgccaccggcgcgctcacgctgggcacgctgatggcggcggtgacggtgaccacgtatctacgctggccggccgactcgctcggctggctgaccaccgacgcgtcgaaggcggccgcggctgccgaccggtactggcaggtgcgggacgagccggtgacggtgggcgagccggagcggccgcagccgttgccgtcgccactgcacggtgagatccgtctggaggacgtgcactacgcgcacccgggcggccgtgccgcggcgctgcggggcgtcggcctgacgatccgggcgggcaccatggtagccctggtcggggcgaccggttccggcaagagcacgctgctgtcgctgctgtcccggctggacgacccgacgtcggggcgcatcacgctcgacggcgtggatctgcgggagctggccctggccgacctgcgatcggtggtgtgctgcgcgttcgacgacccggtgctgttctccggcacggtgcgggccaacgtcacgttgggccttcccgaggcggacggcgggagtgaggacggggacgcggcggtgtgggaggcgctgcggacggtgcgggcggacggattcgtctccgcgctgcccgagcggctgtccacggtgatcggcgaggagggactgggcctctccggcggccagcggcagcggctggcgctcgcccgggccatcctgcccgggccgaaggtgctagtgctggacaatgcgctgtcggcgctggacgtacgaaccgagcgggaggtggaagccgcgctgggcggggtgctgagccgggttaccacggtggtgacggcgcaccggccgggcacgctgcgcctggcggaccaggtggtgttcctcgcgggcgggcgggtcgccgcgacgggcacgcacgaggagctgatggcccgtgagccggagtatcggcggctagtcgccccgtcgctgccgacggtcgccggccccgtggggcgcgacaccgaggaccccgggtacgccgacgacaccgacgaggtcgcggacatcgcggaggacggcatggcgggacgggggcggacacgatga

SEQ ID NO: 7572 - protein, 617 aa, Streptomyces ribosidificus
MTSLRRCVPYLRPHRWLMAGVCGAAFGSMLAGLAMPLVLQRLVDGPVAERDSAALPWCIGGFTLLGLVEAVLLGARRLLVVRPATRLETQMRADVSAHIQRLPLSFHSRWQSGQLLSRTVSDVTEIGRFVAFSAVYLMVNVAALAVGLVVLAWLGPVLALIVFLAYAPMVGATTVFEQRFRAVARSAKEVSGDLSTTVEESVLGVRVLKVFGRGPETVRRFTGQARRLRGLELRKLSYTAALWWIITALPDLAIVAVIGYGGYGVATGALTLGTLMAAVTVTTYLRWPADSLGWLTTDASKAAAAADRYWQVRDEPVTVGEPERPQPLPSPLHGEIRLEDVHYAHPGGRAAALRGVGLTIRAGTMVALVGATGSGKSTLLSLLSRLDDPTSGRITLDGVDLRELALADLRSVVCCAFDDPVLFSGTVRANVTLGLPEADGGSEDGDAAVWEALRTVRADGFVSALPERLSTVIGEEGLGLSGGQRQRLALARAILPGPKVLVLDNALSALDVRTEREVEAALGGVLSRVTTVVTAHRPGTLRLADQVVFLAGGRVAATGTHEELMAREPEYRRLVAPSLPTVAGPVGRDTEDPGYADDTDEVADIAEDGMAGRGRTR

SEQ ID NO: 7573 - DNA, 1785 bp, Streptomyces ribosidificus
  CDS (1)..(1785): transl_table=11
atgaacggcacggaggacgcgggctcccgggcccggcgggtcgccctgctgcgcatgctgctgtggcccgagcggcgacggctggcggccgccacggcactagccttggtggagaacgtgtgcggtctcgtcccgccactgctgatcgccgccggtatcgaccggggcgtccccgcggcaggggacgggcactggacgccgctgatcggcttcacggccgcggcgctggccgccgggctggccaccgcgacgctcaagtactgcttcctccgctactcgggcggcatcgcccaggacttgctgttcgagctacggcaccgggccttcacccatgtgatggatcagccgctggcgttccacgagtcgtacccgtcgggccgagtgatcgcccggctgtccagcgatgtggagtcggtcgaggagatgctggagatgggcctggacgggctgttctccgcgctcttctcgatggtcggcatcctcgccgtgatgctgtggatggaccagccgatggccgcggccatcattgctctgttcgtcccgctgtacgcgctgacgcggtggttccggcaccggtcacggcggtcctaccgctccacccggacggccgtggagggcgtcgtgcagcacacggtcgaggtgtacaacggcatcagggccgtgcaggcgttccgccgcgaggcagccaacgcggcccgtctgcgcggtcttgacgcccggtacgcggtggcgcggagggacgccagctgggtgagcgccgccttcagcggcggcgtgaagctgctcggcaacctgtcgctggcggggctgctgacactgggcgtgttccgcatcgagcagggagcgttggcgatcggtacgctcaccgcgttcctgctgtatgtgtaccggctgtacgatccgatcgacgagctggcaagcttcgccgacgcgttctcggcggcgtcggcggggctggagaagatcagcgcgctgttcatgcgccacccggcggtggccgagccggagcacccggtgtccctgccggccgagccgccgggcggacggggcgccgtacgattcgagggcgtccacttccggtacggcgaggcgggcaggcccgtgctgtccggcgtcgacctggcgctcgaacccggccgtacggtggccctggtgggcacgaccggcgctggcaagtccacgatcgccaagctggtggcacggctctacgaccccacggcgggccgggtcacgctggacggggtggacctgtcggacttggccgacaccgacctgcgcggcgccgtgtcggtgatcacccaggagtcgttcctgttctccgggtcggtcgccgacaacatcgcgctgggccggccggacgcctcgcgcgccgagatccgggcggccgccgaggcggtgggcgcacacgggttcatcagcgcgctgcccgacggctacgacacggatgtgcacaagcgcggtacgggcctgtcggccgggcagcggcagctgatcgccatggcccgcgtgatgctggcatcaccgcgcgtgctgatcctcgacgaggcgacatccagcatggacaccccgtcggagcgggccgtacacgaggcactgacccgtgtcctcacggaccgcaccgcggtgatcatcgcgcaccggctgtccacggtcgccatcgccgaccgcgtcctggtcatcgaggacggtgtggtggtggaggacggcagcccggagcaactgctgcaggcgggcggacggttcgccggcatgcagcggggctggctggccgacaccacggcgtga

SEQ ID NO: 7574 - protein, 594 aa, Streptomyces ribosidificus
MNGTEDAGSRARRVALLRMLLWPERRRLAAATALALVENVCGLVPPLLIAAGIDRGVPAAGDGHWTPLIGFTAAALAAGLATATLKYCFLRYSGGIAQDLLFELRHRAFTHVMDQPLAFHESYPSGRVIARLSSDVESVEEMLEMGLDGLFSALFSMVGILAVMLWMDQPMAAAIIALFVPLYALTRWFRHRSRRSYRSTRTAVEGVVQHTVEVYNGIRAVQAFRREAANAARLRGLDARYAVARRDASWVSAAFSGGVKLLGNLSLAGLLTLGVFRIEQGALAIGTLTAFLLYVYRLYDPIDELASFADAFSAASAGLEKISALFMRHPAVAEPEHPVSLPAEPPGGRGAVRFEGVHFRYGEAGRPVLSGVDLALEPGRTVALVGTTGAGKSTIAKLVARLYDPTAGRVTLDGVDLSDLADTDLRGAVSVITQESFLFSGSVADNIALGRPDASRAEIRAAAEAVGAHGFISALPDGYDTDVHKRGTGLSAGQRQLIAMARVMLASPRVLILDEATSSMDTPSERAVHEALTRVLTDRTAVIIAHRLSTVAIADRVLVIEDGVVVEDGSPEQLLQAGGRFAGMQRGWLADTTA

SEQ ID NO: 7575 - DNA, 1887 bp, Streptomyces rimosus subsp
  CDS (1)..(1887): transl_table=11
atgcccgaggaccggcaggagaacgacacggccgccccccggccctcgggcgcccctgacgtggaccgggctgcggacgaggccgacggcaggccggacgaccggcggctgcgggaacgccgcaaccagctgctgcgcaccctgctggcgcccgagcggcgccggctgacccgcgccgtcggcctggcgctgctggagaacgtctgcgcgctcgtcaccccgctgctgatcgccgccgccatcgaccggggcgtgcccgcggcggcggacggccgctggggtccgctgaccgcctacgcggcgctcgcgctgaccgccgggacggccaccgccaccctgcggtacggcttcctgcgctactccgggaacatcgcgcagaccctgctgttccggctgcgctgccgcaccttcgcgcacgccgtgcgcctgccgctgtcctaccacgaggccgcgccctcgggcagcgtcgtcgcccggctctccagcgacgtggagtccgtcgaggaggtgctggagatgggtctggacggcctgttctccgccctgttctcgatggtgggcacggtggccgtgatgctctggctcgacctgccgatggccgccgtcgtactcgccctgttcatcccgctctacctgctcacccgctggttccgggaccgctcgcggcgcgcctaccggcgcacccggggcgccaccgagcggatcgtgcagcacaccggcgagacgtacaacggcatccgtgccgtgcaggcgttccgcaaggagggcgagaacaccgcgcggctgcgggagatggacgccacctatgccaccgcgcgggccgcctcggggcgggtcagcgccttcttcagcggcggcgtcaagctgatcggcaacctctcgctggctctgctgctggccctgggcgcgttccgtatcgcaagcggccacctcgaagcgggcgcgctgaccgcgttcctgctgtacgtgcaccggctgtacgacccgatcgacgaactcgcctcgttcgccaacgcgttctccgccgcgtcggccggactggaacggatcggcgtcctcttccacgcacccgacacactgcccgagcccgccgaccccaggccgctgccggcggtggccgcccccggccgcgtccgcttcgaggacgtgcgcttccgctacaccgccgcctcaccgcacgtactggccgggctggacctggatctcgcgcccgcggagaccgtggcgctggtcggtacgaccggggcgggcaagtcgacgctggccaagctgctggcgcggctgtacgacccgacgggcggccggatcaccctggacggggccgacctgcgcgaggtggccgacgccgaactgcgctccggtgtctgcatggtcacccaggaaccgttcctcttctccggctccgtggcggacaacatcgccctgggccggccggacgccacccgcgaggacatcgtcgcggcggccgaggccgtcggcgcgcacggtttcatcagcgcgctgcccgaggggtacgacagcgacgtccacaagcgcggcgccggtctgtcggccggccagcgccagctcgtcgcgctggcccgggtgatgctcagcgccccccgcgtcctgatcctcgacgaggccacctccagcatggacgcccccaccgagcgggccgtgcacacggccctgcaccgggtgctcgccggccgtaccgccctgatcatcgcgcacagcctgaccacggccgccatcgccgaccgggtgctggtcctggagaacggcgtggtcgtggaggacgggccgcccgccgtactggcggcgggcgacgggcccttcgccggcctgtaccgcggctggctgtccgcgaccgacgggcgcacccaccaccccgcgcaccactga

SEQ ID NO: 7576 - protein, 628 aa, Streptomyces rimosus subsp
MPEDRQENDTAAPRPSGAPDVDRAADEADGRPDDRRLRERRNQLLRTLLAPERRRLTRAVGLALLENVCALVTPLLIAAAIDRGVPAAADGRWGPLTAYAALALTAGTATATLRYGFLRYSGNIAQTLLFRLRCRTFAHAVRLPLSYHEAAPSGSVVARLSSDVESVEEVLEMGLDGLFSALFSMVGTVAVMLWLDLPMAAVVLALFIPLYLLTRWFRDRSRRAYRRTRGATERIVQHTGETYNGIRAVQAFRKEGENTARLREMDATYATARAASGRVSAFFSGGVKLIGNLSLALLLALGAFRIASGHLEAGALTAFLLYVHRLYDPIDELASFANAFSAASAGLERIGVLFHAPDTLPEPADPRPLPAVAAPGRVRFEDVRFRYTAASPHVLAGLDLDLAPAETVALVGTTGAGKSTLAKLLARLYDPTGGRITLDGADLREVADAELRSGVCMVTQEPFLFSGSVADNIALGRPDATREDIVAAAEAVGAHGFISALPEGYDSDVHKRGAGLSAGQRQLVALARVMLSAPRVLILDEATSSMDAPTERAVHTALHRVLAGRTALIIAHSLTTAAIADRVLVLENGVVVEDGPPAVLAAGDGPFAGLYRGWLSATDGRTHHPAHH

SEQ ID NO: 7577 - DNA, 1815 bp, Streptomyces hygroscopicus subsp
  CDS (1)..(1815): transl_table=11
atggaattgagcgcgccgctcgcggaaccggccgggccgcgtccctcctgggccgccctacggcggctcggcccctatctgcgcccggtccggctgccggtgggcgccgccgccgccgcgacgctcggcgcgctgctgtgcggactggccattccgctggtcacccagcggatcgtggacgggccgctgagcaccggcgacgcgggcgcggcggtgcggccgatcctgctggtcggagtgcttggcgcggccgaggcggcgctgttctacgcccgccgcaagctgatcgcccgtcccaccgcgctggtggagtcgcacatgcgggccgatctgctggcccatctgctccggctgccggtctccttccacgaccgctggccctcggggcagttgctctcccgggcggtaggcgatctggtcgtgctgcggaagttcctcgcgttcgccgcgctgttcctggtggtcaactcggtcaccgtgctggtgggtctcggggtgctgttcctgatcgacccgtggctggcgctggtggggctggcgggcgcggcgccgctgctgctggtctcctacttctacgagacccggtacaaggtcgctgcccgggccacccaggacgagggcggccatctcgccacgctggtcgaggagaccatgctcggcatccgggtcgtgcgcgcgtacgggcagggccggggcaggctggcgctcttccgcacccaggcggagcggctgcgcaccgcggagctgcgggtggtgcgcatcatggcggccctgtccaccgcgctgctggtcctgcccgagctgggtatcgcgggccaactgggcctcggcgcggtgggggtggccaactccaccctgaccctgggtgatctggtggcggccgtcacggtcagcacctatctgcgctggccgaccgagtgcatcggctgggccctggccgagaccagcacggccgccgccgcctgcgaccggtactgggaggtgcgcgacaccccgccgggcctcaccgacccggcgcatcccaagccgctggtgcggccggcccgaggccatctccggctggaacacgtggagttttgccacccgggagccgaccggccggtgctgcgggaggtgtccctggagctgcggccgggcgagacggtggcgctggtgggcgccaccgggtcgggcaagaccacgctggccgcgctggtgccgcgcctcgccgatgtgacctccggccgggtcaccgtcgacggcgtggacgtccgggagctgcggctggcggacctgcggtccgtggtggggtgtgccttcgacgatccgctgctctcctcgctgaccgtgcgcgagaacgtgaccctgggcgccccggaggcgaccgacgaagccgtgtgggaggcgctgcgggtggcgggcgccgcggacttcgtggccgcgctcgggccggacgggctcgccgtgcgcatcggcgagcagggcatgtcgctctccggcggacagcggcagcggatcgccctggcccgcgcgatcgtgggccggcccgcgctgctggtgctggacgacccgctctccgcgctcgacctgcacaccgaggcggaggtggagcaggcactgcgccgggtgctgcgccgctccaccgccctggtggtggcgcaccggcccaacaccgcccggatggccgaccgggtggtgctgttggaggacggccggatcaccgcccggggcacccaccgggagctgctcacctcctcggccgtctaccgggcgctgatggcggtggagccgcgcccggccggggacacccgcgacgacggggtggtggtccggtga

SEQ ID NO: 7578 - protein, 604 aa, Streptomyces hygroscopicus subsp
MELSAPLAEPAGPRPSWAALRRLGPYLRPVRLPVGAAAAATLGALLCGLAIPLVTQRIVDGPLSTGDAGAAVRPILLVGVLGAAEAALFYARRKLIARPTALVESHMRADLLAHLLRLPVSFHDRWPSGQLLSRAVGDLVVLRKFLAFAALFLVVNSVTVLVGLGVLFLIDPWLALVGLAGAAPLLLVSYFYETRYKVAARATQDEGGHLATLVEETMLGIRVVRAYGQGRGRLALFRTQAERLRTAELRVVRIMAALSTALLVLPELGIAGQLGLGAVGVANSTLTLGDLVAAVTVSTYLRWPTECIGWALAETSTAAAACDRYWEVRDTPPGLTDPAHPKPLVRPARGHLRLEHVEFCHPGADRPVLREVSLELRPGETVALVGATGSGKTTLAALVPRLADVTSGRVTVDGVDVRELRLADLRSVVGCAFDDPLLSSLTVRENVTLGAPEATDEAVWEALRVAGAADFVAALGPDGLAVRIGEQGMSLSGGQRQRIALARAIVGRPALLVLDDPLSALDLHTEAEVEQALRRVLRRSTALVVAHRPNTARMADRVVLLEDGRITARGTHRELLTSSAVYRALMAVEPRPAGDTRDDGVVVR

SEQ ID NO: 7579 - DNA, 1851 bp, Streptomyces hygroscopicus subsp
  CDS (1)..(1851): transl_table=11
gtgagcgcggacaccacctccccggccgccggcccgatggcggaccgcccggccgggcccgccgggcgaccgccggaacaccgggagtcccgccgggtgcggcgcgcgtcccggcagctgctgtacgcgctgctccggccccaccggtggccctccggcgcggccctggccgccctggtgctggagaacgccttccagctggtcggcccgctgctggtggcgcgcgccatcgatctcggcattccccgggcgtcggcgggcgactggggcccgctgaccgggtgcgtggccgggttcaccgcctgcgggctgctggccgccgggacacggtacgcgttcttccggatctccggttcggtgggccaggccgtgctgctggagctgcgcacccggatcttcgaccgggcccggcaactgccggtcgccttccacgagtcgtacacctcgggcgccgtcatctcccggctcaccgccgatgtggatgccgtacgcgatctgatcgaggccagtctggacgggctgctcacctcggtgctgacggtgacgggcatctcggtgctgctgctctggctggacgccccgctggcgctggtggtgctggggtccatcgtgccgctggtcgcgatgacgcgctggttccggcgccgttcccggatcgcctaccggcgcgcccgcgacacggtggcggagatcatcgtgcggttcggggagagcatgaacgccgtgcgggccgtgcaggcgttccgcgccgagcagcgcaagcacgcggcgatgaaccggctcaacgacactttccgggacgcccacaccgacgccctggaggtggtcgcccggtacaccgcgggagtccggctgaccggcaacatcgccctggcggtggtgctggccctgggcgcctggcgggtgtcgtccggcgcgctgccgctgggcgtgctcaccgccttcctgctctatctccggcgcttctacgacccgttggacgagctggcgaccttcaacaacctctacgcctcggcggcggcggcgctggagaagatcgccgacttcctcgccgtcccctcctcggtgccagagcccgccgccccggtgccgctgccgcgcgaccggccggtgcggggagcgctcgccttccagggggtcggcttccgttaccggccggacaccccgccggtgctgcgcggtctcgacctcgacgtgccggccgggcagaccctggcggtggtcggcgcgaccggggccggcaagtccaccgtcgccaaactggcggcccggttctacgatccgaccaccggcaccgtgctgctggacggcgtggacctgcgccggctccccgaccgcgaactgcgccgcgagatcaccctggtgacgcaggagaacttcctgttcgacggcagcatcatggagaacatcgcgctggcccgcccggacacgggaccggaggagatccgggccgccgcacgggccgtcggcgccgacgcgttcatctccgcgctgcccgagggctacgccaccgaggtacgcaagcggggcagccgtctgtctgcgggccagcgccagttggtcgccctcgcccgggccttcctggccgatccggcggtgctgctgctggacgaggcgacctccagcctggacatccccaccgaactggccgtccgccgcgctatggacgcgctgctggccggccgcacctccgtgatcatcgcgcaccgtctctccaccgtcctggcggcggaccgggtcctcgtactggcggacggtgccgtggtcgaggacggcccgcccgcccgcctcgcctccggcgacggccccttcgccgccctccacgcccgctggatccatgcgacgggctaa

SEQ ID NO: 7580 - protein, 616 aa, Streptomyces hygroscopicus subsp
MSADTTSPAAGPMADRPAGPAGRPPEHRESRRVRRASRQLLYALLRPHRWPSGAALAALVLENAFQLVGPLLVARAIDLGIPRASAGDWGPLTGCVAGFTACGLLAAGTRYAFFRISGSVGQAVLLELRTRIFDRARQLPVAFHESYTSGAVISRLTADVDAVRDLIEASLDGLLTSVLTVTGISVLLLWLDAPLALVVLGSIVPLVAMTRWFRRRSRIAYRRARDTVAEIIVRFGESMNAVRAVQAFRAEQRKHAAMNRLNDTFRDAHTDALEVVARYTAGVRLTGNIALAVVLALGAWRVSSGALPLGVLTAFLLYLRRFYDPLDELATFNNLYASAAAALEKIADFLAVPSSVPEPAAPVPLPRDRPVRGALAFQGVGFRYRPDTPPVLRGLDLDVPAGQTLAVVGATGAGKSTVAKLAARFYDPTTGTVLLDGVDLRRLPDRELRREITLVTQENFLFDGSIMENIALARPDTGPEEIRAAARAVGADAFISALPEGYATEVRKRGSRLSAGQRQLVALARAFLADPAVLLLDEATSSLDIPTELAVRRAMDALLAGRTSVIIAHRLSTVLAADRVLVLADGAVVEDGPPARLASGDGPFAALHARWIHATG

SEQ ID NO: 7581 - DNA, 3984 bp, Aspergillus oryzae
  CDS (1)..(3984)
atgaagctcggcaaaaagcttgcaggctaccccagcctactgctggccggtaatccttcgaaagtcgacatagggaggcttttgttgggtatggtagcttcagcagcgtccggtgtccccttcccattaatcgctattcttttcggtcaactgttagacgacttcaacgccgtaacgtgtgatgaaaccgaatcgacgggttccgatgccgattatcaacatgacattaacggcaaaatcctgatcattgtgtatctggccattgctcaattcgttgcgatttatattcatctttcctgctggagcttgaacggcgctcggctagcgcagagactgcgggaaacgtatcttcaaaacttgcttcgacaagaaccttcattcttcgatgatctacctccgggagaacttgcatctcggcttaatggcgatatccaggcgattcgatctggcacgtcggagaaagtggggatatgcttatcgaccttatcgtttttcatcacggcatatgtcgttgctttcatcaaagactaccggctggcagcaatgttgatttcattagttcccgcctacttcctgatgtcatttgttggaagccattatattgaaaaatactctggacgtatgtcggattattccgcgactgccgcatcaatcgcttccgaggcgctctccaacaccgtcgtggtgcaggcctttggcgcgagctaccgactggaagataagttttccaaggcgctcaaggcttcagagcaggaaggcttgaagaaggccgccgccgtgggtatacaatctggattcctgtattttatcgcctattctgcgaatggtctggcattctggcaaggtagtagacgtgttgcggatgcagtaggctcggacactgctggtgccaccgttggcgctacatttacagtgattttcgtcctcgttgaagctaccttgcttctgagtcaggttgctccattcctccacctattcacggcagccgttgcctcataccaaaagctgcgtgcagacatcgaccgtcagccgcaaattgatgctactacagagtccggcattcgcctctcacaggcagaaggtggattcgaattcaaaaatgtctctttcacttatccctcacgtcccgagatcacagtgcttgaccagatcagcctttccatcccggccaacaagcatactgcccttgttggtctgtctggaagtgggaagtcaaccatcgccggtttggttacaaggctgtacgatcccacggaggggcaggtcctcttcgacggccatgaccttcgtgaggtcaacacccgtgatttgagaagcttccttagtctggtgcagcaggagccgtcgctgctcgatcggtcgcttttggaaaacatcgcacatggcttgatcaattcgagcaatcccagtcatgctcatctgaggacgacacttcttagcaccggcctcacagatctggcagcagaagtcagggaaggtgtggatctcatggctgcggcagagaaacgaggctcggaagttgttgaaattgtcaacctggtgcgaaaggctgcgacgcttgctgatgcagatggcttcatcagtgcactgcagtatgggtacggtacacttgtcggttcaagtgggcgactgatcagtggtggccagaagcaacgcgtttcccttgctagggccctcatcaaggatcctgcggtacttatattggatgaggccacagcctctctcgattcaaggagtgagcagcgtattcagcgggccatctcaaatattgccactggtagaactatgatcacaattgcccatcgtctgtccacaattaccaacgccgacaatattattgttatgcacaagggacatatcgttgaacagggtgatcatgcgacattaatggctaagaacggagcgtacgctgacctagtcaatctgcaaactttgggttccgcccccggcaagaaagaaaagacagctagcgcagacaacgtcagcaagtctgaccaagcctctttatctgacgctggtgttgaggaaagtagtgtctcgaaagatggtctggaaactgccgagaaaaaagaagtcttagcaagtgcagctccagtcaccgagcctgctgaacccgctgaagaggaagaagagcctgaaacccctaagaaatctatgtgggctttgttgcgcgggtatgcgcccacattgagaccccatctgcttttcattttcctcgcacttctaggttctagcattgtcggcggtgccttctctggcgaagccgtgattttcggaaacactgtcggaagtttgaatccctgtcacagtgaaagctatattcggagcgcaggaaacttcttcgggcttatgttcttcgtacttgccattatcgaatttttcgcgaacctggttagctggaccgggtttggctgggtatcagagaaaatcgtctttacagtcagagtcttgtcattccgctcactgtttgagcaagatctccagtggcatcaatctaatggtcggtcacctgccttgctcctctcctacattactcgagacggcaatgccttggcgggactgagcggctccgtcattggaacgttgttctctatcaccgtcaaccttattgcagcaatcattttaactcatattattgcctggagaatcgcattggtttgcctggctttagtaccactcctgcttggagccggtcttatggagcttcacgtccttggcaaattcgaggaacgccatgagaacgcatacaccaagtcagttgacattggtgtagaggcagtcacgtcgatcaagacaattgcatccctttctcttgaagaggacactttgagaacttaccgacgatccctaaaaggaccccgcaaggagacatttcaagtcactcttcatgcaagtctctggcaggcaatgacttacttccttggcaactgcgtcaatgcgttggcctattggtggggttcaaagcagatcatcaatggcaactacacgcaaacacagttcctgattgtagtattctcgctcctggtcagcgcactgctctggagtcagatgtttgcccttgcaccggagctttccgccgcccgagcggcgatggcaaggatcttgggtctgattgagattgggtcggacaagatgcaaggacgcgtaccatctcgttcacccactatctcttcttctgaggagaaagacgttgagacagctgaaacaaaatcggtgtacgtgtctggtaacaaccgggcctcgagcgtacagcttcgcaatatccatttcgcatacccggctcggccggacataaaggtactaaagggcttagacgtcgatattcatcctgggcaattctgcgcccttgtcggaccaagcggtgctggtaaatcaaccatcatttcgctggttgaacggttgtacacgcccgaaaccggatccatcgtgatcgatggcgtcgacgttaccaggcaccgaggcgttgacttccgcgactctatcgctcttgtgccacaagaaagcgtgctttttgagggcagtattgagttcaacattggccttggtgctagaccaggacatgaagcgactatcgaggaaatcaaagaggcatgcaagcttgccaacatccacgacgttatagaggcgctgccagagggctacaagactctttgcggacctaatggtagccagttctcgggaggtcagaagcagaggttgtctattgctcgggcccttgttcggaagcctaagcttctgattctcgatgaatcgaccagcgctttggacgctgaatcggagaagctactgcaagacggactcgaaaaggccgcaaagggcattactgtcattgctatcgcccatcgtcttcacacaattagagcagcagatgtcatcttcttgattgaagggggtaaatgcattgatcgcggatcgcacgaggagttgctcgaaagatcggacagctacagagcaaacgtcatgcatcaaacagtggccacgtga

SEQ ID NO: 7582 - protein, 1327 aa, Aspergillus oryzae
MKLGKKLAGYPSLLLAGNPSKVDIGRLLLGMVASAASGVPFPLIAILFGQLLDDFNAVTCDETESTGSDADYQHDINGKILIIVYLAIAQFVAIYIHLSCWSLNGARLAQRLRETYLQNLLRQEPSFFDDLPPGELASRLNGDIQAIRSGTSEKVGICLSTLSFFITAYVVAFIKDYRLAAMLISLVPAYFLMSFVGSHYIEKYSGRMSDYSATAASIASEALSNTVVVQAFGASYRLEDKFSKALKASEQEGLKKAAAVGIQSGFLYFIAYSANGLAFWQGSRRVADAVGSDTAGATVGATFTVIFVLVEATLLLSQVAPFLHLFTAAVASYQKLRADIDRQPQIDATTESGIRLSQAEGGFEFKNVSFTYPSRPEITVLDQISLSIPANKHTALVGLSGSGKSTIAGLVTRLYDPTEGQVLFDGHDLREVNTRDLRSFLSLVQQEPSLLDRSLLENIAHGLINSSNPSHAHLRTTLLSTGLTDLAAEVREGVDLMAAAEKRGSEVVEIVNLVRKAATLADADGFISALQYGYGTLVGSSGRLISGGQKQRVSLARALIKDPAVLILDEATASLDSRSEQRIQRAISNIATGRTMITIAHRLSTITNADNIIVMHKGHIVEQGDHATLMAKNGAYADLVNLQTLGSAPGKKEKTASADNVSKSDQASLSDAGVEESSVSKDGLETAEKKEVLASAAPVTEPAEPAEEEEEPETPKKSMWALLRGYAPTLRPHLLFIFLALLGSSIVGGAFSGEAVIFGNTVGSLNPCHSESYIRSAGNFFGLMFFVLAIIEFFANLVSWTGFGWVSEKIVFTVRVLSFRSLFEQDLQWHQSNGRSPALLLSYITRDGNALAGLSGSVIGTLFSITVNLIAAIILTHIIAWRIALVCLALVPLLLGAGLMELHVLGKFEERHENAYTKSVDIGVEAVTSIKTIASLSLEEDTLRTYRRSLKGPRKETFQVTLHASLWQAMTYFLGNCVNALAYWWGSKQIINGNYTQTQFLIVVFSLLVSALLWSQMFALAPELSAARAAMARILGLIEIGSDKMQGRVPSRSPTISSSEEKDVETAETKSVYVSGNNRASSVQLRNIHFAYPARPDIKVLKGLDVDIHPGQFCALVGPSGAGKSTIISLVERLYTPETGSIVIDGVDVTRHRGVDFRDSIALVPQESVLFEGSIEFNIGLGARPGHEATIEEIKEACKLANIHDVIEALPEGYKTLCGPNGSQFSGGQKQRLSIARALVRKPKLLILDESTSALDAESEKLLQDGLEKAAKGITVIAIAHRLHTIRAADVIFLIEGGKCIDRGSHEELLERSDSYRANVMHQTVAT

SEQ ID NO: 7583 - DNA, 3912 bp, Aspergillus oryzae
  CDS (1)..(3912)
atgcgtcgtgccacctcgttcggtcgtttgctggtctacggcaacccctcgtcgtccgacctagccctcctcctcgtcggctttatcacttcaattgcctctgggattccctttcctattatgtcgattgtttttggacagctagtggatggactcaactcgtcaacgtgcaacgtcaccccctccaacgccgactcctaccaagcgggcatcaatgacaaaatcctgttgatcgtatacattggtatcgcctatttcgctctcatctacatctacgtcctctgttggaatctctccggcgagcgcctagcccagcgtctgcgagagaagtatttcagcgccatcctgcgccaggatgccgcgttcttcgacaacctacccgcaggagaggtatcctcgcggatcaccggagaaatcgccgtcatacaacaaggctcatcagagaaagtcggaattgtgataaacagtatcgcattcttcatcaccgcatacatagtagccttcatcaaggaccccaaactggccggcatgctggtctccctcaccccagcgtacctgatcatgtctattggcggaggatacttcgtgcagaagtttttcggacgcgcactggagggtatggcgaaggcctcatcggtcgcgctggaggcattctcaaatacaatggttgtgcaagccttttcggcaaacgcccggttggaggagaaatttgttgaagtcttgcatcctgcattgtcggccggcgtttggaaatcgatcgctgctgccactcaggcgggtcttttatacttcattgccttttcggccaatggtctggctttctggcaagggtcgcgacaaatcgcagacgctgtagagtctggaggcgacggcataacggtggggaacacattcacagttattctcatccttgtggatgcgtctttgattctcagtcaggctgccccgtttttgcaaagcttcgacgccgcggccgtagccttcggcaagctggaagccgacatcgatcacccgactaccatcgacggtaccactgaagataccggtcgtgtgctgccagaggttacgggaaatgtggaattacggaacgtctcattcaagtttccgtcccgaccggacaagcccgtgctccaggacctctctttgagctgcccagccggtcaacagacagctattgtcggactgtcaggcagtggaaagtccaccgtcgccgggttgatcacccgattctacaatgtggatgagggcgcggtactgttagatggccacgatgtcaaggatctcaatgtgagatctgtccgtagccatataagtctcgtacaacaggaaccatgtctcttggaccggtccatccttgaaaacatcgcgctgggcctcatcaactctcctagacacgatcacctgcattcgattctgatgggtagtgttctcgcggatgtcgcggcagcagtgcgagacgggaaagatctagtgttggcttctctggagcatggggatggcgcacgagaaattgtggaattagtcctgcacgctgccctgttggccgatgcgaatggtttcattgagcgtttgaaagaaggctttggaacacaagttgggtctaagggcaatctcatcagcggtggacaaaagcaacgcatctccttggcgcgcgctctggtgaaagatccgcgtatcctgatcctggatgaagccacggcatccctcgactcggcgaccgaggcgcgtatccaagaggctctagataacgtggcgatcggccggactgtgattactattgcccatcgtctgtcgactatcaggaatgccgacaatattatcgttatgcgccaagggaagctggtggagcaaggaacccaccagcaactgctagaagccaacggtgcctatgctgagttggtccgtctccagaacctcaacgttcacggcggccaagatgacgaggagacggaggtgagctccgctcgttctggttccttggtgccaatcgttagtgagaagaccggagctcttgagacttctgtgaccgatgccattgacgaagaaaagactaagcctgcaaagactgcggagccagagagtgcgatcgaggaaaagcgaagctttggatcaaccgtaggctccatgggctcccttttccgaccgtacacattcgtgctgatcctggcgatcgctggggctgtgatcatcggcggcacttattgcggatcgtcggtgatcttcggcaacgtcgtgggcaagcttagtggctgcgaggagcctgactccattcgtcatgctggagagctgtttggacttatgttctttgtgctggccattgtcgaattccttgctaacttccttagctggtcgctctttggctgggtggctgagcaagtcatttacaaagtgcgcatactatcgttgcggtctattctcgagcaggatttggcatggcacgagtcagcaaatcgaaacccatcactactgctgtcgttcattacaaaggatagcagtgccctgggtggtctaacaggctctgtggtctgcactatcctttcggttctggttagtctcgtcgcgactattactatgacacacattattgcttggaagattgctctagtatgtctatccgtgatcccactgttgctgggtgccggctacatgcgagtcaccacgctggctagtttcgaggagcgacacctagaggcctttgcaaactccgtgggtatcaccgttgaggccgtcaactcaatcaaaaccatcatgtcgctgtccctggaacatgaagtgcttggcacataccgtcgatcactctcggccccaatgcgccagatcactcgacaaagcgcttgggcgaatttatggcttgccgtcgggtacggactgagtaactttctatatgcactggcgtactggtggggatcaaagaggattatcgcgggtgaatacactcaaacgcagttcttcatcgtgcagctagcactgctcgtcagctctcaactgtggggacagatgttcgccctcgcacccgatgtctcacgcgcattccaggccacacggagactattgaatctgctcgacttggggtcgacaaagaagctatctgcaccacttcagctactgggggatgtcgaagccacggcacctccccgcgagaagagatcctcttctgagtcccgtgacggcatcagtgttgtattcaagcaagttcgcttctcgtaccctgcacggccggacacccgagtgctacacggtctggacttgagcgttcaaccaggacagttcgccgcactcgtaggacccagcggcgcaggcaagtccacaataatctcactcgtcgagcgactatacggacctgactcaggaaccatcgaagtcgacggccacaacatcgcctacagcgacggctcattccgggatgatattgcctatgttcctcaacagagtgtgctgttcgagggcacgatccgattcaatctgaccctaggcgccagaccaggccaaacagtcagccagtctgaactagaggaggcatgtaaactggccaacatccatgacacgatcatgcagctgccagatggatatgatgcctactgtgggccaaacggcgaccggctttctggaggtcagaaacagcgattggcgattgcgcgcgcgctcatccgcaagcctaagcttctgctgctggatgagtcgaccagtgcgcttgatgcagagtcggagagattgctgcaggatgggcttgagaaggccacgaagcatatgaccgttattgcgattgcacatcgactgtatactatccgcaaggcggatgtgatcttcttgattgaggatggtcggtgtgttgaccgaggaactcatgcacagctgatcgagcgcagcgagagttatcgtgtgaatgctctaaaccaggctgtggatggctga

SEQ ID NO: 7584 - protein, 1303 aa, Aspergillus oryzae
MRRATSFGRLLVYGNPSSSDLALLLVGFITSIASGIPFPIMSIVFGQLVDGLNSSTCNVTPSNADSYQAGINDKILLIVYIGIAYFALIYIYVLCWNLSGERLAQRLREKYFSAILRQDAAFFDNLPAGEVSSRITGEIAVIQQGSSEKVGIVINSIAFFITAYIVAFIKDPKLAGMLVSLTPAYLIMSIGGGYFVQKFFGRALEGMAKASSVALEAFSNTMVVQAFSANARLEEKFVEVLHPALSAGVWKSIAAATQAGLLYFIAFSANGLAFWQGSRQIADAVESGGDGITVGNTFTVILILVDASLILSQAAPFLQSFDAAAVAFGKLEADIDHPTTIDGTTEDTGRVLPEVTGNVELRNVSFKFPSRPDKPVLQDLSLSCPAGQQTAIVGLSGSGKSTVAGLITRFYNVDEGAVLLDGHDVKDLNVRSVRSHISLVQQEPCLLDRSILENIALGLINSPRHDHLHSILMGSVLADVAAAVRDGKDLVLASLEHGDGAREIVELVLHAALLADANGFIERLKEGFGTQVGSKGNLISGGQKQRISLARALVKDPRILILDEATASLDSATEARIQEALDNVAIGRTVITIAHRLSTIRNADNIIVMRQGKLVEQGTHQQLLEANGAYAELVRLQNLNVHGGQDDEETEVSSARSGSLVPIVSEKTGALETSVTDAIDEEKTKPAKTAEPESAIEEKRSFGSTVGSMGSLFRPYTFVLILAIAGAVIIGGTYCGSSVIFGNVVGKLSGCEEPDSIRHAGELFGLMFFVLAIVEFLANFLSWSLFGWVAEQVIYKVRILSLRSILEQDLAWHESANRNPSLLLSFITKDSSALGGLTGSVVCTILSVLVSLVATITMTHIIAWKIALVCLSVIPLLLGAGYMRVTTLASFEERHLEAFANSVGITVEAVNSIKTIMSLSLEHEVLGTYRRSLSAPMRQITRQSAWANLWLAVGYGLSNFLYALAYWWGSKRIIAGEYTQTQFFIVQLALLVSSQLWGQMFALAPDVSRAFQATRRLLNLLDLGSTKKLSAPLQLLGDVEATAPPREKRSSSESRDGISVVFKQVRFSYPARPDTRVLHGLDLSVQPGQFAALVGPSGAGKSTIISLVERLYGPDSGTIEVDGHNIAYSDGSFRDDIAYVPQQSVLFEGTIRFNLTLGARPGQTVSQSELEEACKLANIHDTIMQLPDGYDAYCGPNGDRLSGGQKQRLAIARALIRKPKLLLLDESTSALDAESERLLQDGLEKATKHMTVIAIAHRLYTIRKADVIFLIEDGRCVDRGTHAQLIERSESYRVNALNQAVDG

SEQ ID NO: 7585 - DNA, 3975 bp, Emericella nidulans
  CDS (1)..(3975)
atgggggagaaaacagcagaggccgaggccgagaagcccagtctcctcacacgttgcaccacattcacccgtcttctattctatggcagtccctcccttaaggaagccctcgtgttgctcacgggcctaatctccgccatcgcctcggggatccccttccctataatggcgattgtgttcggtcagctcgtcgatgagatgaactcgtcgacgtgcaatgcaacgcccgaaaacgcagactcataccaatccagcatcaacgccaaggtcctgcagatcgtctatattggcatcgcatatttcgtcctcatatacatctatgtcttttgctggaatatttccggagagtggcttgcgcacgggttacgcgaaagatactttcagagtctcttgcgtcaggacgcaggtttcttcgatactttggcgcctggagaggcttcgtcacgtattactggggatatcagtacgatccagcaggggacaagcgagaaggtgggaattgtacttaacagcattgcgttctttgtgacgagttatgtggtcgcgtttatcaaggatgctcggttggccggaatgcttgtctccctcgcgcctgcgtacctgatcatgtcgttggccggagggtattttgtgcggaagtactttgggcgggctctagagtgcatggcggctgcgtcggccgttgctctggaggcgttcagcaatacgatgctcgtgcatgcgttttcggcgggtgggaggcttgaagagcgcttcattgagcacctggggcctgcccgggtcgcgggtattcgcaagtcaatcgcgacagctacgcaggccggcttgctgtacttcattgcgttctcggcaaatgcgctggctttctggcaggggtcgatgaagattgcgggcgcggttgagggaggtgcggatggggtcactgtggggaatacgtatactgtgatcctggtgttggttgatgcgagtttgatactgagccaggttgcgccgttcctgcagagctttgatgcggcagccgtggcgtttaaaaagttggagaaggatatcgagaggccgagtccgattgatggaaccgctgattctggccttgttccggcagcagcaaagatagagtcggatatcgagtttcgcaacgtctcgtttcggttcccttcaaggcctgataaaccgatcctgcaggatctgaccgtgcgcatcccggcaggcaagcagacggcgcttgtcggactgagtggcagcggcaagtcaactgtcgcgggcttgatcacgcggttctatgatgctgaggaagggcaggtgacgattgggggccatgacgtgcgcgagctgaatgtgcggtttctgcgcagtgctattagtcttgtccagcaggaaccttgtctgctcgatcggtcgatactggagaatattgctcttggactggtgaactcctcagcacatgtgcatttgatggatgtgctgaagagcagtgccttggaggatattgccactgctattcgggaaaaaggcttgagtctcaaccacgccattgacttgcaacccagcaacaaagaccagatccgcgagattgtgtccttggtcgaaacagcagctggcctagcagacgcaagcaacttcatcaacaagctcgaccacggctacgcaacaatggtcggatcaagcgggaacctcatcagtgggggccagaagcagcgtatctcgatcgcccgagccttggtcaaaagcccccaaatccttatccttgatgaagccaccgcatctctggattccgctacggaattacgcgtgcaacgggcgttggaggcggcggctgctggacgcactctagtcactatagcccatcggctctcgaccatcaagaaggcggataacattattgtgatgagacagggaaagctcattgagcagggctctcatgcagaacttcttgcggcagatggagcgtatgcagagctggtaaggttgcagaatctcaatgtcaatgcctcgcaggagagtgcgtcttcgtctgctcggccgtcactggacagtacggcgcttgagaaagaaaggaatgcagaggtaacatcggtacaagacgacgaaagctccactccatcccctaaagagaagccagcagacgaagaaccagttactaccgagcgctctgtcggttctacctctaaggccattgcctctctcttccgtccgtactcgctagccctccttgtagccatcatcggtgccgtcgtcatcggaggcacatactgcggttctgctgtcatattcggtaacgttgtgggcaagctaagctcgtgcgagacagcagaatccatccgccacgcgggagaattctgggggctcatgttcttcgtcctggctctgattgagtttttcgcaaacctcatcagctggtccctcttcggctggatcgcggagcagctcatatataaagtccgcgtgctctctctacgttccattctcgagcagaagctggaatggcatgaagcgcgcacaccctccggcctcctatcactcattgtcaaggacagcaacgcgctcaatggcctcacgggatccgtcatttgcacaatcctcagcatcctcgtcaacctcttcgccgccattattatgacccacatcattgcctggagaattgcactcgtttgtctctccgtcgtgccacttctcttgggcgctgggttcatgcgtgtctcaaccttagcccgctttgaggagcgccacaatgacgccttcgcccgctccctgggcataaccgtcgaagccgtgacatccattaagaccgtccacgcgctggccattgagtccgaagttctttccacctaccgccgctccctgcagggccccatgcgcgagataacagggcaatccgccttcaccaacctctggctcgccgtcggttacggcctcagcaacttcgtctatgcgcttgcatactggtggggtgcgaagcagattatcgctggtcactacacccagacacagttcttcattgttcagctggccctgctcgtctcgtctcagctctggggccagatgtttgctttggctcctgatgtgtctcgcgccgtgcaggccacccgccggctcttgaacttgctggacctaggctcaacgaagagactctccgatcccatcttaccccctcactcggcatcaacagatatcgaagcaacctcgcacccatccgaaaaaccccctccccctgatccatcaggcacgcagtccggcctcagcgtctcctttaagcaagttcaattcacctacccggcccgcccagacacccaggtcctacacgggctagatctcaccatctccgcagggcaattcgccgcgctcgttgggccctccggtgctgggaagtcaaccataatatcccttatcgaacgcctctacacacccagttctggaacaatcgagcttggcaaccgcaacatcgcacacatggacgcctccttccgcgacgaggttgcctatgtcccgcaacactccgtccttttcgacgggtccatcaggttcaatcttgaactcggtgcgcggccgaaccaggccctttcacaaactgagattgaggaagcgtgtaagcttgccaatatccacgatacaattgtgtctctaccagacgggtatgacacagccgttggaccgaacggtgacagactaagcggtggtcagaagcagcgtcttgcgattgcaagggcattgctgagaaggccgagactgttgctgctggatgagtcgacgagtgcgctggatgcggagagcgagcggttactgcaggatggcttggagaaggcggcaaggggaatcactgtcattgcaattgctcatcggctgtatacgattcgcaaggcggatgtgatcttcctcattgaagaggggaggtgtgtggaaagggggtcgcatacagaactgatggagaggagtgagagttatcgggttaatgccctgaatcaggctgtggatggctaa

SEQ ID NO: 7586 - protein, 1324 aa, Emericella nidulans
MGEKTAEAEAEKPSLLTRCTTFTRLLFYGSPSLKEALVLLTGLISAIASGIPFPIMAIVFGQLVDEMNSSTCNATPENADSYQSSINAKVLQIVYIGIAYFVLIYIYVFCWNISGEWLAHGLRERYFQSLLRQDAGFFDTLAPGEASSRITGDISTIQQGTSEKVGIVLNSIAFFVTSYVVAFIKDARLAGMLVSLAPAYLIMSLAGGYFVRKYFGRALECMAAASAVALEAFSNTMLVHAFSAGGRLEERFIEHLGPARVAGIRKSIATATQAGLLYFIAFSANALAFWQGSMKIAGAVEGGADGVTVGNTYTVILVLVDASLILSQVAPFLQSFDAAAVAFKKLEKDIERPSPIDGTADSGLVPAAAKIESDIEFRNVSFRFPSRPDKPILQDLTVRIPAGKQTALVGLSGSGKSTVAGLITRFYDAEEGQVTIGGHDVRELNVRFLRSAISLVQQEPCLLDRSILENIALGLVNSSAHVHLMDVLKSSALEDIATAIREKGLSLNHAIDLQPSNKDQIREIVSLVETAAGLADASNFINKLDHGYATMVGSSGNLISGGQKQRISIARALVKSPQILILDEATASLDSATELRVQRALEAAAAGRTLVTIAHRLSTIKKADNIIVMRQGKLIEQGSHAELLAADGAYAELVRLQNLNVNASQESASSSARPSLDSTALEKERNAEVTSVQDDESSTPSPKEKPADEEPVTTERSVGSTSKAIASLFRPYSLALLVAIIGAVVIGGTYCGSAVIFGNVVGKLSSCETAESIRHAGEFWGLMFFVLALIEFFANLISWSLFGWIAEQLIYKVRVLSLRSILEQKLEWHEARTPSGLLSLIVKDSNALNGLTGSVICTILSILVNLFAAIIMTHIIAWRIALVCLSVVPLLLGAGFMRVSTLARFEERHNDAFARSLGITVEAVTSIKTVHALAIESEVLSTYRRSLQGPMREITGQSAFTNLWLAVGYGLSNFVYALAYWWGAKQIIAGHYTQTQFFIVQLALLVSSQLWGQMFALAPDVSRAVQATRRLLNLLDLGSTKRLSDPILPPHSASTDIEATSHPSEKPPPPDPSGTQSGLSVSFKQVQFTYPARPDTQVLHGLDLTISAGQFAALVGPSGAGKSTIISLIERLYTPSSGTIELGNRNIAHMDASFRDEVAYVPQHSVLFDGSIRFNLELGARPNQALSQTEIEEACKLANIHDTIVSLPDGYDTAVGPNGDRLSGGQKQRLAIARALLRRPRLLLLDESTSALDAESERLLQDGLEKAARGITVIAIAHRLYTIRKADVIFLIEEGRCVERGSHTELMERSESYRVNALNQAVDG

SEQ ID NO: 7587 - DNA, 2001 bp, Streptomyces fradiae
  CDS (1)..(2001): transl_table=11
gtgggcgccgtgacgtcgctgcggcgctgtgcgccgtatctgcgcccgcaccgggcgctgatggcgggggcgtgcggggcggccttcgggtcgatgctcgcgggcctggccatgccgctggtgctccagcggctggtcgacgggccggtcgcggagcgggacttctccgccctgccgtggttcatcggcgccttcgccctgctcggcgtcgccgaggccgtgctgctgggggcccggcggctgctcgtcatccgtccggcgacccgcctggagacggcgatgcgggcggacgtggccgcgcacatccagcgcctcccgctgtcgttccacgcccgctggcagtccggccagctgctgtccaggacggtgtccgacatcacggagatcggccggttcgtcgcgttctccgccatctatctggtggtgaacgtggcggcgctcgccgtcggcctggtcgtcctggcgtggctggcgccggcgctcgcgctggtcgtgttcctcgcgtacacgccgatggtggtcgcgaccaccgtcttcgagcagcggttccgggtggtggcgcgggcggcgcaggaggtggggggcgacctgtccaccacggtggaggagtcggtgctcggcgtacgggtgctgaaggtgttcgggcgggcgccggagacggtgcgccgcttcaccgggcaggcgcgccggctgcgcgtcctggagctgcgcaagctctcgtacacggcggccctgtggtgggtcatcacggcgctgccggacctggcgatcgtggcgatgatcgggtacggcgggtacggcgtcgccaccggggcgctgtcgctgggcacgctgatggcggcggtgacggtggccacccatctgcgctggccggcggacacgctgggctggctgacggcggacgcctcgacggccgccgccgcggccgaccggtactggcaggtgcgggacgagccggtgacggtggcggacccggcccggccgcgccccctgccgtcgccggtgcgcggcgagatccgcctggagggcgtgcactacgcctaccccggtggccgcgcggcggcgctgcggggcgtcgacctgacgatccgggcgggcagcacggtggccgtggccggggcgaccgggtccggcaagagcacgctgctgtcgctgctgtcgcggctggacgacccgacgtccgggcggatcaccctggacggggtggacctgcgcgagacggccctggccgacctgcggtcggcggtgtgcaacgcgttcgacgatccggtgctcttctcgggcacggtccgggacaacgtgacgctgggcgtgcgggacgcggaggcgcccggcgcgcgggacgcgggggcccggccggcggacggcggcggggccgggggctccggcggggcgccgggggcggacgccggggccgggacgggggccgggcgggcgccgggcggcggggtgcccgacggcgccgtctgggaggcgctgcggacggtgcgggcggacgagttcgtcgcggcgctgcccgaggggctgtccaccgtgatcggcgaggagggcctcgggctctcgggcggccagcggcagcggctggcgctggcgcgggccatcctgcccggaccgtcggtgctggtgctggacgacgcgctgtcggcgctggacgtacggaccgaacgggaggtggaggccgccctgcgcggggtgctcggccgggtcaccacggtcgtggccgcgcaccggcccggcacgctgcgcctggccgaccaggtggtgttcctctccggcggccgggtcgccgccacgggcacgcacgaggagctgatggcgcgcgagccggcgtaccggctgctggtccggcccccgctcccggtcgcggcgcgggagacgcgggcgcccggccccggggaggcgccgttgcccggcccggcggaggcgccggcggaggcgcaggtgcccgcggagagggcggtggcggaggacggcatggcgggaagggggcggccgggatga

SEQ ID NO: 7588 - protein, 666 aa, Streptomyces fradiae
MGAVTSLRRCAPYLRPHRALMAGACGAAFGSMLAGLAMPLVLQRLVDGPVAERDFSALPWFIGAFALLGVAEAVLLGARRLLVIRPATRLETAMRADVAAHIQRLPLSFHARWQSGQLLSRTVSDITEIGRFVAFSAIYLVVNVAALAVGLVVLAWLAPALALVVFLAYTPMVVATTVFEQRFRVVARAAQEVGGDLSTTVEESVLGVRVLKVFGRAPETVRRFTGQARRLRVLELRKLSYTAALWWVITALPDLAIVAMIGYGGYGVATGALSLGTLMAAVTVATHLRWPADTLGWLTADASTAAAAADRYWQVRDEPVTVADPARPRPLPSPVRGEIRLEGVHYAYPGGRAAALRGVDLTIRAGSTVAVAGATGSGKSTLLSLLSRLDDPTSGRITLDGVDLRETALADLRSAVCNAFDDPVLFSGTVRDNVTLGVRDAEAPGARDAGARPADGGGAGGSGGAPGADAGAGTGAGRAPGGGVPDGAVWEALRTVRADEFVAALPEGLSTVIGEEGLGLSGGQRQRLALARAILPGPSVLVLDDALSALDVRTEREVEAALRGVLGRVTTVVAAHRPGTLRLADQVVFLSGGRVAATGTHEELMAREPAYRLLVRPPLPVAARETRAPGPGEAPLPGPAEAPAEAQVPAERAVAEDGMAGRGRPG

SEQ ID NO: 7589 - DNA, 1668 bp, Streptomyces ribosidificus
  CDS (1)..(1668): transl_table=11
gtgtgcggtctcgtcccgccactgctgatcgccgccggtatcgaccggggcgtccccgcggcaggggacgggcactggacgccgctgatcggcttcacggccgcggcgctggccgccgggctggccaccgcgacgctcaagtactgcttcctccgctactcgggcggcatcgcccaggacttgctgttcgagctacggcaccgggccttcacccatgtgatggatcagccgctggcgttccacgagtcgtacccgtcgggccgagtgatcgcccggctgtccagcgatgtggagtcggtcgaggagatgctggagatgggcctggacgggctgttctccgcgctcttctcgatggtcggcatcctcgccgtgatgctgtggatggaccagccgatggccgcggccatcattgctctgttcgtcccgctgtacgcgctgacgcggtggttccggcaccggtcacggcggtcctaccgctccacccggacggccgtggagggcgtcgtgcagcacacggtcgaggtgtacaacggcatcagggccgtgcaggcgttccgccgcgaggcagccaacgcggcccgtctgcgcggtcttgacgcccggtacgcggtggcgcggagggacgccagctgggtgagcgccgccttcagcggcggcgtgaagctgctcggcaacctgtcgctggcggggctgctgacactgggcgtgttccgcatcgagcagggagcgttggcgatcggtacgctcaccgcgttcctgctgtatgtgtaccggctgtacgatccgatcgacgagctggcaagcttcgccgacgcgttctcggcggcgtcggcggggctggagaagatcagcgcgctgttcatgcgccacccggcggtggccgagccggagcacccggtgtccctgccggccgagccgccgggcggacggggcgccgtacgattcgagggcgtccacttccggtacggcgaggcgggcaggcccgtgctgtccggcgtcgacctggcgctcgaacccggccgtacggtggccctggtgggcacgaccggcgctggcaagtccacgatcgccaagctggtggcacggctctacgaccccacggcgggccgggtcacgctggacggggtggacctgtcggacttggccgacaccgacctgcgcggcgccgtgtcggtgatcacccaggagtcgttcctgttctccgggtcggtcgccgacaacatcgcgctgggccggccggacgcctcgcgcgccgagatccgggcggccgccgaggcggtgggcgcacacgggttcatcagcgcgctgcccgacggctacgacacggatgtgcacaagcgcggtacgggcctgtcggccgggcagcggcagctgatcgccatggcccgcgtgatgctggcatcaccgcgcgtgctgatcctcgacgaggcgacatccagcatggacaccccgtcggagcgggccgtacacgaggcactgacccgtgtcctcacggaccgcaccgcggtgatcatcgcgcaccggctgtccacggtcgccatcgccgaccgcgtcctggtcatcgaggacggtgtggtggtggaggacggcagcccggagcaactgctgcaggcgggcggacggttcgccggcatgcagcggggctggctggccgacaccacggcgtga

SEQ ID NO: 7590 - protein, 555 aa, Streptomyces ribosidificus
MCGLVPPLLIAAGIDRGVPAAGDGHWTPLIGFTAAALAAGLATATLKYCFLRYSGGIAQDLLFELRHRAFTHVMDQPLAFHESYPSGRVIARLSSDVESVEEMLEMGLDGLFSALFSMVGILAVMLWMDQPMAAAIIALFVPLYALTRWFRHRSRRSYRSTRTAVEGVVQHTVEVYNGIRAVQAFRREAANAARLRGLDARYAVARRDASWVSAAFSGGVKLLGNLSLAGLLTLGVFRIEQGALAIGTLTAFLLYVYRLYDPIDELASFADAFSAASAGLEKISALFMRHPAVAEPEHPVSLPAEPPGGRGAVRFEGVHFRYGEAGRPVLSGVDLALEPGRTVALVGTTGAGKSTIAKLVARLYDPTAGRVTLDGVDLSDLADTDLRGAVSVITQESFLFSGSVADNIALGRPDASRAEIRAAAEAVGAHGFISALPDGYDTDVHKRGTGLSAGQRQLIAMARVMLASPRVLILDEATSSMDTPSERAVHEALTRVLTDRTAVIIAHRLSTVAIADRVLVIEDGVVVEDGSPEQLLQAGGRFAGMQRGWLADTTA

SEQ ID NO: 7591 - DNA, 1992 bp, Streptomyces fradiae
  CDS (1)..(1992): transl_table=11
gtgacgtcgctgcggcgctgtgcgccgtatctgcgcccgcaccgggcgctgatggcgggggcgtgcggggcggccttcgggtcgatgctcgcgggcctggccatgccgctggtgctccagcggctggtcgacgggccggtcgcggagcgggacttctccgccctgccgtggttcatcggcgccttcgccctgctcggcgtcgccgaggccgtgctgctgggggcccggcggctgctcgtcatccgtccggcgacccgcctggagacggcgatgcgggcggacgtggccgcgcacatccagcgcctcccgctgtcgttccacgcccgctggcagtccggccagctgctgtccaggacggtgtccgacatcacggagatcggccggttcgtcgcgttctccgccatctatctggtggtgaacgtggcggcgctcgccgtcggcctggtcgtcctggcgtggctggcgccggcgctcgcgctggtcgtgttcctcgcgtacacgccgatggtggtcgcgaccaccgtcttcgagcagcggttccgggtggtggcgcgggcggcgcaggaggtggggggcgacctgtccaccacggtggaggagtcggtgctcggcgtacgggtgctgaaggtgttcgggcgggcgccggagacggtgcgccgcttcaccgggcaggcgcgccggctgcgcgtcctggagctgcgcaagctctcgtacacggcggccctgtggtgggtcatcacggcgctgccggacctggcgatcgtggcgatgatcgggtacggcgggtacggcgtcgccaccggggcgctgtcgctgggcacgctgatggcggcggtgacggtggccacccatctgcgctggccggcggacacgctgggctggctgacggcggacgcctcgacggccgccgccgcggccgaccggtactggcaggtgcgggacgagccggtgacggtggcggacccggcccggccgcgccccctgccgtcgccggtgcgcggcgagatccgcctggagggcgtgcactacgcctaccccggtggccgcgcggcggcgctgcggggcgtcgacctgacgatccgggcgggcagcacggtggccgtggccggggcgaccgggtccggcaagagcacgctgctgtcgctgctgtcgcggctggacgacccgacgtccgggcggatcaccctggacggggtggacctgcgcgagacggccctggccgacctgcggtcggcggtgtgcaacgcgttcgacgatccggtgctcttctcgggcacggtccgggacaacgtgacgctgggcgtgcgggacgcggaggcgcccggcgcgcgggacgcgggggcccggccggcggacggcggcggggccgggggctccggcggggcgccgggggcggacgccggggccgggacgggggccgggcgggcgccgggcggcggggtgcccgacggcgccgtctgggaggcgctgcggacggtgcgggcggacgagttcgtcgcggcgctgcccgaggggctgtccaccgtgatcggcgaggagggcctcgggctctcgggcggccagcggcagcggctggcgctggcgcgggccatcctgcccggaccgtcggtgctggtgctggacgacgcgctgtcggcgctggacgtacggaccgaacgggaggtggaggccgccctgcgcggggtgctcggccgggtcaccacggtcgtggccgcgcaccggcccggcacgctgcgcctggccgaccaggtggtgttcctctccggcggccgggtcgccgccacgggcacgcacgaggagctgatggcgcgcgagccggcgtaccggctgctggtccggcccccgctcccggtcgcggcgcgggagacgcgggcgcccggccccggggaggcgccgttgcccggcccggcggaggcgccggcggaggcgcaggtgcccgcggagagggcggtggcggaggacggcatggcgggaagggggcggccgggatga

SEQ ID NO: 7592 - protein, 663 aa, Streptomyces fradiae
MTSLRRCAPYLRPHRALMAGACGAAFGSMLAGLAMPLVLQRLVDGPVAERDFSALPWFIGAFALLGVAEAVLLGARRLLVIRPATRLETAMRADVAAHIQRLPLSFHARWQSGQLLSRTVSDITEIGRFVAFSAIYLVVNVAALAVGLVVLAWLAPALALVVFLAYTPMVVATTVFEQRFRVVARAAQEVGGDLSTTVEESVLGVRVLKVFGRAPETVRRFTGQARRLRVLELRKLSYTAALWWVITALPDLAIVAMIGYGGYGVATGALSLGTLMAAVTVATHLRWPADTLGWLTADASTAAAAADRYWQVRDEPVTVADPARPRPLPSPVRGEIRLEGVHYAYPGGRAAALRGVDLTIRAGSTVAVAGATGSGKSTLLSLLSRLDDPTSGRITLDGVDLRETALADLRSAVCNAFDDPVLFSGTVRDNVTLGVRDAEAPGARDAGARPADGGGAGGSGGAPGADAGAGTGAGRAPGGGVPDGAVWEALRTVRADEFVAALPEGLSTVIGEEGLGLSGGQRQRLALARAILPGPSVLVLDDALSALDVRTEREVEAALRGVLGRVTTVVAAHRPGTLRLADQVVFLSGGRVAATGTHEELMAREPAYRLLVRPPLPVAARETRAPGPGEAPLPGPAEAPAEAQVPAERAVAEDGMAGRGRPG

SEQ ID NO: 7593 - DNA, 1785 bp, Streptomyces fradiae
  CDS (1)..(1785): transl_table=11
atgagcggctcggaggacgcgcggtcccgcgcccggcgggacgccctgctgcggatgctgctgtggccgaagcggcggcggctggcggcggccacggcgctggcgctgctggagaacgtgtgcgggctggtgccgccgctgctgatcgccgcggccatcgaccgcggggtgcccgcggcggtggacgggcggtgggcgccgctgatcggctacaccgccgcggcgctggccaccgggctggccacggcgagcgtcaagtactgcttcctgcgctactccgggcggatcgcgcaggacctgctgttcgagctgcggcaccgggcgttcgcccaggtgatggggcagccgctggccttccacgaggcgtacccctcgggccgggtcgtggcccggctgtcgagcgacgtggagtcggtcgaggagatgctggagatgggcctggacggcctgttctccgcgctgttctcgatggtcggcatcctcgccgtgatgctctggctcgaccagccgatggcggcggtggtgatcgcgctgttcgtcccgctgtacgcgctgacgcggtggttccggcaccggtcgcgccgggcctaccggggcacccggacggccgtcgagggcgtcgtgcagcacaccgtcgaggcgtacaacggcgtccgggccgtgcaggccttccgccgcgaggaggcgaacgcgcggcggctggacgggctggacgcccggtacgcggtggcgcgggccgacgccgggctggtgagcgccgtgttcagcggcggtgtgaagctcatcggcaacctgtcgctggtggggctgctgacgctgggggtgctccgcatcgaccaggggcacctggcgctgggcacgctcacggcgttcctgctgtacgtgcaccggctgtacgacccgatcgacgagctggcgagcttcgccaacgcgttctcggcggcctcggccgggctggagaagatcggcgcgctgttcgtgcgccatccggcggtggccgagccggagcgcccggcggcgctgccggccgacccgccgggcggccggggcgccgtgcggttcgagggcgtccacttcggctacggccaggcggcccggccggtcctctcgggcgtcgacctggcgctcgaaccgggccgcacggtcgccctcgtgggtacgaccggcgccgggaagtccaccatcgccaagctggtggcccggctctacgaccccacggcggggcgggtcacgctggacggggtcgacctgcgggagctggccgacgcggagctgcgcggcgccgtctcgatgatcacgcaggaggcgttcctgttctccgggtcggtggccgacaacatcgccctgggccggccggacgcgtcgcgggcggagatccgggccgccgcggaggcggtgggcgcgcacgggttcgtcagcgcgctgccggacggctacgacaccgacgtgcacaagcgcggcacgggcctgtcggccggccagcggcagctgatcgccatggcacgggtgatgctgacctcgccccgcgtgctgatcctcgacgaggcgacgtccagcatggacacctcctcggagcgggccgtgcacgaggcgctgacccgggtcctggccgggcgcaccgcggtgatcatcgcgcaccgcctgtccacggtggccgtcgccgaccgcgtcctggtgatcgaggacggggcggtggtggaggacgggcccccgacgcggctgctggagggcggtgggcgcttcgccggcatgcaccggggctggctggccgccacgacggcgtga

SEQ ID NO: 7594 - protein, 594 aa, Streptomyces fradiae
MSGSEDARSRARRDALLRMLLWPKRRRLAAATALALLENVCGLVPPLLIAAAIDRGVPAAVDGRWAPLIGYTAAALATGLATASVKYCFLRYSGRIAQDLLFELRHRAFAQVMGQPLAFHEAYPSGRVVARLSSDVESVEEMLEMGLDGLFSALFSMVGILAVMLWLDQPMAAVVIALFVPLYALTRWFRHRSRRAYRGTRTAVEGVVQHTVEAYNGVRAVQAFRREEANARRLDGLDARYAVARADAGLVSAVFSGGVKLIGNLSLVGLLTLGVLRIDQGHLALGTLTAFLLYVHRLYDPIDELASFANAFSAASAGLEKIGALFVRHPAVAEPERPAALPADPPGGRGAVRFEGVHFGYGQAARPVLSGVDLALEPGRTVALVGTTGAGKSTIAKLVARLYDPTAGRVTLDGVDLRELADAELRGAVSMITQEAFLFSGSVADNIALGRPDASRAEIRAAAEAVGAHGFVSALPDGYDTDVHKRGTGLSAGQRQLIAMARVMLTSPRVLILDEATSSMDTSSERAVHEALTRVLAGRTAVIIAHRLSTVAVADRVLVIEDGAVVEDGPPTRLLEGGGRFAGMHRGWLAATTA

SEQ ID NO: 7595 - DNA, 1908 bp, Streptoverticillium netropsis
  CDS (1)..(1908): transl_table=11
atggcgcacttgctggatggcatcgacccggacggctacgaccgcgcctacggcgaccgtgagctgacgcgccgcatcgtcccgtacttccgcgggtggggccgtgtcgtggcgttcgtgaccgcggcggtgatcgtggcggcggtcgcgggcagtgccgctcccgttctggtggcccgtaccgtggactcggccgcgggcgacgacggcacggggacggtggcgctgctggtggcggtcatcgtcctcaccggttccgtcgcctggctgttcaccttcctccaacagcgcctcaccggaacactggtcggtgacgtggtgctgaagctgcgcgagcacgccttccacgccgccacgcggcaggacatggcgttctacgacagccaccccaccggcgcgctcgtcagccgggtcaccaacgacacccagtcgttcgccaccctcatcaccatggtcctcggcctgctcggccaggtgctgatgatcctgctgctgatggtggccctgttcgtgatcaacgtgccgctgggtctgctgaccgctgccgtggccggggtcatcgtcgccgtcagcctcggcttccggcgcgtggcacgcagtgcctcacaacaacaacagcgagccctggccgaggtccacggctatgtgcaggagaccctgcggggcatcgccgtggcgcggaactaccggggcgaggaggccgccgcggcgggactgcgggaggtcaacggacagtggttcagggcgagtgtgcggttgaaccggctcttcagcggcgtcttccccctgctgatctccctgaccgggctgggtaccgtcgcggtggtcctggtgggcgggcacgccgtggaggcgggcggcgtctcggccggtgaatgggtgctgttcctggaggcgttggctctcttctggtccccgctgaccagcatcgcctccttctggaaccagttgcagcagggcctcgcggcgggagagcgcatcttcgcgctgatcgaccgcgagccggcggtgcggcagctccagcagctgcccgtgccccggctgcggggcgacctggaactgcgcgacgtcaccttcggctacagcgcggaccggcccgtgctgaaggaagtcagcctgaagatcgccgcgggtgagaccgtcgctctggtcgggcacaccggcgcgggcaagtccagcgtcgtacgcctgctcatgcgcgcctacgaattccaagggggacgtgtgctggccgacggccaggacgtgcggaccctcgacctcgcgcagtaccggcggtgtctcggggtcgtcacccagacaccgttcctcttctccggcaccgtcgcggacaacatcggcctcggccggccgggcgcggaccgcgcggagatcgaagccgcggcgcacgcggtggcgggcggcgattggctggagcaactgcccgcggggctggacacccccaccgacgaaggcggccgcaacctctccacgggacagcggcagatcatcgcgctggcccgggtcttcctgcagaacgcctcggtgctcatcctcgacgaggccaccgccagcatcgacccgctgaccgaggcacagatccaggagggtctggacgtgctcgccgccgaccgcaccaccatcgtcgtcgcacaccggctgccgaccgtccgcaaggccgaccggatcgtcgtcgtcgacgacgggcgggtgatcgaacagggcgaccacaccaccctgctgcggcggaacggcgcctacagccgcctgtacgaccggtacttccgctaccagcaaccggacgtcgacccggccgacaccccggtcggcggcaacctggatccggcggaggcgaaggagtcccgggcggggacgacacggacggccgacgacgaagagacgggtgcggtcgatgcgtatcaccactga

SEQ ID NO: 7596 - protein, 635 aa, Streptoverticillium netropsis
MAHLLDGIDPDGYDRAYGDRELTRRIVPYFRGWGRVVAFVTAAVIVAAVAGSAAPVLVARTVDSAAGDDGTGTVALLVAVIVLTGSVAWLFTFLQQRLTGTLVGDVVLKLREHAFHAATRQDMAFYDSHPTGALVSRVTNDTQSFATLITMVLGLLGQVLMILLLMVALFVINVPLGLLTAAVAGVIVAVSLGFRRVARSASQQQQRALAEVHGYVQETLRGIAVARNYRGEEAAAAGLREVNGQWFRASVRLNRLFSGVFPLLISLTGLGTVAVVLVGGHAVEAGGVSAGEWVLFLEALALFWSPLTSIASFWNQLQQGLAAGERIFALIDREPAVRQLQQLPVPRLRGDLELRDVTFGYSADRPVLKEVSLKIAAGETVALVGHTGAGKSSVVRLLMRAYEFQGGRVLADGQDVRTLDLAQYRRCLGVVTQTPFLFSGTVADNIGLGRPGADRAEIEAAAHAVAGGDWLEQLPAGLDTPTDEGGRNLSTGQRQIIALARVFLQNASVLILDEATASIDPLTEAQIQEGLDVLAADRTTIVVAHRLPTVRKADRIVVVDDGRVIEQGDHTTLLRRNGAYSRLYDRYFRYQQPDVDPADTPVGGNLDPAEAKESRAGTTRTADDEETGAVDAYHH

SEQ ID NO: 7597 - DNA, 3858 bp, Oryza sativa subsp
  CDS (1)..(3858)
atggccggaggagggggaggcggcggcgatgggggtgggggagcgggtgcgggcggcggcggcggcggcggcgcgaagagggtgccgatgcggcggctgttcacgttcgcggaccggctggacgcggcgctgatggcggtggggggagtggcggccgtggcgaacggggtggcgatgccgttcctcgcgttcctcatcggcgagctcgtcgacgcgttcggcgccgccgaccgcgcccacgtcgtgcacgtcgtctccaagatttctctcagatttacatatgtggcaattggctctggaatagcaggatttcttcaggtgtcatgctggatggtgactggtgaaaggcaagctgcacgcatccgtgggctgtaccttgaggcgatacttagacaagatattacattctttgatttggagacatcaaccggagaagttactgaaaggatgtctagcgacacagtgttgatccaagatgccattggagaaaaagtgggtaagtttctccaactgctatcaacatttcttggtggattcataatagcatttgcaagaggctggcttctgtccctagttatgttgtcaagtatccctcctgttgcacttgctgctgcagccatgtcaattgccatatcaaagctagcaaaccgttcccagctggcctatgctgaagcagggaagctggttgagcagacaataggatcaattagaactgtggtatctttcactggtgagaggagagcaactgacaaatacaatgaattcttaaaaatatcatatagatcagctgttcaccagggcgcggctatgggactcggaattggttcagttatgtttattgttttctgtagctatgggttagcggtatggtacggtgcaaagctgattattgaaaagggttatactgggggatatatcattaatgtattgatggccatcatgagtggtgcaatggcacttggtcagagttctccatgcttaaatgcttttgcatctggacagattgcggcttacaaaatgtttgcaacaatcaatagggaacctgagattgatgccagtgataggagtggccttgtattggagaattttgttggagatgttgagttcaaagatgtccatttcagttaccctgcaaggcctgagcaactgatcttcactggcttctcaattagcattccaagtggcatgacaatggcattggttggtgaaagtggaagcgggaaatctactgtgattagtttggtcgaaaggttctatgacccacaatcaggtgaagttcttttggatggtgttaatatgaaattgctaaatcttagcaggataagacagaaaatagggcttgtcagccaagagcctattcttttcacaactaccatcagagaaaatatagagtatggaaagaaagatgcatcagaggaagaaatcaggagagcaattgtccttgccaatgctgcgaagttcatcgataagctaccaaatggactagatacaatggttggtgagcatggcacacagctatctggtggacagaaacaaagaattgcaattgcaagagcaattttgaaggaccctaggatactacttcttgatgaagctacaagcgcccttgatgctgaatctgagcatgtagttcaggatgcactcaataatatcatggttaacaggaccaccataattgtagcccatcgcctgagcacagtgagaaatgctgatacaatatctgtgctacatcgtggacaacttgtggaacaaggacctcatgctgagttgataaaatattccaatggagcatactatcaacttttacagcttcaagaggtaaacgcgagaaggaatggaacttatgaacttgaccccaataggctatctgatgttgcaaacagactatctgatgttgcaaacagactatctgatgctgcgaacagactatctgatgctggaaattttgtaagtcgacatagcattagaaagctatcctttgagagatctatgagcagacattcgtcactgggtggaagcagaaggaattcacagacatatgcattgactgaagatgaaatcgaagggtgtgatgacacgaagtctggcaagaatgtacttaggcgcttactacaccttcataagcctgaaactgcaatccttctgttaggatgcattgccgcctccgccaatggagctatacttccagtgtttggcctgttgctttcaagtgccatcaacgcattctatgaaccaccacacaaactgcgaaaagattcagtgttctgggcagaaatatacgtgatcttgggtgttgtatccatctttatcataccagtgcaacacactttgttcaacatggcaggtgggaagcttatcgagcgtatacgtgccttatcatttagtcgggttgtttaccaggatattggatggtttgatgaccctctgaacagcagtggcgcaataggtgctaggctatccgcagatgccgcatccgtcaaaagcattgctggagatgttttatcattgatcgttcaaagtataagcactgctcttgtcggcattgtaatagctatgattgcaaactggaagctagcattcatagtcttgtgcttcgttccctgtgtatttgcgcagagttatgctcaatcaaggttaatgaggggatttggtgctgatgcaaaggaaatgtatgaacaagcgagcacaattgctagtgatgccatcagtaacattagaactgtcacttcattctgtgtaggagagaagataattgaaagctaccgaaataaatgcaaaggtcctgtgaagaaaggagtccgtcagggagctataagtggtgtgggttatggattctcatttgccttgctcttctgcttttatgctgtatcgttttatgtcggagcacgctttgtacacaatggaacagctgacgttggggaagtttttaaggtcttctttgctttaacaatgatggctgttggagtttcacaatcgagttctcttgctcgggattttagcaaagtgcaagatgcggcagcctccatttttaagattatagataggaaatccaagatagatgcaagctcagatgatggaatggctccagagaaaattgaggggaatatagagtttcagcatgtgagcttcaagtatccagctcgaactgacgtgcagatcttcacaaatttgtgcttgaggatcccatctggcaaggtacatgtggttctcatgactgttgcgcttgttggtgaaagcggaagcggtaaatcaacagtggtagccttgctagagaggttctatgaccctgactctggcgccatctttctagacggcatggaccttaagaccctcaagctcacctggctcaggcagcagatagggctagtgggccaagaaccggttctcttcaacggcaccatcagagcaaacatcgcctacggcaagcaggatcaggtgtccgaggaggagatcgtcgctgtcgccgaggccgccaacgcccaccgcttcatctcctcgctcccgcacgggtacgacaccagcgtcggcgagcgtggcgtgcagctctccggcgggcagaagcagcggatcgccatcgcgcgggcgatcctcaaggaccccaaggtgttgctcctggacgaggcgacgagcgcgctggactctgagtcggagcgcatcgtgcaggaggctctggacagggtgatggtcgggcggacaacggtgatcgtggcgcaccggctgtcgaccatcaccggcgccgacaagatcgccgtcatcaagaacggcgtcgttgccgaggaaggccggcacgggcggctgctgcgcttgcccggtggagcttatgcgtcccttgttgccttgcagtctagcagttcgtga

SEQ ID NO: 7598 - protein, 1285 aa, Oryza sativa subsp
MAGGGGGGGDGGGGAGAGGGGGGGAKRVPMRRLFTFADRLDAALMAVGGVAAVANGVAMPFLAFLIGELVDAFGAADRAHVVHVVSKISLRFTYVAIGSGIAGFLQVSCWMVTGERQAARIRGLYLEAILRQDITFFDLETSTGEVTERMSSDTVLIQDAIGEKVGKFLQLLSTFLGGFIIAFARGWLLSLVMLSSIPPVALAAAAMSIAISKLANRSQLAYAEAGKLVEQTIGSIRTVVSFTGERRATDKYNEFLKISYRSAVHQGAAMGLGIGSVMFIVFCSYGLAVWYGAKLIIEKGYTGGYIINVLMAIMSGAMALGQSSPCLNAFASGQIAAYKMFATINREPEIDASDRSGLVLENFVGDVEFKDVHFSYPARPEQLIFTGFSISIPSGMTMALVGESGSGKSTVISLVERFYDPQSGEVLLDGVNMKLLNLSRIRQKIGLVSQEPILFTTTIRENIEYGKKDASEEEIRRAIVLANAAKFIDKLPNGLDTMVGEHGTQLSGGQKQRIAIARAILKDPRILLLDEATSALDAESEHVVQDALNNIMVNRTTIIVAHRLSTVRNADTISVLHRGQLVEQGPHAELIKYSNGAYYQLLQLQEVNARRNGTYELDPNRLSDVANRLSDVANRLSDAANRLSDAGNFVSRHSIRKLSFERSMSRHSSLGGSRRNSQTYALTEDEIEGCDDTKSGKNVLRRLLHLHKPETAILLLGCIAASANGAILPVFGLLLSSAINAFYEPPHKLRKDSVFWAEIYVILGVVSIFIIPVQHTLFNMAGGKLIERIRALSFSRVVYQDIGWFDDPLNSSGAIGARLSADAASVKSIAGDVLSLIVQSISTALVGIVIAMIANWKLAFIVLCFVPCVFAQSYAQSRLMRGFGADAKEMYEQASTIASDAISNIRTVTSFCVGEKIIESYRNKCKGPVKKGVRQGAISGVGYGFSFALLFCFYAVSFYVGARFVHNGTADVGEVFKVFFALTMMAVGVSQSSSLARDFSKVQDAAASIFKIIDRKSKIDASSDDGMAPEKIEGNIEFQHVSFKYPARTDVQIFTNLCLRIPSGKVHVVLMTVALVGESGSGKSTVVALLERFYDPDSGAIFLDGMDLKTLKLTWLRQQIGLVGQEPVLFNGTIRANIAYGKQDQVSEEEIVAVAEAANAHRFISSLPHGYDTSVGERGVQLSGGQKQRIAIARAILKDPKVLLLDEATSALDSESERIVQEALDRVMVGRTTVIVAHRLSTITGADKIAVIKNGVVAEEGRHGRLLRLPGGAYASLVALQSSSS

SEQ ID NO: 7599 - DNA, 1947 bp, Actinoplanes teichomyceticus
  CDS (1)..(1947): transl_table=11
gtggacgtggtgttgcgcttcgggggggtgtcgaagaacgatgacgaccccgatccctggcagaccctgatcgggccggggacgctgcgcagagtgctcgcctacttccgcccgcacatcggcaaggtggcgctcttcgttctcgtcgccgcgctggagtcgcttgtcgtcgtcgtagttccgttgttgctgatggaactggtcaacggcggcatcctcaaggacgacgccggggtcgtggcatcgatggccggcctggccgccggcctcgccctggtgggcgcgctgttgcagctggtgtcagcctatatttccgggcagatcgggcagggggtcagctacgacctccgggttcaggcgctgcgtcacgttcagcagctgccgatcgcgttcttcacccgtacccagaccggggtgctggtgggccggctgcacacggaactgatcatggcgcagcaggcgttcagccagctcctgatggcagccaccagcgccgtcacggtgatcctggtgatggccgagctgttctacctgtcatggcttgtcgccgtggtcaccctggtgctgattccgctgttcctcgtgccctggatctacgtgggccgggtgatccggcggcgcaccggacggctgatggacgcgaataccggccttggtggactcctccaggagcggttcaacgttcagggggcgatgctctccaaactcttcggccgtccccgcgaggagatggccgagtacgccgatcgtgccgagcgcatccgccgcatcggcgtgagtctctcggtgtacgggcggctcgccttcgtcatgatggcgctgatggcctcgctcgccacggcgctcgtctacggcatcggtggcgggctcgtgctcgccggggcgttccagctcggcacgctcgtcgccctcgccactctgctcgggcggttgttcgggccgatcacgcagctgtccgggatgcaggaaaccgcgcagaccgtcgtggtgagcttctcccggatcttcgaggtgctcgatctgaaggggctgatcgaggagcgtcccggtgcggtcgcgctcgccaaggacacggcgccggagatcgagttcgacgacgtggcgttccgctatccgaccgccgacgaggtctcgctgcgctcgctggagtacgtacgcgccgaacgggagcgcggggagacgacgccggaggtgctgcgcggtgtcagcctgcacgtgccggccggcaccctcaccgcgctcgtcggcccgtccggcgccggcaagagcacgctcacccacctggtgtcacggctgtacgacccgaccggcggggtcattcgcgtcggtgggcacgatctgcgcgacctcaccttcgactcgctgcgcgaagcggtgggcgtggtcagccaggacgcctacttcttccacgacacgatccggcagaacctgctctacgcccgccccaccgccaccgaggacgaactgatcgaggcatgtcgaggggcccagatctgggacctgatcgcctcgctcccgggcgggttcgacaccgtcaccggcgatcgtggctaccgcctgtcgggcggcgagaagcaacgcctggccatcgcccggctgctgctgaaggcgccgacgatcgtcgtgctcgacgaagccaccgctcacctggactccgagtccgaggccgccgtgcagcgggcactcaagaccgccctgcacaaccgcacctcgttggtgatcgcccaccggttgtccacgattcgcgaggccgaccagatcctcgtgatcgacgacggacgggtccgggagcgcggaacgcacgacgagctgctggccgaggggggtctgtacgcggagctttaccacacgcagttcgccaaggccggaagcgacgcagccgaaccggcgagcgacgcagccgagctgcaccacagggagcccgagccggtgcacggcggaggatga

SEQ ID NO: 7600 - protein, 648 aa, Actinoplanes teichomyceticus
MDVVLRFGGVSKNDDDPDPWQTLIGPGTLRRVLAYFRPHIGKVALFVLVAALESLVVVVVPLLLMELVNGGILKDDAGVVASMAGLAAGLALVGALLQLVSAYISGQIGQGVSYDLRVQALRHVQQLPIAFFTRTQTGVLVGRLHTELIMAQQAFSQLLMAATSAVTVILVMAELFYLSWLVAVVTLVLIPLFLVPWIYVGRVIRRRTGRLMDANTGLGGLLQERFNVQGAMLSKLFGRPREEMAEYADRAERIRRIGVSLSVYGRLAFVMMALMASLATALVYGIGGGLVLAGAFQLGTLVALATLLGRLFGPITQLSGMQETAQTVVVSFSRIFEVLDLKGLIEERPGAVALAKDTAPEIEFDDVAFRYPTADEVSLRSLEYVRAERERGETTPEVLRGVSLHVPAGTLTALVGPSGAGKSTLTHLVSRLYDPTGGVIRVGGHDLRDLTFDSLREAVGVVSQDAYFFHDTIRQNLLYARPTATEDELIEACRGAQIWDLIASLPGGFDTVTGDRGYRLSGGEKQRLAIARLLLKAPTIVVLDEATAHLDSESEAAVQRALKTALHNRTSLVIAHRLSTIREADQILVIDDGRVRERGTHDELLAEGGLYAELYHTQFAKAGSDAAEPASDAAELHHREPEPVHGGG

SEQ ID NO: 7601 - DNA, 1788 bp, Melittangium lichenicola
  CDS (1)..(1788): transl_table=11
atggaatcgaaacgaggacccggaaggacgccgggcgcgggcaaggcggtgtggcgggcgctcgggtatctgcggcgctatcggttcgacacgatgggggcgttgctgtcgctgctgatggcctcggcggccaacctcgcggcgccccagttcgtgcgtcaggtggtggatgaggggatcgcccacggctcgatgccggcggtgcgcgcggcggtggcggggctggtgggcgtcgccctggtgcgaggggtgtgcaacttcttgcagggctacctcgcggagcgggcctcgcaaggggtggcgttcgacctgcgggactcgctcttcgagcggctgcagcggctgagtttcagctaccacgatcaagcgcagacggggcagctcctcacgcggctgacgaacgacgtggagcaggtgcgcaccttcgtgggcggcggggcggtgcaggtggtggcgtcgctgctcatgctggtgggctgtacggcgctgttgttcatgacgaaccccgtgctcgcgctggcggcgctggccaccatcgcgccggtgctctgggtgctgcggcacttcatgatgaagatggggccgctgttcggccaggtgcaggggaccctgggccggctcaattccatcctgcaggagagtctgcggggcgcgcgcgtggtccgggccttctccggagaggcgcgcgagtcggcgcgctacggccgcgtcaacgaggagtacctgggcctcaacctccagctcatcaccatcatcttcacccacttcccctgggtgttcttcttcgccagcctgggcacgctcgtggtggtgggcgtgggcgggtggttgatcttccatcagtggctgagcatcggggaactgctcgcgttcaacagctacctgggcttcctgctcctgccgctcatcaccctggggttcctggccaatcagatgtcgcgcgcgggcgtgtccgcggtgcgcatcttcgaattgctcgacacctccgtggaggtggtggatcggcccggcgcccaggtgctgccgcccctggagggacgggtggagctgcgggacgtgcgcttccgctacgccgggggcgagcgggacatcctcaagggggtcagcttcgtggtcgagccgggccagttcgtggccatcatcggcaccacgggctcgggcaagagcaccgtcatcaacctgattccccgcttctatgaggtcacgggcggcgcggtgctcatcgatggccgggacgtgcgcgatgtgacgctcgccagcctgcgctcacaggtgggcatcgtgctccaggaggcgacgctcttcgccggcacgttgcgcgagaacatcgcctatggccgtcccagcgccagcctggaggaggtccaggccgcggcggaggcggcccaggcggcggagttcatcgcggcgctgccccagggctatgacacgccggtgggtgaacggggcgtgggactgtcgggagggcagcgccaacgtgtggcgatcgcccgtgcgttgctcacccaaccgcgtctgctcatcctcgacgacagcacctcggcggtggacgcccgcaccgaggcggagatccaacacgcgttggatcggctcatgcggggctcgcagcgcaccgcgatcgtcatcgcccagcggctgagcacggtgcgtgacgccgatcaggtcatcgtgctcgacgagggccgggtggtggcccaggggcggcacgaggaattgctcgcctccagtccgctctacaacgagatcctgggatcgcagctccggccggagcagggggaggcggtatga

SEQ ID NO: 7602 - protein, 595 aa, Melittangium lichenicola
MESKRGPGRTPGAGKAVWRALGYLRRYRFDTMGALLSLLMASAANLAAPQFVRQVVDEGIAHGSMPAVRAAVAGLVGVALVRGVCNFLQGYLAERASQGVAFDLRDSLFERLQRLSFSYHDQAQTGQLLTRLTNDVEQVRTFVGGGAVQVVASLLMLVGCTALLFMTNPVLALAALATIAPVLWVLRHFMMKMGPLFGQVQGTLGRLNSILQESLRGARVVRAFSGEARESARYGRVNEEYLGLNLQLITIIFTHFPWVFFFASLGTLVVVGVGGWLIFHQWLSIGELLAFNSYLGFLLLPLITLGFLANQMSRAGVSAVRIFELLDTSVEVVDRPGAQVLPPLEGRVELRDVRFRYAGGERDILKGVSFVVEPGQFVAIIGTTGSGKSTVINLIPRFYEVTGGAVLIDGRDVRDVTLASLRSQVGIVLQEATLFAGTLRENIAYGRPSASLEEVQAAAEAAQAAEFIAALPQGYDTPVGERGVGLSGGQRQRVAIARALLTQPRLLILDDSTSAVDARTEAEIQHALDRLMRGSQRTAIVIAQRLSTVRDADQVIVLDEGRVVAQGRHEELLASSPLYNEILGSQLRPEQGEAV

SEQ ID NO: 7603 - DNA, 3981 bp, Aspergillus oryzae
  CDS (1)..(3981)
atgaagctcggcaaaaagcttgcaggctaccccagcctactgctggccggtaatccttcgaaagtcgacatagggaggcttttgttgggtatggtagcttcagcagcgtccggtgtccccttcccattaatcgctattcttttcggtcaactgttagacgacttcaacgccgtaacgtgtgatgaaaccgaatcgacgggttccgatgccgattatcaacatgacattaacggcaaaatcctgatcattgtgtatctggccattgctcaattcgttgcgatttatattcatctttcctgctggagcttgaacggcgctcggctagcgcagagactgcgggaaacgtatcttcaaaacttgcttcgacaagaaccttcattcttcgatgatctacctccgggagaacttgcatctcggcttaatggcgatatccaggcgattcgatctggcacgtcggagaaagtggggatatgcttatcgaccttatcgtttttcatcacggcatatgtcgttgctttcatcaaagactaccggctggcagcaatgttgatttcattagttcccgcctacttcctgatgtcatctgttggaagccattatattgaagaatactctggacgtatgtcggattattccgcaactgccgcatcaatcgcttccgaggcgctctccaacaccgtcgtggtgcaggcctttggcgcgagctaccgactggaagataagttttccaaggcgctcaaggcttcagagcaggaaggcttgaagaaggccgccgccgtgggtatacaatctggattcctgtattttatcgcctattctgcgaatggtctggcattctggcaaggtagtagacgtgttgcggatgcagtaggctcggacactgctggtgccaccgttggcgctacatttacagtgattttcgtcctcgttgaagctaccttgcttctgagtcaggttgctccattcctccacctattcacggcagccgttgcctcataccaaaagctgcgtgcagacatcgaccgtcagccgcaaattgatgctactacagagtccggcattcgcctctcacaggcagaaggtggattcgaattcaaaaatgtctctttcacttatccctcacgtcccgagatcacagtgcttgaccagatcagcctttccatcccggccaacaagcatactgcccttgttggtctgtctggaagtgggaagtcaaccatcgccggtttggttacaaggctgtacgatcccacggaggggcaggtcctcttcgacggccatgaccttcgtgaggtcaacacccgtgatttgagaagcttccttagtctggtgcagcaggagccgtcgctgctcgatcggtcgcttttggaaaacatcgcacatggcttgatcaattcgagcaatcccagtcatgctcatctgaggacgacacttcttagcaccggcctcacagatctggcagcagaagtcagggaaggtgtggatctcatggctgcggcagagaaacgaggctcggaagttgttgaaattgtcaacctggtgcgaaaggctgcgacgcttgctgatgcagatggcttcatcagtgcactgcagtatgggtacggtacacttgtcggttcaagtgggcgactgatcagtggtggccagaagcaacgcgtttcccttgctagggccctcatcaaggatcctgcggtacttatattggatgaggccacagcctctctcgattcaaggagtgagcagcgtattcagcgggccatctcaaatattgccactggtagaactatgatcacaattgcccatcgtctgtccacaattaccaacgccgacaatattattgttatgcacaagggacatatcgttgaacagggtgatcatgcgacattaatggctaagaacggagcgtacgctgacctagtcaatctgcaaactttgggttccgcccccggcaagaaagaaaagacagctagcgcagacaacgtcagccagtctgaccaagcctctttatctgacgctggtgttgaggaaagtagtgtctcgaaagatggtctggaaactgccgagaaaaaagaagtcttagcaagtgcagctccagtcaccgagcctgctgaacccgctgaagaggaagaagagcctgaaacccctaagaaatctatgtgggctttgttgcgcgggtatgcgcccacattgagaccccatctgcttttcattttcctcgcacttctaggttctagcattgtcggcggtgccttctctggcgaagtgattttcggaaacactgtcggaagtttgaatccctgtcacagtgaaagctatattcggagcgcaggaaacttcttcgggcttatgttcttcgtactcgccattatcgaatttttcgcgaacctggttagctggaccgggtttggctgggtatcagagaaaatcgtctttacagtcagagtcttgtcattccgctcactgtttgagcaagatctccagtggcatcaatctaatggtcggtcacctgccttgctcctctcctacattactcgagacggcaatgccttggcgggactgagcggctccgtcattggaacgttgttctctatcaccgtcaaccttattgcagcaatcattttaactcatattattgcctggagaatcgcattggtttgcctggctttagtaccactcctgcttggagccggtcttatggagcttcacgtccttggcaaattcgaggaacgccatgagaacgcatacaccaagtcagttgacattggtgtagaggaagtcacgtcgatcaagacaattgcatccctttctcttgaagaggacactttgagaacttaccgacgatccctaaaaggaccccgcaaggagacatttcaagtcactcttcatgcaagtctctggcaggcaatgacttacttccttggcaactgcgtcaatgcgttggcctattggtggggttcaaagcagatcatcaatggcaactacacgcaaacacagttcctgattgtagtattctcgctcctggtcagcgcactgctctggagtcagatgtttgcccttgcaccggagctttccgccgcccgagcggcgatggcaaggatcttgggtctgattgagattgggtcggacaagatgcaaggacgcgtaccatctcgttcacccactatctcttcttctgaggagaaagacgttgagacagctgaaacaaaatcggtgtacgtgtctggtaacaaccgggcctcgagcgtacagcttcgcaatatccatttcgcatacccggctcgaccggacataaaggtactaaagggcttagacgtcgatattcatcctgggcaattcggcgcccttgtcggaccaagcggtgctggtaaatcaaccatcatttcgctggttgaacggttgtacacgcccgaaaccggatccatcgtgatcgatggcgtcgacgttaccaggcaccgaggcgttgacttccgcgactctatcgctcttgtgccacaagaaagcgtgctttttgagggcagtattgagttcaacattggccttggtgctagaccaggacatgaagcgactatcgaggaaatcaaagaggcatgcaagcttgccaacatccacgacgttatagaggcgctgccagagggctacaagactctttgcggacctaatggtagccagttctcgggaggtcagaagcagaggttgtctattgctcgggcccttgttcggaagcctaagcttctgattctcgatgaatcgaccagcgctttggacgctgaatcggagaagctactgcaagacggactcgaaaaggccgcaaagggcattactgtcattgctatcgcccatcgtcttcacacaattagagcagcagatgtcatcttcttgattgaagggggtaaatgcattgatcgcggatcgcacgaggagttgctcgaaagatcggacagctacagagcaaacgtcatgcatcaaacagtggccacgtga

SEQ ID NO: 7604 - protein, 1326 aa, Aspergillus oryzae
MKLGKKLAGYPSLLLAGNPSKVDIGRLLLGMVASAASGVPFPLIAILFGQLLDDFNAVTCDETESTGSDADYQHDINGKILIIVYLAIAQFVAIYIHLSCWSLNGARLAQRLRETYLQNLLRQEPSFFDDLPPGELASRLNGDIQAIRSGTSEKVGICLSTLSFFITAYVVAFIKDYRLAAMLISLVPAYFLMSSVGSHYIEEYSGRMSDYSATAASIASEALSNTVVVQAFGASYRLEDKFSKALKASEQEGLKKAAAVGIQSGFLYFIAYSANGLAFWQGSRRVADAVGSDTAGATVGATFTVIFVLVEATLLLSQVAPFLHLFTAAVASYQKLRADIDRQPQIDATTESGIRLSQAEGGFEFKNVSFTYPSRPEITVLDQISLSIPANKHTALVGLSGSGKSTIAGLVTRLYDPTEGQVLFDGHDLREVNTRDLRSFLSLVQQEPSLLDRSLLENIAHGLINSSNPSHAHLRTTLLSTGLTDLAAEVREGVDLMAAAEKRGSEVVEIVNLVRKAATLADADGFISALQYGYGTLVGSSGRLISGGQKQRVSLARALIKDPAVLILDEATASLDSRSEQRIQRAISNIATGRTMITIAHRLSTITNADNIIVMHKGHIVEQGDHATLMAKNGAYADLVNLQTLGSAPGKKEKTASADNVSQSDQASLSDAGVEESSVSKDGLETAEKKEVLASAAPVTEPAEPAEEEEEPETPKKSMWALLRGYAPTLRPHLLFIFLALLGSSIVGGAFSGEVIFGNTVGSLNPCHSESYIRSAGNFFGLMFFVLAIIEFFANLVSWTGFGWVSEKIVFTVRVLSFRSLFEQDLQWHQSNGRSPALLLSYITRDGNALAGLSGSVIGTLFSITVNLIAAIILTHIIAWRIALVCLALVPLLLGAGLMELHVLGKFEERHENAYTKSVDIGVEEVTSIKTIASLSLEEDTLRTYRRSLKGPRKETFQVTLHASLWQAMTYFLGNCVNALAYWWGSKQIINGNYTQTQFLIVVFSLLVSALLWSQMFALAPELSAARAAMARILGLIEIGSDKMQGRVPSRSPTISSSEEKDVETAETKSVYVSGNNRASSVQLRNIHFAYPARPDIKVLKGLDVDIHPGQFGALVGPSGAGKSTIISLVERLYTPETGSIVIDGVDVTRHRGVDFRDSIALVPQESVLFEGSIEFNIGLGARPGHEATIEEIKEACKLANIHDVIEALPEGYKTLCGPNGSQFSGGQKQRLSIARALVRKPKLLILDESTSALDAESEKLLQDGLEKAAKGITVIAIAHRLHTIRAADVIFLIEGGKCIDRGSHEELLERSDSYRANVMHQTVAT

SEQ ID NO: 7605 - DNA, 3831 bp, Oryza sativa subsp
  CDS (1)..(3831)
atgtcggagtcgagcagggcgttcggagtgaatgcgtcgtcgtcgtcgtccggcggcggcggcggcggcgaggcggtggctggaacgacggggaagaatggtggcggggggagcgtggcgttccaccggctgttcgcgttcgcggacggcacggacgcggcgctgatgctgctcgggacgctgggcgcggtggcgaacggcgccgcgctgccgttcatgaccgtgctgttcggcggcctcatcgacgccttcggcggcgccgcgggcggcgacgtcgtggcgcgcgtctccgaggtgtcgctccagttcatctacctcgccgtcgcctcggccgccgcgtcgttcatccaggtggcgtgctggatgatcaccggcgagcggcaggcggcgcggatacggagtctgtacctgaggacgatactccggcaggaggtcgccttcttcgacaagcacaccaacaccggcgaggtggtgggcaggatgtccggcgacacggtgctgatccaggacgccatgggggagaaggtgggcaagttcgtccagctcctcgtcacgttcctgggcggcttcggcgtggcgttcgcgcaggggtggctcctcaccctcgtcatgctcgccaccatcccgccgctcgtcctctccggcgccgtcatgtccaatgtcgtcgccaggatggcgtcgctcggccaggccgcctacgccgacgcctccgtcgtcgtcgagcagaccatcggctccatcagaacagttgcgtcgttcaccggcgagaagcaggcggtggcgaagtacagtaggtcactgaagagagcgtacagctccggcgtcagggaggggctcgccgccggcgtgggcatgggcacggtgatggtgctcctcttctgtggctactcattggggatttggtacggtgccaagctgattctggagaagggatacaccggagctcaggtcatgaatgtcatcttcgccgtgctcaccggctcgctagctctaggtcaggcatcaccaagcatgaaagcattcgcgggagggcaggctgcggcatacaagatgtttgagacaatcaacagggagccagagatcgatgcgtacagcgccacaggtaggaagctagatgacattcagggggatatcgagttcagaaacgtttacttttcgtacccgacaaggcccgatgagcaaatattcagagggttctcgcttgccatacagagtggaacaactgttgcattggttggacagagtgggagtggaaaatcaacagtcatcagcttaatcgagcggttttacgaccctcagctcggtgaagttctaattgatggagtgaatctcaaggagttgcagctaaggtggatcagaagtaaaattggccttgtgagccaggagccaatcttgtttgctgctagcattatagataacatagcttatggcagggataatgctacaaatcaggaaattagagctgcagctgagcttgctaatgcctccaaattcattgataaaatgccccagggttttgctactttggttggtgaacatggaacacaattatctggtgggcagaagcaaagaattgccattgccagagcaattctgaaagatccaaggattctactactggatgaagcaaccagcgctttggacaccgaatccgaaaggattgtgcaggaggctcttgacagggtcatgtcaaaccggaccaccgtcatagtcgctcaccgtttgaccactgtcaggaatgctgatactattgctgtcatccatcaaggatcaatagttgaaaaaggttcacaccatgagctcataagtgatccagatggagcgtatagccaattgatacgcttacaggaaaacagtcatgattctgaggatgcaaattaccagaacaagtcaggcaagaagagtgattctgggattcgctcgggcaaacaatcgttttcgtaccagtcgactcctcagagatcatctagggacaacagtaacaatcactcattctcagtatctgctactcctctagaaattgatgtccagggtggttcaccaaagaagatagctgaagaaacaccacaggaagtgcctctcagtcgcctcgcagcgcttaacaaaccagagatcccagtgcttctgcttggttctgttgcttctgctgtcagtggagttatcttcccaatctttgcgatacttttatccaatgtgatcaaagcattttatgagcccccacaagtgctaaagaaggatgctgagttttggtcatcgatgttcttagtgtttggggcagtgtacttcttgtcacttcctattggctcataccttttttcagtggctgggtgtaggttgatcagaaggatcagactgatgacttttgagaaggttgtaaatatggagattgaatggtttgatcatccagaaaactcaagtggatcaatcggagcaaggctatcggccgatgcagcaaaaattagggggcttgtgggtgatgcacttcaactggttgtgcagaatttagcaacattagttgctggtttgttgattgcttttatatcaaactgggagctatctctgatcatcttggcgttgataccactcatcggcgtcaacggatggatccagatgaagtttattcagggattcagtgcagatgcaaagatgatgtatgaagaggcaagccaagtggcaaatgatgcagtgagcagcataaggacagtagcctcattttcagctgaagagaaggtaatggatttgtacaagatgaaatgtgaaggaccactaagaacaggaatcaggacggcgataataagtggtatcggtttcggtgtttctatcttcctgctgtttggagtctatgcagccagcttctatgccggtgctcggcttgtcgaggacaggaaaacaacatttcctaacgttttcagggtgtttcttgctctcacaatggcagcaattggggtgtcacacactagcaacctcacatcagattcttccaaggcaaaatcagctgtatcttctatattcgccatcgtagaccgtaaatctaggattgatccaagtgatgatgctggagtgagcttagaaccactaagaggcgatatcgagttccagcatgtgagcttcagatatcctacacgaccagatgttcagatctttgaagacctgtgcttaacaattcaatctggaaagactgttgctcttgtcggagagagcggtagcgggaaatcgacagcgatatcattgcttcagaggttctatgatccggatgcaggccatatacttctagatggagtggacattcaaaagtttcagctaaggtggctaaggcaacagatgggtctagtgagtcaagaaccagctctgttcaatgacacgattcgcgcaaacatcgcgtatgggaaggaaggggatgcgacagaatcagacatcgtatcctccgcgcaattggcgaatgcgcacaagttcatcagctcattgcatcagggatatgaaaccatggtcggggagcgtggagctcagctatccggagggcagaagcaacgcatcgcgatcgcccgcgccattgtcaaggatcccaagatcctccttctcgatgaagccacgagtgcgctcgacgcagaatcggagcgcgtcgtccaagatgcgctggaccgggtgatgatgaacaggaccacggtgatcgtggcacaccggctgtccacaattcagggcgcagacatgatcgcggtggtgaagaacgggatgatcatcgagaaggggaagcatgatgcattgatcggcatcaaggatggagcttacgcctccctcgtcgccctccatgtttctgctgctgccatttcgtag

SEQ ID NO: 7606 - protein, 1276 aa, Oryza sativa subsp
MSESSRAFGVNASSSSSGGGGGGEAVAGTTGKNGGGGSVAFHRLFAFADGTDAALMLLGTLGAVANGAALPFMTVLFGGLIDAFGGAAGGDVVARVSEVSLQFIYLAVASAAASFIQVACWMITGERQAARIRSLYLRTILRQEVAFFDKHTNTGEVVGRMSGDTVLIQDAMGEKVGKFVQLLVTFLGGFGVAFAQGWLLTLVMLATIPPLVLSGAVMSNVVARMASLGQAAYADASVVVEQTIGSIRTVASFTGEKQAVAKYSRSLKRAYSSGVREGLAAGVGMGTVMVLLFCGYSLGIWYGAKLILEKGYTGAQVMNVIFAVLTGSLALGQASPSMKAFAGGQAAAYKMFETINREPEIDAYSATGRKLDDIQGDIEFRNVYFSYPTRPDEQIFRGFSLAIQSGTTVALVGQSGSGKSTVISLIERFYDPQLGEVLIDGVNLKELQLRWIRSKIGLVSQEPILFAASIIDNIAYGRDNATNQEIRAAAELANASKFIDKMPQGFATLVGEHGTQLSGGQKQRIAIARAILKDPRILLLDEATSALDTESERIVQEALDRVMSNRTTVIVAHRLTTVRNADTIAVIHQGSIVEKGSHHELISDPDGAYSQLIRLQENSHDSEDANYQNKSGKKSDSGIRSGKQSFSYQSTPQRSSRDNSNNHSFSVSATPLEIDVQGGSPKKIAEETPQEVPLSRLAALNKPEIPVLLLGSVASAVSGVIFPIFAILLSNVIKAFYEPPQVLKKDAEFWSSMFLVFGAVYFLSLPIGSYLFSVAGCRLIRRIRLMTFEKVVNMEIEWFDHPENSSGSIGARLSADAAKIRGLVGDALQLVVQNLATLVAGLLIAFISNWELSLIILALIPLIGVNGWIQMKFIQGFSADAKMMYEEASQVANDAVSSIRTVASFSAEEKVMDLYKMKCEGPLRTGIRTAIISGIGFGVSIFLLFGVYAASFYAGARLVEDRKTTFPNVFRVFLALTMAAIGVSHTSNLTSDSSKAKSAVSSIFAIVDRKSRIDPSDDAGVSLEPLRGDIEFQHVSFRYPTRPDVQIFEDLCLTIQSGKTVALVGESGSGKSTAISLLQRFYDPDAGHILLDGVDIQKFQLRWLRQQMGLVSQEPALFNDTIRANIAYGKEGDATESDIVSSAQLANAHKFISSLHQGYETMVGERGAQLSGGQKQRIAIARAIVKDPKILLLDEATSALDAESERVVQDALDRVMMNRTTVIVAHRLSTIQGADMIAVVKNGMIIEKGKHDALIGIKDGAYASLVALHVSAAAIS

SEQ ID NO: 7607 - DNA, 1944 bp, Streptomyces toyocaensis
  CDS (1)..(1944): transl_table=11
atggtcatgatgccgtccatcgggggggcgctgagggccggcggaggtgctgatcccgagccgtccaggatcagccccggcacgtcccgcagagtgatcgcctaccttcgcccgcacagcggaaagatcgcggtcttcgtcgtcgtcgccgtcctggagtcgctcatcgtggtggcgactccgctgttgctcaagcagatcgtcgacgaggggatcctcaagcacgactccaaaaccgtcaccctgctggcctgcctcaccgccgggctcgccgtcctcgacgcgttactgcagctggcgctcgcctacatcgccggtgcgatcgggcagggggtcagctacgacctccggatccgggcgatcggtcacgtccagcggctgccggtcgcgttcttcacccgcacccagaccggggtcctggtcggacggctccacacggacctgatcatgacgcagcaggccttcagccagctgctgatggcggtcaccggcgcggtctcggtcgtcctggtgatggccgagctgttctacctgtcgtggctcgtcgccctcatcacgctggtgctgatcccgctgttcctcattccctgggtgtacgtgggccgagtgatacagcggcacaccaggcagtcgatggaggtgaacgccggcctggccggcctgctgcaggagcggttcaacgtgcagggggcgatgctctccaagctcttcggccgtccgcacgaggagatggccgagtacgaggaccggtcgcgcaagctccgccggatcggggtgaacgtcgtcgtcttcagccggatggccttcatcatcatggcgctgatggcctcgctcgccacggcgctcacctacggggtcggcggcggcctcgtgctctccgggaccttccagctcggcacgctggtcgctctcgccaccctgctggggcggctgttcgggccgatcacccagctctccgggatgcaggcgaacgcggtgatcgtcctggtgagcttcgaccggatcttcgagctcctcgacctgaagccgctgatcgaggaacgctccgacgccgtcgtgctcaggagcgacacagccccggagatcgagttcgaggacgtgtcgttccgctatccgggtgcggacgaggtctcgctgccgtcgctggagcagaacgtgcgtggcggacgggagccgggggaggcgacgccggaggtcctgcgccacgtgagcctgcatgcgccggccggaaccctcaccgcactcgtcggcccgtccggcgcggggaagagcactctcacccacctggtgtcccggctgtacgacccgacctccggcaccgtccgtgtcggcggactcgatctgcgggatctctccttcgcctcgctgcacgagacggtgggcgtggtcagccaggacacctacctcttccacgacaccattcgggagaaccttcgctacgcccgtccgagcgccatggaggacgaggtgatcgaggcgtgcaagggggcccagatctgggacctgatcgaatccctcccgagagggctcgacaccgtcgtgggagaccgcggctaccggctgtcgggcggggagaagcagcgactggccatcgcgaggctgctgctgaaggcgccctcggtcgtcgtgctcgacgaggccaccgctcacctggactccgagtcggaggccgccgtccagcgggccctcaggaccgcgctgcgcgaccgcacctctctggtgatcgcccaccggttgtccacgatccgcgaggccgatcagatcgtcgtgatcgacgacggaggcgtccgtgagcgcgggacgcacgaggagctgctggccgagggcggcctctacgcggagctgtaccacacgcagttcgccaattcgggtggcgacggagccgcgcccgaaggcgacggggccgggccggtcccccagatggctgctgaagggggacgatga

SEQ ID NO: 7608 - protein, 647 aa, Streptomyces toyocaensis
MVMMPSIGGALRAGGGADPEPSRISPGTSRRVIAYLRPHSGKIAVFVVVAVLESLIVVATPLLLKQIVDEGILKHDSKTVTLLACLTAGLAVLDALLQLALAYIAGAIGQGVSYDLRIRAIGHVQRLPVAFFTRTQTGVLVGRLHTDLIMTQQAFSQLLMAVTGAVSVVLVMAELFYLSWLVALITLVLIPLFLIPWVYVGRVIQRHTRQSMEVNAGLAGLLQERFNVQGAMLSKLFGRPHEEMAEYEDRSRKLRRIGVNVVVFSRMAFIIMALMASLATALTYGVGGGLVLSGTFQLGTLVALATLLGRLFGPITQLSGMQANAVIVLVSFDRIFELLDLKPLIEERSDAVVLRSDTAPEIEFEDVSFRYPGADEVSLPSLEQNVRGGREPGEATPEVLRHVSLHAPAGTLTALVGPSGAGKSTLTHLVSRLYDPTSGTVRVGGLDLRDLSFASLHETVGVVSQDTYLFHDTIRENLRYARPSAMEDEVIEACKGAQIWDLIESLPRGLDTVVGDRGYRLSGGEKQRLAIARLLLKAPSVVVLDEATAHLDSESEAAVQRALRTALRDRTSLVIAHRLSTIREADQIVVIDDGGVRERGTHEELLAEGGLYAELYHTQFANSGGDGAAPEGDGAGPVPQMAAEGGR

SEQ ID NO: 7609 - DNA, 3942 bp, Venturia inaequalis
  CDS (1)..(3942)
  misc_feature (1674)..(1674): y is t or c
atgttctttggaaagcttgctggctaccccaagctgcttgtggctggggatgcctcaaagatcgacattggcactctcgtactgggtacaatctgctccatagcgtctggggtgcctttccctttgattgggattctgttcggccagctcctcgacgacttcaatgcagctacttgcaaaaccccggacacgacgactggatccggggaccaatccgatatcaatggcaagatcctgataatcgtgtacctggcaatcgctcaatttgtcctgatatacgtccacctttcttgctggactttgacaggggcacggctcgcccaaagactgcgggaaagatatttgcagaacctgctccgacaagaaccatcatttttcgacaagttacctcctggagaagttgcatctcgactcaatggcgatatccaggcaatccgctcagggacttctgagaaagtcggaatatgcatctcaagtttgtccttctttgttacggcctacgtcgtggccttcatcaaggactacagacttgccgcgatgcttgtctccctggttccagcatacttcttgatgtctttcgtcggaagtcattacattgagaaatatgcagggctcatgtccgatcatgctgcttctgcggcgtcaattgcttcagaggcactttccaacatcgtcgtggtgcaagcttttggcgcgaacgctcggctggagaagaaattctctgaatcactcgaagcatcgaaaaaacaaggattgaagaaagccccggctgttggaatacaatctggattcttgtatttcatttcctactcggcgaacggtctcgcgttctggcaaggcagcaaacggattgcggatgcaattcaagacagctctcaaggagctaccgtgggttcgacttttactgcagctaccttgcttctcagtcaagtagctccctttttacacctgttcacgggtgctgttgcttcgtacgaaaagcttcgaggagacattgaccgcgagtccttgattgatgggacttccttgactggtgttcgtctgcccaacgtggaagccggattcgagttcgaggacgtttccttcacgtatccttcccgacctgaaatcaccgttttggaccatttcaacctctccattcctgccaacaagcatactgccattgttggtctctctgggagcggcaaatcgactatcgccggcttggctactagattttacgaccccactggtgggaaaatactgtttggtggtcatgacctctgtcatttgaacgctcgcgatctcagaagcttcatcagcttggtacagcaggagccatctcttctcgaccgatctctgctcgaaaacatagcgcatggcctcatcagttcaagcaatcctgatcacgcccatctcaaaccaataatactaggctcccaacttgcagatctggcacaagatcttcgcgaaggcgaggatctgatgttggcagcggcgaaattgggagcggatgtgcttgaagtcgtcaacttggtgcaaaaggctgcatccctcgctgatgcagatgcttttattgttgcgttacagcacggatacggcacgactgtcggctcaagcgggcgcctcatcagcggcggacagaaacagagagtggcactggcgcgtgctcttgtcaaggaccctgctgtgctyatcttggacgaagccaccgcatcgttggattcaagaagcgaacagaggattcagcgagctatcgcgaatattgcaagtggtagaacggtgatcactattgcccatcgactttcaacgataacgaccgccgaaaacatcgtcgtcatgaacaaaggagtaattttggaacaaggaacacactcggaattgatggccagaaatggtgcgtatgcagacctgattggactgcagacactcaggtctgctggaggcaaaaacgcgtcgacactcagcatcgagagcgccggcaaatctgatctggcatcctcaacagacttgagcatcgagggtagtagtctttcagacgaaactctccacggcaatgagaagattgaggtttcgatatctcatagtcctgtcgctgccccgtccgaaggagaagagccggaacccgagaccccatccaagtcgctttggactttaatcaagggctacgcaccagcaacgaggccacacttgctgatcatcctcgttgccctcctcgcttcaagtattgttggtggagcattttcagccgaggccgtgatcttcggaaacaccgtcggaagcctcaacccatgcaagtctgttgccagtatcctctctcggggcagcttcttcggtctcatgttcttcgtgctcgccctcgtcgagttctttgcgaatctcgtcagctggacagggtttggatgggcatctgagaagattgtgtatacagtgagggtgctgtctttccgatcactgttcgaacaggatctccactggcatcaatctgctggtcggacgcctgctatgctcctgtcttatattactagagatggtgatgctttggccggcttgagtggatccatcatcggcactctcttctccatcacaatcaaccttatcgcggcgatcattctcactcacatcattgcctggcgcattgctctggtctgcttggctttggtaccactcctactcggagctggactgatggaacttcgggccctcggcaagttcgaggaaagacatgagactgcctactccaagtatattgatatcggtgtagaggctgtcacatctatcaagacgattgctgctctttctctggaagaacagactttgcagacttatcgccgatcgttgaaagggcctcgagacgagacgttcaaagtcactttgcaagcaagtctctggcaggccacgacatacttcctcggtaatcttgtcaacgcgctagcttactggtggggtgccaaacaaatccttgctggcaattacacccagacgcaattcttgatcgtggtattctcgctccttgtgagcgcacttctctggagtcaaatgttcgcgctcgccccagagctttcgaatgcacgcgcagccatggcgagactactgggcttgattgagctcggttccagcaagatgcaaggtcacgttcatccaccaagcctctccgattcatccaccgagagcggtctcgaggccccaagtgagaagctgccaacaaacaactcagcatcaagtatccagctcaacaacgtccacttctcctacccagcacgcccagacatcaaagttctcaacggtctatccatggacctccgccccggaaaattccacgccatcgtcggcccctcgggcgccggaaaatcaacaatcatctccctaatcgaaagactatacacgccccaatccggcaccatcctcatcgacggcctcaacatcaccacatcccgctccgtcaccttccgcgactccatcgccctagtcccccaagaaagcgtcctcttcgaaggcacaatctccttcaacatcagcctcggcgcccgcccaacccacgccgtaacccaacacgaaatagaagaggcgtgcaaactagccaacatccacgacaccatcgccgccctcccaaacggctacgacaccctctgcggccccaacggcaatcaattctcgggcggccagagacagcgtctcgcgatcgcgggggcgctcgtgcggaaaccgcaggtgctgattttggacgagagtacgagtgcgctggatgcggagagtgagaggttgttgcaggaggggcttgataaggcggcgaggggggtgacggttgtggcgattgcgcatcggttgcatacgattcggagggcggatgttatatttttgattgagggtggggtttgtgtggggagggggtcgcatgaggagttgtttgtttcttcggagagttatagggcgaatgttttgtgtcagactgttgctgagtag

SEQ ID NO: 7610 - protein, 1313 aa, Venturia inaequalis
MFFGKLAGYPKLLVAGDASKIDIGTLVLGTICSIASGVPFPLIGILFGQLLDDFNAATCKTPDTTTGSGDQSDINGKILIIVYLAIAQFVLIYVHLSCWTLTGARLAQRLRERYLQNLLRQEPSFFDKLPPGEVASRLNGDIQAIRSGTSEKVGICISSLSFFVTAYVVAFIKDYRLAAMLVSLVPAYFLMSFVGSHYIEKYAGLMSDHAASAASIASEALSNIVVVQAFGANARLEKKFSESLEASKKQGLKKAPAVGIQSGFLYFISYSANGLAFWQGSKRIADAIQDSSQGATVGSTFTAATLLLSQVAPFLHLFTGAVASYEKLRGDIDRESLIDGTSLTGVRLPNVEAGFEFEDVSFTYPSRPEITVLDHFNLSIPANKHTAIVGLSGSGKSTIAGLATRFYDPTGGKILFGGHDLCHLNARDLRSFISLVQQEPSLLDRSLLENIAHGLISSSNPDHAHLKPIILGSQLADLAQDLREGEDLMLAAAKLGADVLEVVNLVQKAASLADADAFIVALQHGYGTTVGSSGRLISGGQKQRVALARALVKDPAVLILDEATASLDSRSEQRIQRAIANIASGRTVITIAHRLSTITTAENIVVMNKGVILEQGTHSELMARNGAYADLIGLQTLRSAGGKNASTLSIESAGKSDLASSTDLSIEGSSLSDETLHGNEKIEVSISHSPVAAPSEGEEPEPETPSKSLWTLIKGYAPATRPHLLIILVALLASSIVGGAFSAEAVIFGNTVGSLNPCKSVASILSRGSFFGLMFFVLALVEFFANLVSWTGFGWASEKIVYTVRVLSFRSLFEQDLHWHQSAGRTPAMLLSYITRDGDALAGLSGSIIGTLFSITINLIAAIILTHIIAWRIALVCLALVPLLLGAGLMELRALGKFEERHETAYSKYIDIGVEAVTSIKTIAALSLEEQTLQTYRRSLKGPRDETFKVTLQASLWQATTYFLGNLVNALAYWWGAKQILAGNYTQTQFLIVVFSLLVSALLWSQMFALAPELSNARAAMARLLGLIELGSSKMQGHVHPPSLSDSSTESGLEAPSEKLPTNNSASSIQLNNVHFSYPARPDIKVLNGLSMDLRPGKFHAIVGPSGAGKSTIISLIERLYTPQSGTILIDGLNITTSRSVTFRDSIALVPQESVLFEGTISFNISLGARPTHAVTQHEIEEACKLANIHDTIAALPNGYDTLCGPNGNQFSGGQRQRLAIAGALVRKPQVLILDESTSALDAESERLLQEGLDKAARGVTVVAIAHRLHTIRRADVIFLIEGGVCVGRGSHEELFVSSESYRANVLCQTVAE

SEQ ID NO: 7611 - DNA, 2127 bp, Streptomyces lavendulae
  CDS (1)..(2127): transl_table=11
atgctggtcactcagacccccggtggggtgatgatgaagggcggcgatgattcggagccctccaagatcaggccgggaacatcgcggcgggtactcgcctttgtcaggccccatcggaaaatcgcgatcgccctcattttcgtgaccctcgtcgattccctcgtcatcgtcacgactcccctcctgctcaaggagatcgtcgacagcgggatcatgaaggacgacgcccggctcgtcgtcgtcctggcactgctcgtcgccgcgctcgccctcgccggctccgtcacccagctcgcgcagagcgccctgtccggccgtatcggccagggagtcagctacgacctgcgggtccaggcgttccgccatgtgcagcgcatgccactcgcgttcttcacccgcacccagaccggcgccctctccagccggctcagcaccgacgtggtcatggcccagcaggccctcaccaccctgctgctgtcggcgaccggcgccgtcaccgtcgtactggtcctcgccgagatgttctatctctcctggctcgtcagcctcatcgcgctcgtgctgctgccgctgttcttctttccctggctctacatcggccgccgactccaggcgcattccaggaagcagatggaactgcacgccaacctgagcggaacgattcacgagcgcttcaatgtgcaaggcgccatgctggccaagctgttcggccgtccggccgaggaactggccgactaccaaggcgaagcggagcgcgtacgagaggtcggcgtacgcctcaccatcttcagccgcctcgccttcatcctcatggccctgctcaccgcgctcaccaccgccctggtgtacggcgtcggcggcggactggtactcgacggcgtcatcggactgggcaccctggtggccctggccaccctgctgggccggctgttcggccccatcacccagctctccagcatgcaggccaacgcactgacggtgctgatcagtttcgaccggatcttcgaactgctcgacatcaaaccgctcatcgaggaacgcccggacgccgtcgctctccccgcacccagcagcgcctcggcccccgagatccgcttcgaccaggtgtccttcgcctacccccgccccgaggaggtctcactggcctccctggaaacccactcggccgccggtgaccagcgcagcaagcccgtgccggaggtcctgcacggactggacttcagcgtcgcccccggcacgctcaccgcgctcgtcggcccctccggcgccggcaagaccaccatcacccacctggtgtcccggctgtacgacgtgacctcgggagccgttcgcatcgacggcaaggacgtacgcgacctcaccttcgactccctgcgcgccactgtcggagtcgtcgcccaggacgcgtacctcttccacgacaccatccgggcgaacctcgcctacgcccgccccgaggccaccgaggaggagctgatcgaggcctgcgagcaggcacgcatcctggacctgatccgctccctgcccgacggactcgacacggtcgtcggcgaccgcggcttccggctcttcggcggcgagaagcagcgactggccgtcgcccggctcctgttgaaggcaccggcgatcgtcgttctcgacgaggccaccgcccacctggactccgagtcggaggccgcagtccaacgcgccctcaagacggccctgagcaaccgcacctcgttggtgatcgctcaccggctctccaccgtccgcgaggccgaccagatcctcgtgatcgacgacggccgagtccgcgagaagggcacccacgacgaactcatcgccgccggcggtctctacacccacctccacaacacccagttcagcaagtccgagacgctgcccccgccccgcagcaacggccaccgcgagcaggccgcgccccagggcccgacgggcccgaggatccggacacgcggcggtgccatgggcggcggaatgggtcccggcggcggcttgggaggtggcatgcccggcggcgggatgcccggaggcggcatgggtggtggcggaatgggcggccctggcatgggtggcggccccggtacgcggggcccacgggtacggggcgacggctccccctga

SEQ ID NO: 7612 - protein, 708 aa, Streptomyces lavendulae
MLVTQTPGGVMMKGGDDSEPSKIRPGTSRRVLAFVRPHRKIAIALIFVTLVDSLVIVTTPLLLKEIVDSGIMKDDARLVVVLALLVAALALAGSVTQLAQSALSGRIGQGVSYDLRVQAFRHVQRMPLAFFTRTQTGALSSRLSTDVVMAQQALTTLLLSATGAVTVVLVLAEMFYLSWLVSLIALVLLPLFFFPWLYIGRRLQAHSRKQMELHANLSGTIHERFNVQGAMLAKLFGRPAEELADYQGEAERVREVGVRLTIFSRLAFILMALLTALTTALVYGVGGGLVLDGVIGLGTLVALATLLGRLFGPITQLSSMQANALTVLISFDRIFELLDIKPLIEERPDAVALPAPSSASAPEIRFDQVSFAYPRPEEVSLASLETHSAAGDQRSKPVPEVLHGLDFSVAPGTLTALVGPSGAGKTTITHLVSRLYDVTSGAVRIDGKDVRDLTFDSLRATVGVVAQDAYLFHDTIRANLAYARPEATEEELIEACEQARILDLIRSLPDGLDTVVGDRGFRLFGGEKQRLAVARLLLKAPAIVVLDEATAHLDSESEAAVQRALKTALSNRTSLVIAHRLSTVREADQILVIDDGRVREKGTHDELIAAGGLYTHLHNTQFSKSETLPPPRSNGHREQAAPQGPTGPRIRTRGGAMGGGMGPGGGLGGGMPGGGMPGGGMGGGGMGGPGMGGGPGTRGPRVRGDGSP

SEQ ID NO: 7613 - DNA, 1881 bp, Streptomyces natalensis
  CDS (1)..(1881): transl_table=11
atggtctcgacggacagctctagccacgagtggcgcggcccggcccgccgcacgctggaactgctgcgcccgcaccgtgccccggtgaccgtggcggtcgccctcggcatcggcggcgtcgtcctcaacgcgtcgggtccgatgctcctcggcagggccacggacctcatcttcgacggcatccggcacacccacggatccagaggcatcgacttcgacgcgatcgcccgtgtgctgctgacggcgctcgcgctcttcgccgccgcctccctcctcaccctcctccaggggcggctggtcacggccgtcgtccagcgtgtggtcttcgcactgcgccgttccgtggaggccaagctcgcccgcctgccgctgcggtacttcgaccgccacccggcgggggaggtgctcagccgggtgaccaatgacgtcgacaacctccagcagaccctccagcagaccctcagccagctgatcacggcggcgttctccgtgctgaccatggtggtgctgatgttcgccctctcgccgccgctggccctgatcatgctggcctgcgtaccggtgtcggccgtgatcgcggcccggatcagccggcgcgcacagccgcggttcacccagcagtggtccgcgaccggagcgctcagcgcccatgtcgaggaggtctacaccggacatgcgctggtcaagggcttcgggcggcgcgagcaggccgagcgggtcttcgacgagcacaacgacgccctgtaccgcgccggtgcgagggcccagtgcgtctccggcgccatcgaaccgtcgatgatgttcgtctccaacctcggctatgtcgtcgtggcggtcgtcggcgcgctgcgcgtggtctccggggccctgaccatcggcgacgtccaggcgttcatcctctactcccggcagttcagtcagccgatcgtcgaggtcgccggcatcgccgcccgcctccagtccgccctcgcctccgcgaagcgggtccacgacctcctggacgccgacgaacaaggccccgaccccgagcggcccgcacgcctcccacaggcccgtggacacgtccggttcgacaaggtcggtttccgctactcccccgacctccccctcatcgaggacctctgcctcaccgtcgaacccggacagaccgtggcggtcgtcggtccgaccggcgcgggcaagaccacgctgggcaacctcctcatgcggttctacgaaaccgacgcggggcgcatcctcctggacggcaccgacatcaccaccctgacccgcgaggacctgcgctcccatatcggcctggtgctccaggacgcctggctgttctccggcaccatcgccgagaacatcgcctacgggcgccccgacgcgacgcgcgaggagatcgtggccgccgcccgcgccacctgcgccgaccgcttcatccgcaccctgccggacggctacgacaccgtcctggacgaggagtcggccaacgtcagcgcgggcgagaagcagctcatcaccattgcccgggccttcctggcccggccctcgatcctgctcctggacgaggcgaccagctccgtcgacacccgcacggaagtcctcatccaacgcgcgatgcactcgctgcgcgcgggccgcaccagcttcgtcatagcccaccggctgtccaccatccgcgatgcggacctcatcctcgtcatggaagacggccgcatcgtcgagcgcggcacccacgaccagctcctggccgccgagggggcctacgcccggctgcatgcgaccgcggggcccgatgcgacggcggggcccgatgcgacggcggggcccgatgcgacggcggggcccgatgcgacggcggcgccgcgtacctctggcatttcccccagtctttcctga

SEQ ID NO: 7614 - protein, 626 aa, Streptomyces natalensis
MVSTDSSSHEWRGPARRTLELLRPHRAPVTVAVALGIGGVVLNASGPMLLGRATDLIFDGIRHTHGSRGIDFDAIARVLLTALALFAAASLLTLLQGRLVTAVVQRVVFALRRSVEAKLARLPLRYFDRHPAGEVLSRVTNDVDNLQQTLQQTLSQLITAAFSVLTMVVLMFALSPPLALIMLACVPVSAVIAARISRRAQPRFTQQWSATGALSAHVEEVYTGHALVKGFGRREQAERVFDEHNDALYRAGARAQCVSGAIEPSMMFVSNLGYVVVAVVGALRVVSGALTIGDVQAFILYSRQFSQPIVEVAGIAARLQSALASAKRVHDLLDADEQGPDPERPARLPQARGHVRFDKVGFRYSPDLPLIEDLCLTVEPGQTVAVVGPTGAGKTTLGNLLMRFYETDAGRILLDGTDITTLTREDLRSHIGLVLQDAWLFSGTIAENIAYGRPDATREEIVAAARATCADRFIRTLPDGYDTVLDEESANVSAGEKQLITIARAFLARPSILLLDEATSSVDTRTEVLIQRAMHSLRAGRTSFVIAHRLSTIRDADLILVMEDGRIVERGTHDQLLAAEGAYARLHATAGPDATAGPDATAGPDATAGPDATAAPRTSGISPSLS

SEQ ID NO: 7615 - DNA, 3996 bp, Trichophyton rubrum
  CDS (1)..(3996)
atggttgaagtgagcgagaaaccgaatacccaggatgacggcgtcagcaagcaggaaaatcgaaacccggcttcgtcgtcttcttcaacttccgataaggaaaaggttgctaagaagggaaactcggatgccacaaagagctcgaccccagaggatctagatgctcaacttgcccacctgccggagcatgagcgagagatactcaagcagcaattgttcatcccagatgccaaggctacatacggcacattatttcgatatgcaaccaggaatgatatgatattcctcgccatcgtttctttagcttctattgcagccggtgctgccctaccactatttacagtcctcttcggttccctcgcaggtacatttcgagatattgctctccatagaatcacctatgatgagttcaatagtatattaacgagaaattccctctacttcgtctatcttggaatcgcccaatttattctcctctatgtatccactgtgggtttcatctacgtcggtgagcacatcacccagaagatacgtgcgaaatatctccatgccattctacgccagaacatcggtttcttcgataaacttggggctggagaagttaccactcgcatcaccgcagacacgaatctcatccaagatggaatatcagaaaaggtcggcttgactctaactgccctatcgaccttcttcagcgcctttattatcggatacgtcagatactggaagcttgcactgatctgcagctcgaccattgttgcgatgattctagttatgggtggtatatctaggttcgtggtcaagtctgggaggatgacgttggtaagctatggtgaaggaggcactgttgcagaagaagtcatcagctctatcagaaatgccactgcctttggaacccaagagaaactcgcaaggcagtacgaagtgcatttaaaggaagcgagaaaatggggtcgcaggcttcaaatgatgttgggcatcatgtttggctccatgatggctatcatgtactcaaactacggtctcggattttggatgggatcacgtttccttgtcgggggtgaaacagacctgtctgccatcgtcaacatcctccttgcgattgttatcggatcctttagcattggaaacgttgctcctaatacccaggcttttgcatctgctatttctgccggtgctaagatctttagcaccatcgaccgtgtttccgcaattgacccaggttctgatgagggagataccatcgaaaacgtggagggaaccatcgaattccgtggtattaagcatatctacccatcccgtcctgaagttgttgtcatggaagatatcaaccttgttgttcccaagggcaaaaccactgctcttgttggcccctcaggttccggaaagagtaccgttgttgggttgttggagcgattctataacccagtttctggttccgttcttctggatggccgtgatatcaagaccctcaacctccgatggctccgtcaacaaatttcccttgtcagccaagagcctacgttgttcggaaccactatttttgaaaacatccgattagggttgattgggtccccaatggaaaatgaatccgaggagcaaatcaaggaacggatcgtcagtgcggccaaggaggccaatgctcatgacttcattatggggctgccggatgggtatgcaacggacgtcggtcagcgtggcttccttttatccggtggccagaagcagcgtattgctattgcccgtgccattgtaagcgaccctaagatattattgcttgatgaagccacgtctgctctcgataccaagtctgagggtgtagtacaagccgctcttgatgctgcctcccgaggaagaaccactattgtcatcgcccaccgtttatccaccattaaatctgccgataatattgttgtgattgtcggtggtcgcatcgctgaacaaggtactcatgatgagctcgttgataagaaaggcacataccttcagctcgttgaggctcaaaagatcaatgaggagcgcggtgaagagtctgaggatgaggctgtgctcgaaaaggagaaggaaatctcgcgccagatttctgttcctgcaaagagtgtcaactctggaaaataccctgacgaagatgttgaagccaatcttggacgaattgataccaagaagtccctttcgagcgttatattgtcccaaaaacgtagccaagagaaagaaaccgaatactcgcttggcactttgatacgattcatcgctggattcaacaagcccgagagattgataatgctctgtggattcttctttgccgttctttctggtgctggccagcccgttcaatccgtcttctttgccaagggtatcacaacactttcgctcccgccatcattgtacggtaaactgcgcgaagatgccaatttctggtcccttatgtttttaatgttgggtcttgtccaactggttacccaatccgcgcaaggtgttatctttgctatatgttctgagagtttgatttaccgagcacgcagcaagtccttccgtgcaatgcttcgacaagatattgccttcttcgacctccctgagaacagcactggtgcattaacgtcattcctctcaactgaaaccaagcatctttctggcgtgagtggtgccactctcggaacaatcctgatggttagcaccactcttatcgtggctctgacggttgctctcgcttttggatggaaacttgcccttgtctgcatttctactgtccctgtccttcttctctgcgggttttatcgattctggattctcgcacaattccagacaagagcaaagaaggcatacgagtcttctgcaagctacgcttgtgaagccacttcttctatccgcactgtcgcttctctcactagagaacaaggtgtcatggaaatttacgaaggtcaacttaatgatcaggcaaagaagagtttgagatctgttgcgaaatcctcacttctatatgctgcttcgcaatctttctcattcttctgtcttgctcttggcttctggtatggtggcggccttcttggaaagggagaatataacgcattccaatttttcttgtgtatctcctgcgtcatcttcggctctcagtcagctggaattgtcttttcattctcgcctgatatgggcaaggcaaagagtgcagccgctgatttcaagaggttgtttgaccgcgtgccaacgattgacattgagtcgacagatggcgaaaagcttgaaaccgttgaaggtactattgagttccgcgatgtgcatttcagataccccacacgtccagaacagcctgtcctccgtggcctcaatctcactgtcaagcctggccagtatatcgcactggttgggcctagtggatgtggcaagagtactaccattgctcttgtagaaaggttctacgacacattatctggcggtgtatatatcgatggaaaggacatttcaaggcttaatgttaactcttaccgaagccacctagcactcgttagccaggagccaactctctatcaaggaacaattcgggacaacgttctcctcggagtcgacagggatgatgtccctgatgagcaagtctttgctgcatgcaaggctgcaaacatatatgacttcatcatgtcgctgcccgatggctttggtactgttgttggaagcaagggaagcatgctgtcaggtggacaaaagcaacgtattgcgatcgcccgtgctttaatacgagatccaaaggttctcctcctggacgaggctacatccgcactcgactctgaatccgaaaaggttgttcaagctgcccttgatgcagctgcgaagggtcgaacgactattgctgttgctcaccgactcagcactattcaaaaggcagacattatctatgtcttcgatcagggccgcatcgtcgaaagtggcactcatcacgaactccttcaaaataagggccgatactacgagttggttcatatgcagagcctcgagaaaactcaataa

SEQ ID NO: 7616 - protein, 1331 aa, Trichophyton rubrum
MVEVSEKPNTQDDGVSKQENRNPASSSSSTSDKEKVAKKGNSDATKSSTPEDLDAQLAHLPEHEREILKQQLFIPDAKATYGTLFRYATRNDMIFLAIVSLASIAAGAALPLFTVLFGSLAGTFRDIALHRITYDEFNSILTRNSLYFVYLGIAQFILLYVSTVGFIYVGEHITQKIRAKYLHAILRQNIGFFDKLGAGEVTTRITADTNLIQDGISEKVGLTLTALSTFFSAFIIGYVRYWKLALICSSTIVAMILVMGGISRFVVKSGRMTLVSYGEGGTVAEEVISSIRNATAFGTQEKLARQYEVHLKEARKWGRRLQMMLGIMFGSMMAIMYSNYGLGFWMGSRFLVGGETDLSAIVNILLAIVIGSFSIGNVAPNTQAFASAISAGAKIFSTIDRVSAIDPGSDEGDTIENVEGTIEFRGIKHIYPSRPEVVVMEDINLVVPKGKTTALVGPSGSGKSTVVGLLERFYNPVSGSVLLDGRDIKTLNLRWLRQQISLVSQEPTLFGTTIFENIRLGLIGSPMENESEEQIKERIVSAAKEANAHDFIMGLPDGYATDVGQRGFLLSGGQKQRIAIARAIVSDPKILLLDEATSALDTKSEGVVQAALDAASRGRTTIVIAHRLSTIKSADNIVVIVGGRIAEQGTHDELVDKKGTYLQLVEAQKINEERGEESEDEAVLEKEKEISRQISVPAKSVNSGKYPDEDVEANLGRIDTKKSLSSVILSQKRSQEKETEYSLGTLIRFIAGFNKPERLIMLCGFFFAVLSGAGQPVQSVFFAKGITTLSLPPSLYGKLREDANFWSLMFLMLGLVQLVTQSAQGVIFAICSESLIYRARSKSFRAMLRQDIAFFDLPENSTGALTSFLSTETKHLSGVSGATLGTILMVSTTLIVALTVALAFGWKLALVCISTVPVLLLCGFYRFWILAQFQTRAKKAYESSASYACEATSSIRTVASLTREQGVMEIYEGQLNDQAKKSLRSVAKSSLLYAASQSFSFFCLALGFWYGGGLLGKGEYNAFQFFLCISCVIFGSQSAGIVFSFSPDMGKAKSAAADFKRLFDRVPTIDIESTDGEKLETVEGTIEFRDVHFRYPTRPEQPVLRGLNLTVKPGQYIALVGPSGCGKSTTIALVERFYDTLSGGVYIDGKDISRLNVNSYRSHLALVSQEPTLYQGTIRDNVLLGVDRDDVPDEQVFAACKAANIYDFIMSLPDGFGTVVGSKGSMLSGGQKQRIAIARALIRDPKVLLLDEATSALDSESEKVVQAALDAAAKGRTTIAVAHRLSTIQKADIIYVFDQGRIVESGTHHELLQNKGRYYELVHMQSLEKTQ

SEQ ID NO: 7617 - DNA, 1818 bp, Streptomyces noursei
  CDS (1)..(1818): transl_table=11
atggcctcgccggacgaccttgaggaggagcggaccgcgccccggccggcacgtcggctcgtcggcctgctgcgtccgcaccgccgctccgtggcactcgccgtgtcgatgggcgtcggcgggatcgtgctcaacgcgttcggcccgctgctgctcggccgggtcaccgatctgatcgccgacggcgtgctcggcggcgtcccgggcccggcgcccgggatcgacttcgccgcgatcggccggctgctgctggtcctgctggcgctctacgtcgtggcgtcgctgttcatgctggcgcagggccggctggtggcgtccgcggtgtggcgcaccatccacgaactgcgccgcgacgcccgggagaagctgacccggctgccgctgcgccacttcgaccggcagccggccggtgagctgctcagccgcaccaccaacgacatcgacaacctccaacagaccctccagcagaccctcgccgagctgatcacctcgatcttctcgctgttgacgatgctggtgctgatgctggtgatctcgccgtcgctggccgtggtgatgctgctcagcgtgccggtctcggcgttgatcgcggcccggatcagcaagcgcgcgcagccccactacgccgcgcagtggtccgcgaacggcaccctcaacgcccatgtggaggaggtgtgcaccggtcatgcgctgatcaagggcttcgaccggcgcgcggcggccgaggagcgcttcgacgcctgcaacgacgcggtctaccgggctgcggccaaggcgcagttcgcctccggtgccatggaaccggtcatgatgttcgtcgccaacctcggctatgtgctggtggccgtcatcggcgcctggaaggtcataaacggcaccctgaccctcggtgacgtgcaggcgttcatcctctacgcccgccagttcagccagccgatcgtggagatcgcctcggtggcgggccggctccagtccggcatcgcctccgcccagcgcgtcttcaccctgctcgacgcccccgagcaggccccggacccgctccggcccggcacgcccgcccgcgccgagggccgcgtcgagttcaccgacgtgtccttccgctactcccccgacacgcccctcatcgagaacctctcgctgaccgtggaaccgggcagcaccgtggcgatcgtcggccccaccggcgccggcaaaaccaccctcggcaacctcctgatgcgcttctacgaaccggactccggccgcatcctcctggacggcaccgacaccgcgacgatgacccgcgacgacctgcggtcccgcttcgggctggtgctccaggacacctggctgttcggcggcaccatcgcggagaacatcgcgtacggcgcacccggtgcctgccgtgcggacatcgaggaggcggcccgcgcgacctgtgccgaccgcttcatccgcaccctgccgcagggctacgacaccgtgctggacgacgagtcgggcaccgtcagcgccggcgagaagcagctgctgaccgtggcccgggccttcctcgccagaccggccgtcctcgtgctggacgaggccaccagctccgtggacacccggaccgaggtcctgatccaacgcgccatgaactccctgcgggcgggccggaccagcttcgtgatcgcgcaccgcctgtccacgatccgcgacgcggacctgatcgtcgtgatggacgccggccgcatcgtcgagcagggcacccacgatcaactcctgtgcgcgcagggcctgtacgcccggctgcacgcagcccgcacccacactcccaccgcgggcgccgcggccggctga

SEQ ID NO: 7618 - protein, 605 aa, Streptomyces noursei
MASPDDLEEERTAPRPARRLVGLLRPHRRSVALAVSMGVGGIVLNAFGPLLLGRVTDLIADGVLGGVPGPAPGIDFAAIGRLLLVLLALYVVASLFMLAQGRLVASAVWRTIHELRRDAREKLTRLPLRHFDRQPAGELLSRTTNDIDNLQQTLQQTLAELITSIFSLLTMLVLMLVISPSLAVVMLLSVPVSALIAARISKRAQPHYAAQWSANGTLNAHVEEVCTGHALIKGFDRRAAAEERFDACNDAVYRAAAKAQFASGAMEPVMMFVANLGYVLVAVIGAWKVINGTLTLGDVQAFILYARQFSQPIVEIASVAGRLQSGIASAQRVFTLLDAPEQAPDPLRPGTPARAEGRVEFTDVSFRYSPDTPLIENLSLTVEPGSTVAIVGPTGAGKTTLGNLLMRFYEPDSGRILLDGTDTATMTRDDLRSRFGLVLQDTWLFGGTIAENIAYGAPGACRADIEEAARATCADRFIRTLPQGYDTVLDDESGTVSAGEKQLLTVARAFLARPAVLVLDEATSSVDTRTEVLIQRAMNSLRAGRTSFVIAHRLSTIRDADLIVVMDAGRIVEQGTHDQLLCAQGLYARLHAARTHTPTAGAAAG

SEQ ID NO: 7619 - DNA, 1830 bp, Drosophila melanogaster
  CDS (1)..(1830)
atgggcagatcccagtacggccgcctgctcagcctgactaaatcggagaaatgggtgctgacagcgggcattggctgtctggtagtttcttcagctatcaccatgtcggttcctctgttcctgggcaaggtcattgatgtagtctttaataaatcgggcatggatagcgcagccatggccaaattgggcgagtactcggtgctgctcttcgggatcttcgtgctgggcggattcgccaactttgcccgcgtccatctgtttgggaatgcggctctccgaatagtgcgcagtctaagatcccggctatacagatctatgcttatgcaggaggtgggttggttcgataccaagggcactggagaactaataaatcggctgagcaacgataccttaatggtgggcacctcgttgagccagaacgtatcggatggtctgcgatctgtagccatgatcggcgtcggcacaggcatgatgatctacacctccccccagttggctgccgtgagtgccttggtggttcccgcgatggcgggcatggccatcgtgtacggacgctacgtaaggcggatcaccaaagtagaactagacaagtacgccgagattatgaagtttgcggaggagcgatttggtaatgttaaaacggttaagaccttctgccgagaacaacaggaagtagctgccttcgatggcaaactggatgaagctctccagattggctacaaagagacacgtgccagagctattttctttggattggtaagacctaaaggaaaggtacttaggaaaatcatcaaaatctgttatcccttatttcagactggcttctgtggcaacttcatcattatttcagtgctgtattatggaggaaccttggtattacaagactcgctgacgattggagccctcacagccttcatgctgtacgccggttatgtggccatctcaatgaatgggttgtccaacttctatagccaactgaacaaaggcattggagcctcggagcgtatttgggagatcctggacagggagtgttctatacccattgacaaaggtgtcgtgccgttggagaagccggtgggcgaagttggattccagaatgtattctttacgtttccaactagacctgaatcggccgtcctcaccgacttttcgctaaatttgatgccgggaacaaccacagcggtagtgggtcgttcaggatctggaaagacgacgatagctctgctaatgctccgactatatgacccccaagggggaacagtgcatttggatggcatagatttgcgaacagtgaatccacagtggttgcgaaataacattggtgccgtcagtcaggagccggtgctcttctcgtgctccattcgagagaatattctttatggcgctaatcctggcgaaacaccgagcccggagcgactgcagcaggttattgaagatgcaaatgtcagccagttcaccgaccaactgccggatggactagacacgctcgtcggccaacggggaatgatgctcagtggcggacaaaagcaaagagtagccattgccagggctctaattaagaaccccgctatcctgattttggatgaagctaccagtgcgttggacgccgtttcggaaaatctggtgcagaatgccttagacaatcttatccagggacgcaccgtactgacaattgcccatcgactcagtacaattcgaaatgcggatcaaatcgccgtcttaagcgacggaaaaattgtagagcagggcagctacaacgagcttatgggcatccaggagggcgtcttccgggaactggtggccagccaagcgttcggcagccgaaactaa

SEQ ID NO: 7620 - protein, 609 aa, Drosophila melanogaster
MGRSQYGRLLSLTKSEKWVLTAGIGCLVVSSAITMSVPLFLGKVIDVVFNKSGMDSAAMAKLGEYSVLLFGIFVLGGFANFARVHLFGNAALRIVRSLRSRLYRSMLMQEVGWFDTKGTGELINRLSNDTLMVGTSLSQNVSDGLRSVAMIGVGTGMMIYTSPQLAAVSALVVPAMAGMAIVYGRYVRRITKVELDKYAEIMKFAEERFGNVKTVKTFCREQQEVAAFDGKLDEALQIGYKETRARAIFFGLVRPKGKVLRKIIKICYPLFQTGFCGNFIIISVLYYGGTLVLQDSLTIGALTAFMLYAGYVAISMNGLSNFYSQLNKGIGASERIWEILDRECSIPIDKGVVPLEKPVGEVGFQNVFFTFPTRPESAVLTDFSLNLMPGTTTAVVGRSGSGKTTIALLMLRLYDPQGGTVHLDGIDLRTVNPQWLRNNIGAVSQEPVLFSCSIRENILYGANPGETPSPERLQQVIEDANVSQFTDQLPDGLDTLVGQRGMMLSGGQKQRVAIARALIKNPAILILDEATSALDAVSENLVQNALDNLIQGRTVLTIAHRLSTIRNADQIAVLSDGKIVEQGSYNELMGIQEGVFRELVASQAFGSRN

SEQ ID NO: 7621 - DNA, 1752 bp, Streptococcus pneumoniae
  CDS (1)..(1752): transl_table=11
atgcagaataaacaagaacaatggactgtattgaagcgcttgatgtcttatctcaagccttatggactcctgacctttttggcactcagttttctcctagcgacgacggtcattaaaagtgtcatacccctcgtggcttcccactttatcgaccagtatctcagcaatcttaaccaactagccgttaccgttttgctggtctactatggtctctacatcctacaaactgtagttcagtatgtcggcaatcttctctttgcgcgcgtgtcttacagtattgttagggatattcgtcgggatgcctttgccaatatggagaaactgggcatgtcttactttgacaagacgccagcaggttctatcgtttctcgtttgaccaacgataccgagacgattagtgatatgttttctgggattttatccagctttatctcagcagtttttatctttctgacaaccctttataccatgttggtgctggattttcgtttgacggctttagtcttgctctttcttcctttgattttccttttggtcaatctctatcgaaaaaagtcagtgaaaatcatcgagaaaaccagaagtctcttgtcagatatcaatagtaagctggcagagaatatcgagggaatcaggattattcaggcctttaatcaagagaagcgcctgcaggcagaatttgatgaaatcaaccaagaacacttggtctacgccaaccgttctgtagccttggatgccctctttttgagacctgccatgagtttgctgaaacttctaggctatgcagtcttgatggcctactttggctaccgtggtttttctatcgggataacggtcgggaccatgtatgcctttatccagtacatcaaccgcctttttgaccccttgattgaggtgacgcaaaacttttcaactctgcaaacggctatggtttctgcaggtcgtgtctttgccctgatagacgagaggacctatgaacctcttcaagaaaatgggcaagccaaagtccaagaaggcaatatccgttttgaacatgtgtgtttctcatatgacggtaaacatccgattctggatgacatttctttctctgttaataagggtgaaaccattgcctttgtaggtcatacaggttcagggaaatcgtctattatcaatgtcctcatgcgcttttatgaattccagtcagggagagttctcttggatgatgtggatatcagggatttcagtcaagaagagctgagaaaaaacatcggtttggtcttgcaggaacccttcctctatcatggaactattaagtccaatatcgccatgtaccaagaaaccagtgatgagcaggttcaggctgcggcagcctttgtggatgcagattcctttattcaagaacttcctcaggggtacgactcccctgtttccgagcgtggttcgagcttctctactgggcaacgccagcttcttgcctttgctagaacagtcgccagccagcctaaaatcctgattttggatgaagcgacagccaatattgactctgaaacagaaagcttggttcaagcttctctggcgaagatgagacagggccgaacaactattgctatcgctcaccgcctttctactattcaagatgccaactgcatctatgtcttggataagggacgcattatcgagagtggaacccatgaggaactcttggctctgggaggaacctatcacaagatgtatagtttgcaggcaggggccatggccgatactctttga

SEQ ID NO: 7622 - protein, 583 aa, Streptococcus pneumoniae
MQNKQEQWTVLKRLMSYLKPYGLLTFLALSFLLATTVIKSVIPLVASHFIDQYLSNLNQLAVTVLLVYYGLYILQTVVQYVGNLLFARVSYSIVRDIRRDAFANMEKLGMSYFDKTPAGSIVSRLTNDTETISDMFSGILSSFISAVFIFLTTLYTMLVLDFRLTALVLLFLPLIFLLVNLYRKKSVKIIEKTRSLLSDINSKLAENIEGIRIIQAFNQEKRLQAEFDEINQEHLVYANRSVALDALFLRPAMSLLKLLGYAVLMAYFGYRGFSIGITVGTMYAFIQYINRLFDPLIEVTQNFSTLQTAMVSAGRVFALIDERTYEPLQENGQAKVQEGNIRFEHVCFSYDGKHPILDDISFSVNKGETIAFVGHTGSGKSSIINVLMRFYEFQSGRVLLDDVDIRDFSQEELRKNIGLVLQEPFLYHGTIKSNIAMYQETSDEQVQAAAAFVDADSFIQELPQGYDSPVSERGSSFSTGQRQLLAFARTVASQPKILILDEATANIDSETESLVQASLAKMRQGRTTIAIAHRLSTIQDANCIYVLDKGRIIESGTHEELLALGGTYHKMYSLQAGAMADTL

SEQ ID NO: 7623 - DNA, 1743 bp, Buchnera aphidicola subsp
  CDS (1)..(1743): transl_table=11
atggatcatttaatacaattttggcccattttaaaacgtttaataatttatgcaataccatggaaaaaaaaaataatattagcattttttttacttttaagtggagcaacttctgaagttttaggaccaattttaataagttattttattaataatattttgtctcaacatcaattaaattttcaattaatactaattattatagtgatattcataatgctgcaaatattagcagttttttttaattattttcaaagtattttatttaataaaatagctgtagggattgttaataaactccgaaacgacgtcatgaaagcagcactaaatcaacctatcagtgagtttgactcccaacctattggacaaatgatttcaaaagtaactaatgatactgaagttattaaagagctatatgatactgttggtcctactttctttcgaagtataactttgattataattatattatttgcaatgtttactctcgaatggcatatggcaataataactatttttattattcccttagtaattattgtaatgtcaatatatcaatattatagtactcctttgttaagaaatgtacggtattacgtagctaatattaataataaatttaatgaaactattaacggaatgaatgttattcaacaatttagacaacaaacaagatttgaaaacaatattaaagaaagtagtgaattacattatttagctagaatgaaaatattaaaattagatggttttttgttaagaccactattaagtttattatcagctttagtactttgcagttttatgttcttattcagttatttttctattggagtatacgaagtaggcgtattatatgcttttattacgtatcttggtcgtctcaacgaacctttaatttcaattactattcaacaatctatattacagcaagcaatagtagcaggagaaagaattttttctcttatagattcaccaaaacaaaaatatggaaacaatgaagaagaaataaaaagtggaaaaataaatattaaaaatctcagtttcaaatataaagaaagtggagaaaacatacttaataatattaatatatatattccgtctaaaagttttgttgcatttgtaggtcaaactggaagtgggaaaagtactttagctaacttattaatgggatattatcctataaaacatgggaaaatatacttagatgataaatctattaattgcatatctcatgatgttttacgaaaaaatatattaatggtgcaacaagatccaatagttctagcagataccttctcttctaatattacactgggaaaaaaaatatctgaggaaaagatatggaatgtattaaaaactgttcatctctcttcattagttcaatccatgccaaaagggatatactctattttaggagaagaaggaaataatttatctctcggccaaaaacaattattagctattgcaagaatactagtacgcaatcctaaaatacttatattagatgaagctactgctaacattgattcaggaactgaaaaattaattcaaacaactttgtcttctatacgcgcaaaaacaaccttagttgttatagctcatagattgtcgacagttattgaagcagatatgattgtagtattaaaaaaaggaaaaattgttgaattgggaacacataagcaattattagaaaaaaaaggtttttattggaaaatgtataattttcaactttttaattgctaa

SEQ ID NO: 7624 - protein, 580 aa, Buchnera aphidicola subsp
MDHLIQFWPILKRLIIYAIPWKKKIILAFFLLLSGATSEVLGPILISYFINNILSQHQLNFQLILIIIVIFIMLQILAVFFNYFQSILFNKIAVGIVNKLRNDVMKAALNQPISEFDSQPIGQMISKVTNDTEVIKELYDTVGPTFFRSITLIIIILFAMFTLEWHMAIITIFIIPLVIIVMSIYQYYSTPLLRNVRYYVANINNKFNETINGMNVIQQFRQQTRFENNIKESSELHYLARMKILKLDGFLLRPLLSLLSALVLCSFMFLFSYFSIGVYEVGVLYAFITYLGRLNEPLISITIQQSILQQAIVAGERIFSLIDSPKQKYGNNEEEIKSGKINIKNLSFKYKESGENILNNINIYIPSKSFVAFVGQTGSGKSTLANLLMGYYPIKHGKIYLDDKSINCISHDVLRKNILMVQQDPIVLADTFSSNITLGKKISEEKIWNVLKTVHLSSLVQSMPKGIYSILGEEGNNLSLGQKQLLAIARILVRNPKILILDEATANIDSGTEKLIQTTLSSIRAKTTLVVIAHRLSTVIEADMIVVLKKGKIVELGTHKQLLEKKGFYWKMYNFQLFNC

SEQ ID NO: 7625 - DNA, 1737 bp, Buchnera aphidicola subsp
  CDS (1)..(1737): transl_table=11
atgaataatgttatagatttttggcctacgttaaaacgtctattatattatggcacaaatgtcaaaaaatatctaatactcggatttactttgttgttattttcatctatttttgaagttttaaatccaatacttattagttgttttattaaacattacttcattaacaatacagttaattattcattaaaaattattacatattatttaattctacaaatattagcagctatattaaattatcatcaaaacataatctttaataagatatcccttactgtcattcaaaaattacgttatgatgtaatgtcttctacacttcaacttccaattaaaatgtttgatcaaagaccaataggtcaatttatctctcgaatcacaaacgatactgaaactattaaagaattatatgatactgtaataaaatcattattccaaaatattatattaatattaattaccttaataacgatgtttatactagaatggagaatggcatgcatagcttctattatttttccaatcgcgctaataataatgttattataccaatattttagtaaacctatactcagaaaaataaaagtttatattgctaatatttacaatatatttaacgaaataattaacggaatagatgttattcaacaatttcatcaagaacaaaaatttagaaaatccattaaaaaaattagtatatctcactattactttcgaatgaaaattttaaaattagacagttttttgctacgaccactattaaatttttgttctacactaatattatgtggactaatattaatttttggcatttatccaattggattttttgaaattggaacactatatgcattcattacatatttaaatagattaaatgaacccctaattactataacctcacaacaatctatttttcagcaagctattgtagccggggaaagaatatttgaaataatacatacgcccaaacaacaatatggagatgattcattacattttcgagaaggaaatataaaagtaaaaaatttatatttcagttataccaataataacgtttacgtattaaaaaatattaatatttttattccttctaaacaatttatagcttttgttggaagaactggaagtggaaaaagtacgctatcaaaattattaataggacattatcctgcaacacttggtaaaatttgtttagacgaaagaaacattcaaacatttactcataatgtccttaaaaaaaatatttctattgtgcaacaagatcctataatacttaatgatacaattttagaaaatattactcttggaagaaatatatcaacaaaaaaagttttaaaaattttaaaaacaataaaactaatacaatttgtaaattctttgccaaaaggactaaaaacattattaggcgaaaacggaaatattttatcaattggtcaaaaacaattattatctatcgctagaactttaatttcttgtcctaaaattttaatattagatgaagctacatcaaacgttgatttagatacggaaaacaatataaaaaaaatactatcttctgttaaacatctcacaacaatcatagccataacacatagattatctacaatcaaacacgcagataacattttcgtattcaataatggggaaattgtagaatcaggtactcattacaatttaataagaaaaaaaagctactataagaatatgtattattctcaagcaataaaaaattaa

SEQ ID NO: 7626 - protein, 578 aa, Buchnera aphidicola subsp
MNNVIDFWPTLKRLLYYGTNVKKYLILGFTLLLFSSIFEVLNPILISCFIKHYFINNTVNYSLKIITYYLILQILAAILNYHQNIIFNKISLTVIQKLRYDVMSSTLQLPIKMFDQRPIGQFISRITNDTETIKELYDTVIKSLFQNIILILITLITMFILEWRMACIASIIFPIALIIMLLYQYFSKPILRKIKVYIANIYNIFNEIINGIDVIQQFHQEQKFRKSIKKISISHYYFRMKILKLDSFLLRPLLNFCSTLILCGLILIFGIYPIGFFEIGTLYAFITYLNRLNEPLITITSQQSIFQQAIVAGERIFEIIHTPKQQYGDDSLHFREGNIKVKNLYFSYTNNNVYVLKNINIFIPSKQFIAFVGRTGSGKSTLSKLLIGHYPATLGKICLDERNIQTFTHNVLKKNISIVQQDPIILNDTILENITLGRNISTKKVLKILKTIKLIQFVNSLPKGLKTLLGENGNILSIGQKQLLSIARTLISCPKILILDEATSNVDLDTENNIKKILSSVKHLTTIIAITHRLSTIKHADNIFVFNNGEIVESGTHYNLIRKKSYYKNMYYSQAIKN

SEQ ID NO: 7627 - DNA, 3891 bp, Arabidopsis thaliana
  CDS (1)..(3723)
atgggtaaagaagaggagaaagagagtgggaggaacaagatgaattgttttggaagtgttagatcgatattcatgcacgcggacggtgtagattggttgttgatgggattagggttaatcggagccgtcggtgatggtttcacaactcctcttgttcttctcatcaccagcaagcttatgaacaacatcggtggttcctctttcaacactgataccttcatgcaaagcatctccaagaattctgtagctttgctttatgtggcttgtggatcttgggttgtttgtttccttgagggatattgttggacaagaacaggggagagacaaacagcaagaatgagagaaaagtacttaagggcagttttaagacaagatgtgggttactttgatcttcatgttacaagcacttctgatgttatcactagtgtttctagtgacagttttgtcatccaagacgtcctcagtgaaaaattaccgaattttttgatgagcgcatcaacgttcgttggaagctatatagtcggatttatcttgctatggagactcgccatagttggtttacctttcattgtccttctagtgatcccgggccttatgtatggacgagccctcataagcatttcgaggaagatacgtgaagagtacaatgaggctggtttcgtagctgagcaggcaatctcttcggtccgaaccgtctatgcgttctctggggagaggaagacaatatcaaagttctcaaccgcgcttcaagggtcggtgaagctaggtattaaacaagggcttgctaagggaatcactattggaagcaatggaatcacttttgccatgtgggggttcatgtcttggtatggaagccggatggtcatgtaccatggtgctcagggtggtactgtctttgcagttgctgctgctattgctatcggtggcgtatcacttggtggtggtttgtctaatctcaagtacttctttgaggcggcttcagttggggagcgaatcatggaagtgataaacagagttcccaagattgattcagacaatccagatggccacaagttggagaaaattagaggagaagtagagttcaagaacgtaaagtttgtgtatccatcaaggcttgaaacatcgatctttgatgacttttgtctgagagttccttccgggaaaactgtagctttggttggaggaagcgggtcaggaaaatcgactgttatatctcttttgcaaaggttttatgacccgcttgcaggagagattctcattgatggtgtatccattgataagttacaagtgaagtggttgagatcacaaatgggtctagttagccaagaacctgcccttttcgccacaacgataaaagaaaatatattgtttggtaaagaagatgcatccatggatgatgttgtggaagctgccaaagcctctaatgctcataatttcatttctcagttacctaatggctacgaaactcaggttggagagagaggagtgcaaatgtcaggaggacaaaagcaaaggattgcaatcgcgcgtgcaataatcaaatcaccaactattcttcttctagacgaggcaacaagcgcattggactcggagtcggaaagagtagtccaagaggccttagaaaatgcatcgattggtcgtacaactatccttatcgctcaccgtctctctaccattcgtaatgctgatgttatctccgtggttaagaacggtcacattgtggaaactggatcacacgatgagctaatggaaaacatagacggtcaatactctacacttgttcacttacaacagattgaaaaacaagacatcaacgttagtgtgaaaataggtccaatctcggatccgagcaaagatataagaaatagttctagagtgtcgactcttagccgttcaagctctgctaactcggttacaggtccaagcactataaagaatctttccgaagacaacaagccgcaattaccgtcgtttaagagactattggcaatgaatttaccggaatggaaacaagcattgtatggttgcataagcgcaactttatttggagccatacagccagcttacgcatattctttagggtcgatggtctcggtttattttctaacgagccacgacgagatcaaggagaaaacaaggatctatgcattatcttttgttggcctagccgttctttctttcttgatcaacatcagtcaacactacaattttgcatacatgggtgagtatttgactaaacgtatccgagaacggatgctttctaaggtgttaacgtttgaggtcggttggttcgatagagatgagaactcaagcggcgccatttgctctagactcgcaaaagatgctaatgtggtgagatcgttagtgggtgatcgaatggcattagtggtgcaaaccgtatcggctgttaccatagctttcacgatgggcttggtcatcgcttggaggttagcacttgtgatgattgcggtgcaaccggtgattattgtttgcttctacactcgtcgggttctactcaagagcatgtcgaaaaaagcaatcaaggctcaagatgaaagtagcaaactagcggcagaggcagtttccaacgtccgaaccatcactgcattttcatcacaagaacgtatcatgaaaatgctcgaaaaggcccaagaaagtccgcggagagaaagcattcgccagtcgtggtttgcaggctttgggcttgctatgtcgcagagcctcacgtcgtgtacgtgggctttagatttctggtacggtggtagactgatacaagatgggtacatcacggctaaagctttgttcgagacgtttatgatcttagttagtactggtcgagtcattgccgatgctggaagcatgaccacggatctagctaaaggttcggatgcggtagggtcagttttcgctgtgttggatcggtacacgtcgattgatccggaggatccagatggatatgaaacagaaagaataacgggtcaggttgaatttcttgacgtagatttctcgtacccgactagaccggatgtgattatattcaagaacttctccatcaagatcgaagaggggaagtccacagccattgttggtccaagcgggtcaggtaaatccactataattggcttgatagagcggttctacgacccgttaaagggtatagtgaaaatcgatggtcgcgatataaggtcgtatcatctgagatcacttcgtcgacacatagctttggttagccaagagccaacattgtttgctgggacaatccgagagaacatcatatatggaggagtgtcagataaaatagacgaagcagagatcatcgaggcggcgaaagcagcgaatgctcatgatttcatcacgtcattaacggaagggtatgacacatactgtggagacagaggagtacagttgtctggtggtcaaaaacagaggatcgcgatagctagagcggttttgaaaaacccgtcagtgttgcttctagacgaagcgacaagcgctttggacagccagtcggaacgtgtggtgcaagatgctctcgagcgtgttatggtagggaggacgagtgtggtgatcgcacataggctgagcacaattcagaattgtgatgcaattgctgttttagacaaaggcaaactcgtggaacgtgggactcactcttcattgttgtcaaaaggtcctacaggtatttatttctcattggtgagtcttcagacaacttctggttaacttaaaccatgtcgtttcatcgctaatgaaattatttgtaatcaaataaatgtcaagaagtttaatttttaaagcgggctacgatttaaacactatatatataacaatggaatgtaaaaaagaaaacaaagcttgttaattgaatagaaataaaataaacgttttccc

SEQ ID NO: 7628 - protein, 1240 aa, Arabidopsis thaliana
MGKEEEKESGRNKMNCFGSVRSIFMHADGVDWLLMGLGLIGAVGDGFTTPLVLLITSKLMNNIGGSSFNTDTFMQSISKNSVALLYVACGSWVVCFLEGYCWTRTGERQTARMREKYLRAVLRQDVGYFDLHVTSTSDVITSVSSDSFVIQDVLSEKLPNFLMSASTFVGSYIVGFILLWRLAIVGLPFIVLLVIPGLMYGRALISISRKIREEYNEAGFVAEQAISSVRTVYAFSGERKTISKFSTALQGSVKLGIKQGLAKGITIGSNGITFAMWGFMSWYGSRMVMYHGAQGGTVFAVAAAIAIGGVSLGGGLSNLKYFFEAASVGERIMEVINRVPKIDSDNPDGHKLEKIRGEVEFKNVKFVYPSRLETSIFDDFCLRVPSGKTVALVGGSGSGKSTVISLLQRFYDPLAGEILIDGVSIDKLQVKWLRSQMGLVSQEPALFATTIKENILFGKEDASMDDVVEAAKASNAHNFISQLPNGYETQVGERGVQMSGGQKQRIAIARAIIKSPTILLLDEATSALDSESERVVQEALENASIGRTTILIAHRLSTIRNADVISVVKNGHIVETGSHDELMENIDGQYSTLVHLQQIEKQDINVSVKIGPISDPSKDIRNSSRVSTLSRSSSANSVTGPSTIKNLSEDNKPQLPSFKRLLAMNLPEWKQALYGCISATLFGAIQPAYAYSLGSMVSVYFLTSHDEIKEKTRIYALSFVGLAVLSFLINISQHYNFAYMGEYLTKRIRERMLSKVLTFEVGWFDRDENSSGAICSRLAKDANVVRSLVGDRMALVVQTVSAVTIAFTMGLVIAWRLALVMIAVQPVIIVCFYTRRVLLKSMSKKAIKAQDESSKLAAEAVSNVRTITAFSSQERIMKMLEKAQESPRRESIRQSWFAGFGLAMSQSLTSCTWALDFWYGGRLIQDGYITAKALFETFMILVSTGRVIADAGSMTTDLAKGSDAVGSVFAVLDRYTSIDPEDPDGYETERITGQVEFLDVDFSYPTRPDVIIFKNFSIKIEEGKSTAIVGPSGSGKSTIIGLIERFYDPLKGIVKIDGRDIRSYHLRSLRRHIALVSQEPTLFAGTIRENIIYGGVSDKIDEAEIIEAAKAANAHDFITSLTEGYDTYCGDRGVQLSGGQKQRIAIARAVLKNPSVLLLDEATSALDSQSERVVQDALERVMVGRTSVVIAHRLSTIQNCDAIAVLDKGKLVERGTHSSLLSKGPTGIYFSLVSLQTTSG

SEQ ID NO: 7629 - DNA, 4227 bp, Arabidopsis thaliana
  CDS (1)..(4227)
atgatgatctctagaggtttattcggatggtctccgcctcatatgcaaccattaactccagtctctgaagtctccgagccacctgagtctccttctccttatctcgaccctggtgctgagtctggtggtggcacgggcacggcggcggcgctagcggaggctgatgaagagatggatgatcaagatgagcttgaaccacctcctgctgctgttcctttctctcagctcttcgcttgcgctgaccgctttgattgggtgcttatgattgttggctctgttgctgctgctgctcatggtactgcgcttattgtctacttgcattacttcgccaagattgttgatgttcttgctttctctaatgattctagtcagcagagatctgaacaccagtttgaccgactcgtccagctttcgttgacgatcgtgtacattgctggaggtgttttcatttctggttggattgaggtgtcttgctggatactgactggagaaaggcagactgctgtgatcaggtccaagtatgtccaagtattattgaatcaagatatgagtttctttgatacatatggtaataatggagatattgtgagccaagtgctgagcgatgtcttactcattcagtcagctttaagcgagaaagttggaaattatattcataacatggctacgtttatcagtggacttgttattggatttgtcaactgctgggaaattgcattgattacactagccactggtcctttcatcgttgctgctggaggcatatcaaatatttttctacacagacttgctgagaacatacaggatgcatatgctgaagcagccggcattgctgaacaggcgatctcttacattaggactttatatgcctttacaaatgaaactctagcaaaatattcatatgcaacctcccttcaagcaaccctgagatacggcatattaattagtcttgtgcaaggccttggacttggatttacttatgggcttgctatatgctcgtgtgcgctgcaactttggattggacgattctttgttcacaatggaagggcaaatggtggagaaatcatagcagctctttttgctgttattttaagtggcctggggttaaatcaagctgctacgaacttctactcttttgatcaaggaaggattgctgcgtatagactttttgagatgataactcgttcatcttctgtggctaaccaagaaggagctgtgctggcttctgttcaaggaaatattgagttccggaatgtatatttcagttatttgtcacgacctgaaattccaatcttgagcggattttacctcacggttcctgctaaaaaagcagttgcacttgttggtagaaatggttctggaaaaagcagcatcattcctttaatggaacggttttatgatccgacattaggagaagttcttcttgatggagaaaatattaaaaatctaaaactggagtggctgagaagccaaatagggttggttacccaggagcctgctctgcttagcttgagcataagagagaatattgcatatggtcgtgatgctactcttgatcagatagaggaggcagctaaaaatgcgcatgcgcacacatttatcagctcacttgaaaaaggatatgaaacacaggtcgggagagccggtttagcaatgacagaggagcagaaaattaaactttcgattgctagagctgtgcttttgaatccaacaattcttctgcttgatgaagtaactggaggactagacttcgaagctgaaagaattgtgcaggaagctcttgatcttctgatgttgggacggtcaaccataataatagcccgacgattaagtttgataaaaaatgctgactatattgctgtgatggaggagggtcagctcgttgaaatgggtacacacgatgaattgataaatcttggtgggctgtatgctgagcttctgaagtgtgaagaagcaacaaagcttccaagaaggatgccagttaggaactacaaggagtctgcggtgtttgaggtcgagagagactcttcagctggctgtggcgtccaagaaccatcatcacccaaaatgattaagtctccatctcttcaaagaggtagtggtgtgttccgtccccaggaactgtgttttgatactgaagaatcacctaaagctcatagccctgcatctgagaaaacaggggaagatggcatgtctctggattgtgctgataaagagccaactatcaaaaggcaagatagtttcgagatgaggttgccacaccttcctaaagttgacgttcagtgtccccaacaaaaatcaaacggctcagagccagagtcccctgtttcaccccttttgacatcagatcctaaaaacgagcgttcccattcgcagacgtttagtcgtcctcttagttctcctgatgacactaaagcaaatggtaaggcgtctaaggatgctcaacacaaggagtcaccttcgttttggaggttggcacagcttagtttcccagagtggctttatgctgtattagggagtcttggtgctgccatctttggttctttcaatcctcttctggcttatgtcattgcgttggtagttacggaatattataaaagcaaaggaggccacctgcgcgaggaggttgacaaatggtgtttgatcattgcctgcatggggattgtgacagttgttgccaatttcttgcagcatttctattttggcataatgggagagaaaatgacggagagagttaggaggatgatgttctcagcaatgctgcgtaacgaagttggatggttcgatgatgaagagaacagtccagatacattatccatgcgtttagcaaatgatgctacttttgtccgagctgccttcagcaacaggctttcaatatttattcaagatagttttgctgttattgttgctcttctgattgggttgctgcttggttggcgtttggcccttgttgcattggcaactctgccaattctcactctttctgccattgctcagaaactgtggcttgccggattctcaaaaggcatacaggagatgcacagaaaagcatctttagttctcgaggatgctgttagaaacatctacactgttgttgctttctgtgctggtaacaaagtgatggaactgtacaggatgcaactccagcggatactcagacagagctatctccatgggatggctattggttttgcgtttggtttttcacagtttcttcttttcgcctgcaacgcgctcctcctatggtgcactgcgttatctgttaaccgtggatatatgaaattatcgacagctataacggagtacatggttttctcatttgctacattcgcccttgtggagccatttggattagcaccgtatatcctcaagcgacgtaagtctctgatatcagtgtttgaaatagtcgatcgagtccctacgattgaaccagatgataactctgctctcaaacctcctaatgtctacggaagtattgaattgaaaaacgtagacttctgctacccaactcgacccgagatactagtgctgagcaactttagtctcaaaatcagtggcggacagactgtagctgttgttggcgtttcaggttctggaaagagcacgataatctcactagtagagagatactacgacccagttgctggccaagtcctactagatgggagagacttaaagttatataacttgagatggttgagaagccacatgggtttggttcagcaagaacccataatcttttccacaacaatcagagagaatatcatatatgcaaggcataatgcaagtgaagctgagatgaaggaagcagcaagaattgcaaatgctcaccatttcatcagcagcttacctcacggttacgacacacatattgggatgagaggcgtagaacttacccctggacagaaacagagaatagcaatagcacgcgtagtactgaagaatgctcccatcatcttaatagatgaagccagctcgtctatcgaatctgaatcgagtcgggttgtgcaggaggctcttgatacattgataatggggaacaaaacaacaattctgatagcacatagagcggctatgatgagacatgtggataacattgtggtacttaatggagggaggatagtagaggaaggtacacatgattctttagcagcaaaaaatgggttgtatgtacgtttgatgcaaccacactttggtaaaggtctacgccaacatcgactgatatag

SEQ ID NO: 7630 - protein, 1408 aa, Arabidopsis thaliana
MMISRGLFGWSPPHMQPLTPVSEVSEPPESPSPYLDPGAESGGGTGTAAALAEADEEMDDQDELEPPPAAVPFSQLFACADRFDWVLMIVGSVAAAAHGTALIVYLHYFAKIVDVLAFSNDSSQQRSEHQFDRLVQLSLTIVYIAGGVFISGWIEVSCWILTGERQTAVIRSKYVQVLLNQDMSFFDTYGNNGDIVSQVLSDVLLIQSALSEKVGNYIHNMATFISGLVIGFVNCWEIALITLATGPFIVAAGGISNIFLHRLAENIQDAYAEAAGIAEQAISYIRTLYAFTNETLAKYSYATSLQATLRYGILISLVQGLGLGFTYGLAICSCALQLWIGRFFVHNGRANGGEIIAALFAVILSGLGLNQAATNFYSFDQGRIAAYRLFEMITRSSSVANQEGAVLASVQGNIEFRNVYFSYLSRPEIPILSGFYLTVPAKKAVALVGRNGSGKSSIIPLMERFYDPTLGEVLLDGENIKNLKLEWLRSQIGLVTQEPALLSLSIRENIAYGRDATLDQIEEAAKNAHAHTFISSLEKGYETQVGRAGLAMTEEQKIKLSIARAVLLNPTILLLDEVTGGLDFEAERIVQEALDLLMLGRSTIIIARRLSLIKNADYIAVMEEGQLVEMGTHDELINLGGLYAELLKCEEATKLPRRMPVRNYKESAVFEVERDSSAGCGVQEPSSPKMIKSPSLQRGSGVFRPQELCFDTEESPKAHSPASEKTGEDGMSLDCADKEPTIKRQDSFEMRLPHLPKVDVQCPQQKSNGSEPESPVSPLLTSDPKNERSHSQTFSRPLSSPDDTKANGKASKDAQHKESPSFWRLAQLSFPEWLYAVLGSLGAAIFGSFNPLLAYVIALVVTEYYKSKGGHLREEVDKWCLIIACMGIVTVVANFLQHFYFGIMGEKMTERVRRMMFSAMLRNEVGWFDDEENSPDTLSMRLANDATFVRAAFSNRLSIFIQDSFAVIVALLIGLLLGWRLALVALATLPILTLSAIAQKLWLAGFSKGIQEMHRKASLVLEDAVRNIYTVVAFCAGNKVMELYRMQLQRILRQSYLHGMAIGFAFGFSQFLLFACNALLLWCTALSVNRGYMKLSTAITEYMVFSFATFALVEPFGLAPYILKRRKSLISVFEIVDRVPTIEPDDNSALKPPNVYGSIELKNVDFCYPTRPEILVLSNFSLKISGGQTVAVVGVSGSGKSTIISLVERYYDPVAGQVLLDGRDLKLYNLRWLRSHMGLVQQEPIIFSTTIRENIIYARHNASEAEMKEAARIANAHHFISSLPHGYDTHIGMRGVELTPGQKQRIAIARVVLKNAPIILIDEASSSIESESSRVVQEALDTLIMGNKTTILIAHRAAMMRHVDNIVVLNGGRIVEEGTHDSLAAKNGLYVRLMQPHFGKGLRQHRLI

SEQ ID NO: 7631 - DNA, 3687 bp, Arabidopsis thaliana
  CDS (1)..(3687)
atgaagacatggggaagcatgagatcaatattcatgcatgccgacggtgtagattggatgttgatgggattagggttaatcggagccgtcggtgatggcttcatcactcctattctttttttcatcacagccatgctattgaacgacttcggtagtttctctttcaacgatgaaaccttcatgcaacccatttccaagaatgctctagccatgctttatgtggcttgtgcatcttgggtgatatgtttccttgaaggatattgttggacaagaacaggggagagacaagcagcaaaaatgagagaaaggtacttaagagcagtgttaagacaagatgtgggttactttgatcttcatgtcacaagcacttctgatattattaccagtgtctctagtgacagccttgtcattcaagacttcctcagtgaaaagttaccaaacattttgatgaatgcatctgcgtttgtcggaagctacatagtgggtttcatgttgctgtggagactcacaatcgtaggcttcccattcatcattctcctcttgatccctggactaatgtacggacgagccctcattggcatctcgaggaaaatacgtgaggagtacaatgaagctggttctatcgccgaacaagccatctcttcggttagaaccgtctatgcatttgttagtgagaagaagatgatagaaaagttctcagatgcgcttcaagggtcggtgaagctagggttgagacaagggctagctaaaggaattgctattgggagcaatggtatagtttatgctatatgggggttcttgacttggtatggaagtcggatggttatgaactatggctacaaaggtggtactgtctccacagtcacagtttgcgtcacctttggtggcacagcacttggtcaagcattgtcgaatcttaaatatttctccgaggcgtttgtggcaggggaacggattcaaaaaatgataaaaagagtccctgatatagattcagacaacttgaatggtcatattttggagactataagaggagaagttgaattcaacaacgtgaagtgcaagtacccgtctagacccgaaaccctaatctttgatgatttatgtctgaaaattccatcagggaaaactgtagctctggttggcggaagtggatcgggaaaatcaacagtgatatcgcttttacaaaggttctatgacccgaacgaaggcgatattctcattgatagtgtgtccattaataatatgcaagtgaaatggttgagatcgcaaatgggtatggttagccaagagccatcgctctttgccacatcgataaaggagaacatattatttggtaaagaggacgcatcctttgatgaagtagtggaagcagccaaggcctcaaatgctcataattttatttcgcaatttcctcatggttaccaaactcaggttggggagagaggagtgcatatgtcgggaggccagaagcagagaatcgcaattgcacgagcgttaatcaaatcaccgataattcttctcctagacgaggcaacaagcgcattggatttagaatctgaaagggtggtccaagaagccttagacaatgcatcagttggtcgtacaactattgttattgcccaccgtctctctaccattcgtaatgctgatattatatgtgttctacataatggttgcattgtagaaactggatcgcacgacaaactcatggagatagatggtaaatacacttctctagttcgcttacaacaaatgaagaatgaagaatcatgtgataacactagcgtaggtgtgaaagagggccgagtctcgagtttaagaaacgatttggattataatccaagagacttggctcatagcatgagttcaagcattgttacgaatctttctgactcgattcctcaagataagaagccgcttgtgccatcgtttaagagattgatggcaatgaatagaccagagtggaaacatgcattatgtggttgcttaagtgcatccttaggtggggccgtacaaccaatttacgcatattcgtccgggttaatgatatcggtatttttcctaaccaaccatgagcagatcaaagagaatacaagaatttacgtgttattattttttggtctagctctattcactttttttactagtatcagtcaacaatatagtttttcctacatgggagaatacctgactaaacgtatccgagaacagatgctctcgaagatactaacgtttgaagtcaattggttcgatgaggaagagaactcaagtggtgcaatttgctccagactagcgaaagatgctaacgtggtaaggtcgctcgttggtgaaagaatgtcattgctggtacaaaccatatcaacagttatggtagcttgcacaattggtttggtcatcgcttggagattcaccattgtgatgatttcagtacaaccagtaattattgtctgctattatattcaacgtgttctgctcaagaacatgtcgaaaaaagccatcattgcccaagatgaaagcagtaaactagctgcagaggctgtctccaacatccgaaccatcacaaccttctcatcacaagaacggatcatgaaattactcgagagagttcaagaaggtccacgaagagaaagtgcccgccaatcatggttagctgggattatgttggggactacgcaaagccttataacgtgcacctcagctttgaatttttggtatggtggtaaattaatcgctgatgggaagatggtatcaaaagcattctttgagttatttttgatctttaagactacaggccgggctattgccgaagctgggacaatgacgacagatctagccaagggctcaaattcagttgactcagtattcacagtgttagatcgtcgaaccaccattgagccggagaatccggatgggtatatcttagaaaaaataaagggccaaatcacatttctcaatgtggacttcgcttacccaacgcgacctaatatggttatattcaacaacttctccatagagatccacgagggaaagtcgacagcgatcgtaggtccaagtcggtcgggtaagtcaactgtaatcgggttaatcgaacggttctatgacccgttacaaggtattgtgaaaatcgatggccgtgatataaggtcgtatcatctaagatcacttcgtcaacacatgtctttggttagtcaagaaccaacattattcgcggggacaatccgagaaaacataatgtatggacgagcatctaacaagatcgacgagtcggagattatcgaggcaggaaagacggcaaacgctcacgagttcattacatcactatcagacggctatgatacgtactgcggagacagaggagtacaattgtctggtggtcaaaaacagaggatagctatcgcccgaacgattttaaagaatccatcaattttgctcctcgatgaagctacaagcgctttggacagccaatcagagcgtgtagtgcaagacgccctcgaacatgtgatggtagggaaaacaagcgttgtgatcgcacataggcttagcacgatccagaactgcgacacgattgctgttttagacaaaggaaaagttgtagaaagtgggacacacgcttccttgttagcaaaaggtcccacaggctcttatttctcattggtcagtcttcagagaaaggtcagatatgtataa

SEQ ID NO: 7632 - protein, 1228 aa, Arabidopsis thaliana
MKTWGSMRSIFMHADGVDWMLMGLGLIGAVGDGFITPILFFITAMLLNDFGSFSFNDETFMQPISKNALAMLYVACASWVICFLEGYCWTRTGERQAAKMRERYLRAVLRQDVGYFDLHVTSTSDIITSVSSDSLVIQDFLSEKLPNILMNASAFVGSYIVGFMLLWRLTIVGFPFIILLLIPGLMYGRALIGISRKIREEYNEAGSIAEQAISSVRTVYAFVSEKKMIEKFSDALQGSVKLGLRQGLAKGIAIGSNGIVYAIWGFLTWYGSRMVMNYGYKGGTVSTVTVCVTFGGTALGQALSNLKYFSEAFVAGERIQKMIKRVPDIDSDNLNGHILETIRGEVEFNNVKCKYPSRPETLIFDDLCLKIPSGKTVALVGGSGSGKSTVISLLQRFYDPNEGDILIDSVSINNMQVKWLRSQMGMVSQEPSLFATSIKENILFGKEDASFDEVVEAAKASNAHNFISQFPHGYQTQVGERGVHMSGGQKQRIAIARALIKSPIILLLDEATSALDLESERVVQEALDNASVGRTTIVIAHRLSTIRNADIICVLHNGCIVETGSHDKLMEIDGKYTSLVRLQQMKNEESCDNTSVGVKEGRVSSLRNDLDYNPRDLAHSMSSSIVTNLSDSIPQDKKPLVPSFKRLMAMNRPEWKHALCGCLSASLGGAVQPIYAYSSGLMISVFFLTNHEQIKENTRIYVLLFFGLALFTFFTSISQQYSFSYMGEYLTKRIREQMLSKILTFEVNWFDEEENSSGAICSRLAKDANVVRSLVGERMSLLVQTISTVMVACTIGLVIAWRFTIVMISVQPVIIVCYYIQRVLLKNMSKKAIIAQDESSKLAAEAVSNIRTITTFSSQERIMKLLERVQEGPRRESARQSWLAGIMLGTTQSLITCTSALNFWYGGKLIADGKMVSKAFFELFLIFKTTGRAIAEAGTMTTDLAKGSNSVDSVFTVLDRRTTIEPENPDGYILEKIKGQITFLNVDFAYPTRPNMVIFNNFSIEIHEGKSTAIVGPSRSGKSTVIGLIERFYDPLQGIVKIDGRDIRSYHLRSLRQHMSLVSQEPTLFAGTIRENIMYGRASNKIDESEIIEAGKTANAHEFITSLSDGYDTYCGDRGVQLSGGQKQRIAIARTILKNPSILLLDEATSALDSQSERVVQDALEHVMVGKTSVVIAHRLSTIQNCDTIAVLDKGKVVESGTHASLLAKGPTGSYFSLVSLQRKVRYV

SEQ ID NO: 7633 - DNA, 3789 bp, Arabidopsis thaliana
  CDS (1)..(3789)
atgaggactttgtatgttgtcgtttccccaaggtcaatgtgtcgtttagtatttcttttttcgaaacccaaagtaagcaaaaggagaaggaagaagatcatgaagagttttggaagcgtaagatcaatattcatgcatgcgaacagtgtggatttagtgctgatgggattaggtttaatcggagccgtcggtgatggcttcatcactcctataatatttttcatcaccgggctgctactcaacgacatcggtgattcctcattcggtgataaaaccttcatgcatgccatcatgaagaatgccgtagctttgctttatgtcgctggtgcatctttggtgatatgtttcgttgaaggatattgctggactaggacaggggagagacaagcatcaagaatgagagagaagtacttaagagcagtgttaagacaagatgtgggttactttgatcttcatgttacaagcacttctgatgttatcaccagtgtctctagtgacaccctcgtgatccaagacgtccttagtgaaaagttaccaaattttttgatgagtgcatcggcgtttgtcgcaagctacatcgtgggtttcatcatgctgtggagactaacaatagtaggtttcccgttctttatcctcctcttgatccctggactgatgtgcggacgagccctcatcaacatctcgagaaaaatacgtgaagagtataatgaggctggttctattgccgagcaagccatctcgttggtgcgaaccgtctacgcatttggtagtgagaggaagatgatatcgaaattctcagctgcgcttgaaggctcagtgaagctagggttgagacaaggaatagctaaaggaatcgccattgggagcaatggtgtcacttacgccatttgggggttcatgacttggtacggaagtcggatggttatgtaccatggagctaaaggcggtactatcttcgcagtcatcatatgcatcacctatggtggcacatcacttggtcgaggtttgtcgaatctcaaatatttctccgaggcggttgtagcaggggaaaggattattgaagtgataaaaagagttcccgatattgattcggacaacccgagaggtcaagttcttgagaatattaaaggagaagtccagtttaagcatgtgaagttcatgtactcatcaagacccgagacaccaatctttgatgatttatgtctaagaatcccatctggtaaatctgttgctctggtgggtggaagcggatcaggaaaatcaactgtgatatcgcttttacaaagattttatgaccccatcgtaggagagattcttatcgatggtgtgtctattaaaaagttgcaagtgaaatggttgagatcacaaatgggtctagttagccaagagccagcactcttcgccacatcgatagaggagaacatattatttggtaaagaggacgcatcctttgatgaagtagtggaagctgcaaagtcctcaaatgctcatgatttcatttctcagttccctcttggttacaaaactcaggttggggagagaggagtgcaaatgtcagggggtcagaagcaaaggatttcaattgcacgtgcgataatcaaatcaccgacacttctactgctagacgaggcaacaagcgcattagattcagaatccgaaagagtagtccaagaagccttagacaatgccactattggtcgtacaactattgttattgctcaccgcctctctactattcgtaatgttgatgttatatgtgtattcaaaaatggtcagattgtagaaactggatcacacgaagagctcatggagaatgtagatggtcaatacacttctctagtccgcttacaaatcatggaaaatgaagaatcaaatgataacgttagcgtaagtatgcgagagggtcaattctcaaatttcaacaaagacgtgaagtatagttcaagactttctattcaaagtcggtcttcccttttcgcaacttcaagcattgatacaaatcttgctggttcaattccaaaggataagaagccatcttttaagagattgatggcgatgaataaaccagagtggaaacatgcattgtatggttgcttaagtgcagtcttgtatggagccttacacccaatttatgcatatgcttcaggatcaatggtgtcagtgtattttctaacgagtcatgatgagatgaaggagaaaacaaggatctatgtgttgcttttcgttggtctagctgttttatgtttcttgatcagtatcattcaacaatatagttttgcttacatgggtgaatacctaacgaaacgtatacgagaaaatattctctcaaagctattgacctttgaggtaagctggttcgatgaagacgagaactcgagcggatcaatttgctctagactagccaaagacgcaaacgtggtgagatcgcttgttggtgaacgagtgtcgttgttggtacaaactatatcagcagtgagtgtagcttgcacacttggtttggccatttcttggaaattatccattgtgatgattgcaatacaaccagtggttgttggatgcttctacactcaacgcattgtactcaaaagcatatcgaaaaaagccattaaagcacaagatgagagcagcaaactagcggcagaagctgtatccaacatccgaaccataacagcattttcgtcacaagaacggatcctaaaattactcaaaatggttcaagaaggaccacaaagagaaaatatccgtcaatcgtggttagcagggattgtgctagcaacttctagaagtctcatgacatgcacttcagctttgaattactggtacggtgctagacttattattgatgggaagatcacgtcaaaagcattctttgagttgtttatactctttgtgagtacgggtcgggttattgcggacgcgggagcaatgacgatggatctagccaagggctcggatgcggtcggatcagtatttgcggtgttagatcgttacacaaacattgaaccggagaaaccggatggtttcgtcccacaaaacataaagggacaaataaagtttgtcaatgtggactttgcgtacccaacacgccctgatgtgattatatttaagaacttctccattgatattgacgagggaaagtcgacagcgatagtgggtccaagcgggtcaggtaaatcaactataatcgggttaatcgaacggttttatgacccgttaaagggtattgtaaagatcgatggtcgtgatataaggtcttatcatttgagatcacttcgtcaacacataggtttggttagccaagagccaatattatttgctgggacaatccgagagaacatcatgtatggaggagcatctgacaagattgacgagtcagagattatcgaggcggccaaggcagccaacgctcatgatttcatcgtaacattatcggacggctatgatacgtactgtggagacagaggagtacaactatctggtggtcaaaaacagaggatcgcgattgctcgtgcggttttgaagaacccatcagtgttgcttcttgatgaagctacgagcgctcttgacaaccaatcagagcgcatggtgcaggatgcactcgggcgtttgatggttggaaggacaagtgttgtgatcgctcataggcttagcaccattcaaaactgtgacacgataactgttttagacaaagggaaagttgtcgaatgtggaacacactcttccttgttagctaaaggtcctacgggtgtatatttctctctggtcagtctccaaagaactcgttactga

SEQ ID NO: 7634 - protein, 1262 aa, Arabidopsis thaliana
MRTLYVVVSPRSMCRLVFLFSKPKVSKRRRKKIMKSFGSVRSIFMHANSVDLVLMGLGLIGAVGDGFITPIIFFITGLLLNDIGDSSFGDKTFMHAIMKNAVALLYVAGASLVICFVEGYCWTRTGERQASRMREKYLRAVLRQDVGYFDLHVTSTSDVITSVSSDTLVIQDVLSEKLPNFLMSASAFVASYIVGFIMLWRLTIVGFPFFILLLIPGLMCGRALINISRKIREEYNEAGSIAEQAISLVRTVYAFGSERKMISKFSAALEGSVKLGLRQGIAKGIAIGSNGVTYAIWGFMTWYGSRMVMYHGAKGGTIFAVIICITYGGTSLGRGLSNLKYFSEAVVAGERIIEVIKRVPDIDSDNPRGQVLENIKGEVQFKHVKFMYSSRPETPIFDDLCLRIPSGKSVALVGGSGSGKSTVISLLQRFYDPIVGEILIDGVSIKKLQVKWLRSQMGLVSQEPALFATSIEENILFGKEDASFDEVVEAAKSSNAHDFISQFPLGYKTQVGERGVQMSGGQKQRISIARAIIKSPTLLLLDEATSALDSESERVVQEALDNATIGRTTIVIAHRLSTIRNVDVICVFKNGQIVETGSHEELMENVDGQYTSLVRLQIMENEESNDNVSVSMREGQFSNFNKDVKYSSRLSIQSRSSLFATSSIDTNLAGSIPKDKKPSFKRLMAMNKPEWKHALYGCLSAVLYGALHPIYAYASGSMVSVYFLTSHDEMKEKTRIYVLLFVGLAVLCFLISIIQQYSFAYMGEYLTKRIRENILSKLLTFEVSWFDEDENSSGSICSRLAKDANVVRSLVGERVSLLVQTISAVSVACTLGLAISWKLSIVMIAIQPVVVGCFYTQRIVLKSISKKAIKAQDESSKLAAEAVSNIRTITAFSSQERILKLLKMVQEGPQRENIRQSWLAGIVLATSRSLMTCTSALNYWYGARLIIDGKITSKAFFELFILFVSTGRVIADAGAMTMDLAKGSDAVGSVFAVLDRYTNIEPEKPDGFVPQNIKGQIKFVNVDFAYPTRPDVIIFKNFSIDIDEGKSTAIVGPSGSGKSTIIGLIERFYDPLKGIVKIDGRDIRSYHLRSLRQHIGLVSQEPILFAGTIRENIMYGGASDKIDESEIIEAAKAANAHDFIVTLSDGYDTYCGDRGVQLSGGQKQRIAIARAVLKNPSVLLLDEATSALDNQSERMVQDALGRLMVGRTSVVIAHRLSTIQNCDTITVLDKGKVVECGTHSSLLAKGPTGVYFSLVSLQRTRY

SEQ ID NO: 7635 - DNA, 1725 bp, Acinetobacter sp
  CDS (1)..(1725): transl_table=11
gtgaagcaagattttaaggtttatgttcgtcttttatcctacttaaagccctattggggaattgctttattggtgttggtaggctttgggattaatgctgcaactgaagtttctgttgctaaactcttaaaatacattattgatgccattcaggaaggaagtcgtgcagatctggactggtttcctttattgattgtacttttggtgttctttcgtggtttgggcctgttcatggggggctattatactgcggtcatctcgcgtaggctgatttttagtatccgtcaggaaatctatgcaaaattgatccgtttgccttcacagtactatctggataactcatctgggcatatatctgccaagattatgtataacgtcgaacaattgacagccgcttcctctgaatccttaaaaattatggtgaaagatggcctgattactttaggcttgcttggatatttgctttataccaactggcgattgacgctgtgtatcttcatttttatgccaattattggtgtattggtacgtaaagcctctaaacgaatgcgaaaactttccatacaggttcaaaataccatgggtgatgtcaatcacgtggttcaggaaagtataggtggacaagctgttgtaaaaagttttgtaggtgaggaatttgagcagaaacgtttttataagtcatcagaagacaacttaaaacgtggtctcaaaatggtaattgtacaaaacctaaatagtcctttggttcagttggtcatggcaatggctatgagtttgattgtatggcttgcattacgtcctcaaattttaggagaaaccacagcgggtgagtttgttgcttatattaccgctgcgggcttacttgcaaagccgattaaaaatctaacggatgtaaatgaaaaactccagcgtggtattgcagcagcctattctgtatttgaactgcttgatttgccttcagaggaaaatcacggtactcagacacctaagttgcaaggggatgtccgttttgatcacgtgacacttgaatatgcgggacaagtcaaagcaatcaaagattttaatctcacaatcgaaccaggtgaaaccgtcgcaattgttgggcgttctggtgcaggtaaaacatcattggttaatctgttggtgcggtttcaggaagtgaccagtggttcactctatcttgatcatatccccattcaagatatcgagctgtcttgtttacgccaacaggtcgcaatggtgaatcaacaagtggttttatttaaccgttcagtccgagaaaatattgcgtatggtcagctcgaaggcgcggcagaggctgatattgtcgcagcagcaaaagcggcctatgctcatgattttattatgaacttgcctcagggttatgacactatacttggcgcccaaggcttaaatttatcaggtggtcaacgtcaacgtatagcaattgcccgtgcgattttgaagaatgcccctattttgattctggatgaagcgaccagcgcactggataatgagtcagaacatttcattcaaaaggcttttgatgaagcaatgcagaatagaacgacgatagtcattgcgcatcgcttgtctaccattgaaaatgcagaccgtattgtagtcatggacaaggggcaaattattgagcagggtactcatcaagagctgcttttaaagcagggtgcgtattttcagctccatcagcgtaattttgaggaataa

SEQ ID NO: 7636 - protein, 574 aa, Acinetobacter sp
MKQDFKVYVRLLSYLKPYWGIALLVLVGFGINAATEVSVAKLLKYIIDAIQEGSRADLDWFPLLIVLLVFFRGLGLFMGGYYTAVISRRLIFSIRQEIYAKLIRLPSQYYLDNSSGHISAKIMYNVEQLTAASSESLKIMVKDGLITLGLLGYLLYTNWRLTLCIFIFMPIIGVLVRKASKRMRKLSIQVQNTMGDVNHVVQESIGGQAVVKSFVGEEFEQKRFYKSSEDNLKRGLKMVIVQNLNSPLVQLVMAMAMSLIVWLALRPQILGETTAGEFVAYITAAGLLAKPIKNLTDVNEKLQRGIAAAYSVFELLDLPSEENHGTQTPKLQGDVRFDHVTLEYAGQVKAIKDFNLTIEPGETVAIVGRSGAGKTSLVNLLVRFQEVTSGSLYLDHIPIQDIELSCLRQQVAMVNQQVVLFNRSVRENIAYGQLEGAAEADIVAAAKAAYAHDFIMNLPQGYDTILGAQGLNLSGGQRQRIAIARAILKNAPILILDEATSALDNESEHFIQKAFDEAMQNRTTIVIAHRLSTIENADRIVVMDKGQIIEQGTHQELLLKQGAYFQLHQRNFEE

SEQ ID NO: 7637 - DNA, 1770 bp, Alkalilimnicola ehrlichei
  CDS (1)..(1770): transl_table=11
atgagcaaagggcacagcgaccatcccagcgccggcgagtcctggcacctgtataagcgcattttcggctttatcaagccctactggcggctgggcgtgctggccatcgtctgtatggtgctggcggcggccggtcaggcggcctttgcctggatcatccagccgctggtggacggcaccttcatcgagcaggacccaggcgcccggctctgggtaccggcgaccctggtcggcatcttcctcttccacggcgtcaccaccttcgcctccgactataccgtggcctgggtcggccggcgggtggtcaaggacgtgcgccaggcggtcttcgagcagtaccttcggctgcccaccagctatttcgacaagaactcccccggcaccctgctggccaaactgacctataacgtcaatcagatcagtgcggcggcctccaaggcggtggtcgtactggtgcgcgacaccttcacggtgatcttcctgctggcctatatgacctacctcagcggctggctggtgatgatcgtcttcggtttgggcccgctggtggccgtggtggtgaccgcagccaacaagcgcttccgcaagctgagccggcgcatgcaggcctcggtgggggagtacgcccagatcgccgaggacgggatccgcggacaggctgaggtcaagatcttcggtggccagcgttacgaggcggagcgcttcgaccggaccaacacccgccaccaccggcagctcatgcgctacaaggcggtgcaggcggccagccagccgctggcgcaactgggcgcagtgatcgccctggccattatcctctacctggcgaccatggacgtgatcctggagaccatcagccccgggggcatgatctcgttcatcgccgccatgctgctgatgctgccgccgctgaaacgggtgatcggggtgaacgccgagatccagaaagcgttggccgccggggagagcgtcttcgaggtgctggacgccccgccggaacccgaccacgggcagcgcccgctggagcgggcccggggcctgatcgagttcgaccgggtggccttccgctacccggaatccgaggactgggtgcttcgggacatcaacctgtccatccagcccggcgagacggtggccctggtgggccgctcgggcagcggtaagaccaccctggccagcctgctgccgcgcttttacgacccgcagcggggcgagatccgactggacggccacccgctggcggaataccggctgcaggcgctgcgctcgcagatgtctctggtcaaccagcaggtggtgctgttcaacgactccctggccaacaacatcgcctacggcctgagcgagcggccgacagcggcgcaactgcaggccgcggcccgtgccgccaatgccctggagttcatcgaggagctgccggagggcttcgacaccgtcattggcgagaacggcgtcatgctctccggggggcagcgccagcgcatcgccatcgcccgggccctgctcaaggatgcgcccattctgatcctcgacgaggcgacctccgccctggactcggaatcggaaaagcgcatccaggaggcgctggagaaactgatgcgcggccggaccaccctggtcatcgcccaccggctgtccaccatcgaggacgccgaccgaatcgtggtgctcgatgccggccgggtggtggagaccgggacccaccgggagctgctggaccacaacgggcactacgcctcgttgcaccgtgtccagttcaacggtccgtcctga

SEQ ID NO: 7638 - protein, 589 aa, Alkalilimnicola ehrlichei
MSKGHSDHPSAGESWHLYKRIFGFIKPYWRLGVLAIVCMVLAAAGQAAFAWIIQPLVDGTFIEQDPGARLWVPATLVGIFLFHGVTTFASDYTVAWVGRRVVKDVRQAVFEQYLRLPTSYFDKNSPGTLLAKLTYNVNQISAAASKAVVVLVRDTFTVIFLLAYMTYLSGWLVMIVFGLGPLVAVVVTAANKRFRKLSRRMQASVGEYAQIAEDGIRGQAEVKIFGGQRYEAERFDRTNTRHHRQLMRYKAVQAASQPLAQLGAVIALAIILYLATMDVILETISPGGMISFIAAMLLMLPPLKRVIGVNAEIQKALAAGESVFEVLDAPPEPDHGQRPLERARGLIEFDRVAFRYPESEDWVLRDINLSIQPGETVALVGRSGSGKTTLASLLPRFYDPQRGEIRLDGHPLAEYRLQALRSQMSLVNQQVVLFNDSLANNIAYGLSERPTAAQLQAAARAANALEFIEELPEGFDTVIGENGVMLSGGQRQRIAIARALLKDAPILILDEATSALDSESEKRIQEALEKLMRGRTTLVIAHRLSTIEDADRIVVLDAGRVVETGTHRELLDHNGHYASLHRVQFNGPS

SEQ ID NO: 7639 - DNA, 1806 bp, Azoarcus sp
  CDS (1)..(1806): transl_table=11
atgcaccgttccgatgcggctcctgcctccagcatcaggatctacttccgtctgctgagctacgtccggccctatgtcgggctgttcgcagtcagcatcctgggctacgtcatcttcgcttcgtctcagccgatgctcgccggcgtgctgaagtattttgtcgatggcctgacgcatcccgacgcggcgctggttaccggcgtgccgctgctcgacggcatggagctgatgcacggcgtgccgctgatgatcgtgctaatcgccgcttggcaggggttgggcggctatctcggcaattatttccttgcgagagtttcgctgggactcgtgcacgacctgcgccagacgctgttcgacagcctgttgcgcctgccgaacacctatttcgaccagcacagctccggacacctgatatcgcgcatcactttcaacgtgacgatggtcaccggcgcggcgaccgatgcgatcaagatcgtgatccgcgaggggcttaccgtggtgttcctcttcgcgtacctgctgtggatgaactggcggctcacgctggtgatggtcgcgatcctgccgttgatcagcctgatggtccggaacgcaagcggcaagttccgcaagcagagcaggaagatccaggtcgcaatgggggacgtgacccacgtcgcgtccgaaacgattcagggttaccgggttgtgcgcagcttcggcggcgagcactacgagcgggagcgttttcgcgctgcgagcgaggacaacacacgcaagcagctgaaaatggtcaagacttcggcggtctatacgccgacgttgcagctcgtcacgtacagcgcgatggccgtggtgctgtttctcgtactgcggctgcgcggcgaggcgtcggtgggtgatctcgtcgcctacattaccgccgccgggctgctgcccaaaccgatccgccagctctccgaagtcagctcgacgatccagcgcggggtggcgggcgccgagagcattttcgaacagctcgacgacaagccggaagtggaccacgggcgcatcgaacgcgagcgtgtcagcggtcgcatcgaggtgcgcgacctgtcgttccgctatccaggctccgaccgcgaagtgctcgacagcgtgagcttcacggtcgagccggggcagatgatcgcactcgttggccgttccggcagcgggaagtcgacgctcgcgaacctgattccgcgtttctatcaccacgaccgcggccagatcctcatcgacggtgtcgatgtcgaggactacacgctgaagaacctgcgtcgccacatcgcgctggtaacgcagcaggtgaccctgttcaatgacacggtggcgaacaacatcgcctacggtgacctggccggcctcccgcgcgccgctgtcgaggccgcggcggaagccgggtatgcgaaggagttcatcgaccggctcccgcagggtttcgacacgctgatcggcgaaaacggcgtgaccctgtcgggcggccagcgccagcgcctcgcaatcgcccgcgcgctgctcaaaaacgccccgatcctgatcctcgacgaggcgacgagcgcgctcgacaccgaatcggaacgacatatccaggcggcgctccaccgcgtgatgcaggcgcgcacgacgctcgtgatcgcgcaccggttgtccaccatcgaacaggcggacgtcatcatggtgatggatcatggacgcatcgtcgaacgcggcagccatgccgaactcctcgccgccggcgggcactacgccaggctgcacgcgatgcagtttcgcgaggaacccgcggtcgcagagggtcgctag

SEQ ID NO: 7640 - protein, 601 aa, Azoarcus sp
MHRSDAAPASSIRIYFRLLSYVRPYVGLFAVSILGYVIFASSQPMLAGVLKYFVDGLTHPDAALVTGVPLLDGMELMHGVPLMIVLIAAWQGLGGYLGNYFLARVSLGLVHDLRQTLFDSLLRLPNTYFDQHSSGHLISRITFNVTMVTGAATDAIKIVIREGLTVVFLFAYLLWMNWRLTLVMVAILPLISLMVRNASGKFRKQSRKIQVAMGDVTHVASETIQGYRVVRSFGGEHYERERFRAASEDNTRKQLKMVKTSAVYTPTLQLVTYSAMAVVLFLVLRLRGEASVGDLVAYITAAGLLPKPIRQLSEVSSTIQRGVAGAESIFEQLDDKPEVDHGRIERERVSGRIEVRDLSFRYPGSDREVLDSVSFTVEPGQMIALVGRSGSGKSTLANLIPRFYHHDRGQILIDGVDVEDYTLKNLRRHIALVTQQVTLFNDTVANNIAYGDLAGLPRAAVEAAAEAGYAKEFIDRLPQGFDTLIGENGVTLSGGQRQRLAIARALLKNAPILILDEATSALDTESERHIQAALHRVMQARTTLVIAHRLSTIEQADVIMVMDHGRIVERGSHAELLAAGGHYARLHAMQFREEPAVAEGR

SEQ ID NO: 7641 - DNA, 1758 bp, Dechloromonas aromatica
  CDS (1)..(1758): transl_table=11
atgtctcatgacatgaccagccgtgagctgtacctccggctgctgacttatgtccgcccatactggaaggcctttctcgccgcgctggcgtgcatgggggtggcctcgctggcggagccggtctttccggcgatcatgaaatcgctgctcgacgacggattttccaaggcaaatggcccatgggactggttgttctatccgctggccatcatgggcatcttcctggtccgcgccatttttggcttccttggcgattacctgatgagctgggtgtcgaacaacgtcgtggctgaattgcgccaggccatgtttgcccgcatggtccgcctgccgacccgctactacagcgacaacctgtccggtcgtctgatgtcgcgcattgcctacgacgtgaccggcgtggccggtgcggcgaccaatgcgctgacctcgctgatcaaggattcgctatccattgtcggcctgctcgtctggctgctctggctgaattggcagctgacgctgatcaccctgagcgtcgtgccattcatcgccatcgtcgtgcgtgtcttcagcaagcgcctgcgcagcgtggcccgggggcagcaggagtcgatgggcaagattacccaggtgctgcaggaggccattgagggccacaaggtcgtcaagattttcggcggtcagtcctacgaagaagatcgtttctatgaatcgatccgcgagcagcgccgcttggccatgcgcgcgacgctggcttctgccgcacaaagcccgctggtccagttctttgccgcttccggtgtggcgatcatcatgggcgttgcgctcaagcaggcctccagcgaccagacgacggtcggcagtttcgtttccttcgttaccgccatgctgatgctgatggcgccgctgaagcgggtcactgacgtcaacgcgccgatccagcgtggtctggccgcagcggaaagcgtcttttcgctggtcgatgaagagaccgagccggatagcggcaaggaagagctgggtcgcgcccaggggctggtcgaattcgacggggtgaccttcacctatccggggtcagaacgtccggcgctcgacagtgtgtcgctgaccgtgcggcccggcgagtgcgtggcgctggtcggcccctcaggcagtggcaagacgacggcggccaatctgttgccccgtttctacgccctcgacgccggcgaaatccgggtcgacggccatgcgctgccgaacatccgcctgaacagcctgcgcgacaacatcgcgctggtcagccaggatgtcgtgctgttcaacgacactattggcgccaacatcgcctacggtggcaagcgcgacgcgaccctcgacgaaatccgcgcggcggccaaggcagcgcatgcgctggaattcatcgatgccctgccagagggtttgaacaccatgatcggcgaaaatggcgtcaagctttccggcggccagcgccagcgtctggctattgcccgtgccattctgaaggacgcgccgatcctgattctcgacgaagcaacctcggccctcgataccgaatccgaacgccatgtccaggccgctctcgacgaactgatgcgtggccgcagcaccttggtcattgcgcaccggttgtcgaccatcgaacgcgccgaccgcattatcgccttggcccacggccacaagcaggaagagggctcgcatgccgaactgctcgcccacgatggcctgtacgcccgcctgtaccgcatgcagaaggcggaagaggtcgcggtctga

SEQ ID NO: 7642 - protein, 585 aa, Dechloromonas aromatica
MSHDMTSRELYLRLLTYVRPYWKAFLAALACMGVASLAEPVFPAIMKSLLDDGFSKANGPWDWLFYPLAIMGIFLVRAIFGFLGDYLMSWVSNNVVAELRQAMFARMVRLPTRYYSDNLSGRLMSRIAYDVTGVAGAATNALTSLIKDSLSIVGLLVWLLWLNWQLTLITLSVVPFIAIVVRVFSKRLRSVARGQQESMGKITQVLQEAIEGHKVVKIFGGQSYEEDRFYESIREQRRLAMRATLASAAQSPLVQFFAASGVAIIMGVALKQASSDQTTVGSFVSFVTAMLMLMAPLKRVTDVNAPIQRGLAAAESVFSLVDEETEPDSGKEELGRAQGLVEFDGVTFTYPGSERPALDSVSLTVRPGECVALVGPSGSGKTTAANLLPRFYALDAGEIRVDGHALPNIRLNSLRDNIALVSQDVVLFNDTIGANIAYGGKRDATLDEIRAAAKAAHALEFIDALPEGLNTMIGENGVKLSGGQRQRLAIARAILKDAPILILDEATSALDTESERHVQAALDELMRGRSTLVIAHRLSTIERADRIIALAHGHKQEEGSHAELLAHDGLYARLYRMQKAEEVAV

SEQ ID NO: 7643 - DNA, 1749 bp, Escherichia coli O157
  CDS (1)..(1749): transl_table=11
atgcataacgacaaagatctctctacgtggcagacattccgccgactgtggccaaccattgcgccttttaaagcgggtctgatcgtggcgggcgtagcgttaatcctcaacgcagccagcgataccttcatgttatcgctccttaagccacttcttgatgatggctttggtaaaacagatcgctccgtgctggtgtggatgccgctggtggtgatcgggctgatgattttgcgtggtatcaccagctatgtctccagctactgtatctcctgggtatcaggaaaggtggtaatgaccatgcgtcgccgcctgtttggtcacatgatgggaatgccggtttcattctttgacaaacagtcaacgggtacgctgttgtcacgtatcacctacgattccgaacaggttgcttcttcctcttccggcgcactgattactgttgtgcgtgaaggtgcgtcgatcatcggcctgttcatcatgatgttctattacagttggcaattgtcgatcattttgattgtgctggcaccgattgtttcgattgcgattcgcgtagtatcgaagcgttttcgcaacatcagtaaaaacatgcagaacaccatggggcaggtgaccaccagcgctgaacaaatgctgaaaggccataaagaagtattgattttcggtggtcaggaagtggaaacgaaacgcttcgataaagtcagcaaccgaatgcgtcttcaggggatgaaaatggtttcagcctcttccatctctgatccgatcattcagctgatcgcctctttggcgctggcgtttgttctgtatgcggcgagcttcccaagtgtcatggatagcctgactgccggtacgattaccgttgttttctcttcaatgattgcactgatgcgtccgctgaaatcgctgactaacgttaacgcccagttccagcgcggtatggcggcttgtcagacactgtttaccattctggacagtgagcaggagaaagacgaaggtaagcgcgtgatcgagcgtgcgactggcgacgtggaattccgcaacgtcacctttacttatccgggacgtgacgtacccgcattgcgtaacatcaacctgaaaattccggcagggaaaacggtcgctctggttggacgctctggttcaggtaaatcaaccatcgccagcctgatcacgcgtttttacgatattgatgaaggcgaaatcctgatggatggtcacgatctgcgcgagtataccctggcgtcgttgcgtaaccaggttgctctggtgtcgcagaatgtccatctgtttaacgatacggttgctaacaacattgcttacgcacgaactgaacagtacagccgtgagcaaattgaagaagcggcgcgtatggcctacgccatggacttcatcaataagatggataacggtctcgatacagtgattggtgaaaacggcgtactgctctctggcggtcagcgtcagcgtattgctatcgctcgagccttgttgcgtgatagcccgattctgattctggatgaagctacctcggctctggataccgaatccgaacgtgcgattcaggcggcactggatgagttgcagaaaaaccgtacctctctggtgattgcccaccgcttgtctaccattgaaaaggcagacgaaatcgtggtcgtcgaggatggtgtcattgtggaacgcggtacgcataacgatttgcttgagcaccgcggcgtttacgcgcaacttcacaaaatgcagtttggccaatga

SEQ ID NO: 7644 - protein, 582 aa, Escherichia coli O157
MHNDKDLSTWQTFRRLWPTIAPFKAGLIVAGVALILNAASDTFMLSLLKPLLDDGFGKTDRSVLVWMPLVVIGLMILRGITSYVSSYCISWVSGKVVMTMRRRLFGHMMGMPVSFFDKQSTGTLLSRITYDSEQVASSSSGALITVVREGASIIGLFIMMFYYSWQLSIILIVLAPIVSIAIRVVSKRFRNISKNMQNTMGQVTTSAEQMLKGHKEVLIFGGQEVETKRFDKVSNRMRLQGMKMVSASSISDPIIQLIASLALAFVLYAASFPSVMDSLTAGTITVVFSSMIALMRPLKSLTNVNAQFQRGMAACQTLFTILDSEQEKDEGKRVIERATGDVEFRNVTFTYPGRDVPALRNINLKIPAGKTVALVGRSGSGKSTIASLITRFYDIDEGEILMDGHDLREYTLASLRNQVALVSQNVHLFNDTVANNIAYARTEQYSREQIEEAARMAYAMDFINKMDNGLDTVIGENGVLLSGGQRQRIAIARALLRDSPILILDEATSALDTESERAIQAALDELQKNRTSLVIAHRLSTIEKADEIVVVEDGVIVERGTHNDLLEHRGVYAQLHKMQFGQ

SEQ ID NO: 7645 - DNA, 1749 bp, Idiomarina loihiensis
  CDS (1)..(1749): transl_table=11
atggattctcagcttaaaaagaagacgacctttaaacgcttattaggttatatcaaaccttataaggcagcttttatcgctgctatcctgtgtatgattggttactctgccattgatacattgttcttatcccaaattgaaacgttaatagatgatgggttaacagagcaagactctaatatattgctttacggtgccctctttgttccttttattttcatccttcgtggttctttgaatgttgcttccagctatttcctgcattgggtgggttttaaagtcgttactaaaatgcggcagcagctttttgaccatatgatgaaactgccggtgggtttccatgaccagcattcaaccggtgacttgatttcaaaaataacttatgacactcagcaggtggcggaagcgagtagccgggccgttttggtcttggtgaaagaaggcgcgttcgtcgccggtttattgggtttgatgttttatcaaagctggcaattatcattggtatttttggtgataggccccttggttgcaaaagttgtcggggttgtttcacgtcgtttccgcaaagtaagtagtcgtattcagaccgctatgggtaatgtaaccacaactgcagagcagatgatcaacggccataaggttgtgatcatgcatcaggggcaaaaaggtgagtcgacacgtttttcggaaataaataatattactcgtaaccagaatatgaagctggtgaatacccgggctattagcacttcagttattcagtttatagcttcgttaagcctttctatggttctggttattgccagttttccagaaatgctgggtgagctttcggccggtgcttttactacgttacttaccgctatgatcatgttgctgcgcccgttaaagcagctgactaacgtaaacagtgatttccagcgcggtattgcggcggcaaccagcgtgtttgcaattctggacgagccgattgaagttgataaaggttcgcgagtggttgatcgtgcagcaggtgatattgtttttgatgatgtgaccttttcttatcaaaaagatgatgaacctgcgttagagcacattaattttaaagttgatcagggcaaaactgtggcgctggtgggccgttcaggtagtggtaagtcgacaatatcgaacttgcttacgcggttctacgatgtagagcagggcagcattttgcttgatggccacaatattaacgattataaactgaaatgcctaaggcgtcagtttgcgctggtgtctcagcatgtaaccttgtttaacgacaccatagcaaacaacattgcttacggcgcttcaaaagatgtatcacgtgaaaatattattaaagccgctgaacaagcatacgttactgaattcaccgacagcatgccgaaaggcctggatactatggtgggcgagaatggggtgatgttatccggtggtcagcgtcagcgtatagccatagcccgtgcgctattacaagacgcgcctattctgatactggatgaagcgacatcggcgttggatactgagtccgagcgtcatattcaggatgccctgggaaccttacgtaaaaaccgtacagctattgtcattgcacaccgtttatcaaccattgaaaatgctgatgaaattttagttatggacaacggtgagattattgagcgcggtacacaccagcaattgcttgatcaggaaggcgcatattttcagctgcataacttgcagtttagcgggagcgcctaa

SEQ ID NO: 7646 - protein, 582 aa, Idiomarina loihiensis
MDSQLKKKTTFKRLLGYIKPYKAAFIAAILCMIGYSAIDTLFLSQIETLIDDGLTEQDSNILLYGALFVPFIFILRGSLNVASSYFLHWVGFKVVTKMRQQLFDHMMKLPVGFHDQHSTGDLISKITYDTQQVAEASSRAVLVLVKEGAFVAGLLGLMFYQSWQLSLVFLVIGPLVAKVVGVVSRRFRKVSSRIQTAMGNVTTTAEQMINGHKVVIMHQGQKGESTRFSEINNITRNQNMKLVNTRAISTSVIQFIASLSLSMVLVIASFPEMLGELSAGAFTTLLTAMIMLLRPLKQLTNVNSDFQRGIAAATSVFAILDEPIEVDKGSRVVDRAAGDIVFDDVTFSYQKDDEPALEHINFKVDQGKTVALVGRSGSGKSTISNLLTRFYDVEQGSILLDGHNINDYKLKCLRRQFALVSQHVTLFNDTIANNIAYGASKDVSRENIIKAAEQAYVTEFTDSMPKGLDTMVGENGVMLSGGQRQRIAIARALLQDAPILILDEATSALDTESERHIQDALGTLRKNRTAIVIAHRLSTIENADEILVMDNGEIIERGTHQQLLDQEGAYFQLHNLQFSGSA

SEQ ID NO: 7647 - DNA, 1809 bp, Pseudomonas putida
  CDS (1)..(1809): transl_table=11
atggccgaaacaccgcgaccagcggagcacacctccagcctgaagatctacttccggctgttgagctatgtgaaaccctatgtcggcattttcctgctgagcattgtcggtttcgtgatctttgcctcgacccagccaatgctggccggcatcctcaagtacttcgtcgatgggctgagcaaccccgaagcggtattgttccccaacgtcccctacctgcgcgacctgcaactgctgcaggcggtgccgctgctgatcatcctgatcgctgcgtggcagggcctgggctcgttcctcggcaactacttcctggccaaggtctctctgagcctggtgcatgacctgcgggtggcattgttcaacaagctgctggtgttgcccaaccgctacttcgacaaccacaactccgggcacctgatttcgcgcatcaccttcaatgtgaccatggtcaccggcgccgctaccgacgccatcaaggtggtgatccgcgaaggcctgaccgtggtgttcctgtttgcctacctgctttggatgaactggcacctgaccctggtgatggtcgccatcttgccggtgattgcggttatggtcagcatcgccagcaagaaattccgcaagcagagcaagaaaatccaggtagccatgggcgacgtcacccacgttgcctcggaaaccatccagggttaccgcgtggtccgtagcttcggtggcgaggcctacgaacagcagcgattcggccaggccagccagagcaacaccgacaagcaactgcgcatgaccaagaccggctcgctgtacacgccgatgcttcagctggtgatctacagcgccatggctgcgctgatgttcctggtgttgttcctgcgcggggactctactgctggtgacctggtggcgtatatcaccgctgccggcctgctgcccaagccgattcgccagttgtcggaagtcagctcgaccatccagaagggcctggcaggtgccgagagcatcttcgagcaactggacgaagcgcctgaagtggacactggtacggtcgagaaggaacgcgtggaagggcgcctggaagtgcgtaacctgagctttacctacccgggtaccgagcgtgaagtgctgagcgatatcagttttgtcgccgagcccgggcagatgatcgccctggtcggccgctccggcagtggcaagtccaccctggcggcgctgatcccgcgcttctatcaccacgacaaggggcagatcctgctcgatggcgtggagatcgagcactatcgcctgcgtaacctgcgtcgccatgtttcgcaagtcacccagcatgtcaccctgttcaacgacaccgtggccaacaacatcgcttatggcgatctggccggcgcgccgcgcgcagacatcgaagccgccgcggccgatgcctatgccaaggaattcgtcgaccggctgccaaagggcttcgataccgaagtgggtgagaacggtgtactgctttccggtggccagcgccagcgcctggcaattgcccgtgcgctgcttaaaaacgcgccgttgctgatcctcgacgaagcgacttcggcgttggataccgagtccgagcggcatatccaggccgccctggaccacgtgatgcaaggccgtaccacgctggtgattgcccatcgcctgtcgaccatcgagaaggctgaccagatccttgtcatggaccagggccgcctggtcgagcgcggtactcacaccgagctgcttgcggctaatggccattatgcccgtttgcatgccatggggctggatgagccggccaaggccgatatcacctga

SEQ ID NO: 7648 - protein, 602 aa, Pseudomonas putida
MAETPRPAEHTSSLKIYFRLLSYVKPYVGIFLLSIVGFVIFASTQPMLAGILKYFVDGLSNPEAVLFPNVPYLRDLQLLQAVPLLIILIAAWQGLGSFLGNYFLAKVSLSLVHDLRVALFNKLLVLPNRYFDNHNSGHLISRITFNVTMVTGAATDAIKVVIREGLTVVFLFAYLLWMNWHLTLVMVAILPVIAVMVSIASKKFRKQSKKIQVAMGDVTHVASETIQGYRVVRSFGGEAYEQQRFGQASQSNTDKQLRMTKTGSLYTPMLQLVIYSAMAALMFLVLFLRGDSTAGDLVAYITAAGLLPKPIRQLSEVSSTIQKGLAGAESIFEQLDEAPEVDTGTVEKERVEGRLEVRNLSFTYPGTEREVLSDISFVAEPGQMIALVGRSGSGKSTLAALIPRFYHHDKGQILLDGVEIEHYRLRNLRRHVSQVTQHVTLFNDTVANNIAYGDLAGAPRADIEAAAADAYAKEFVDRLPKGFDTEVGENGVLLSGGQRQRLAIARALLKNAPLLILDEATSALDTESERHIQAALDHVMQGRTTLVIAHRLSTIEKADQILVMDQGRLVERGTHTELLAANGHYARLHAMGLDEPAKADIT

SEQ ID NO: 7649 - DNA, 1779 bp, Ralstonia solanacearum
  CDS (1)..(1779): transl_table=11
atggcagtgacttcttcttcgtcttcccagccgcccgcggccagccagccgggccacttcaagcgcctgtgggcctacctgcgtcccgaactcagcagcttcatcctcgccatggtcgccatgggcgtggtggcggccaccgaggggatcatccccaaggtggtgaaggacctgctggaccagggcttcggcggcgaatacgccggcaagctgtggcgggtgccggccatgctggtcggcatcgcggtggtgcgcggcgtcgcccagttcggggccacgtacttcctgagcctggtgtcgaacaaggtgctgctgaacctgcgcatgaagatgttcgagcgcctgctgcaggcgccggcggcgttctaccagcgcaatacggcggcctcgctcatcaacgccgtcatcttcgaggtcaaccaggtgctgcaggtgctgaccggcgtgttcatcacgctggtgcgcgattcgatgacggtgctggcgctgctgatcttcctcttctataccaactggcgcctgacgctggtggtggccgtgatcctgccggtcatcgggttcctgatgtcgcgcatcaaccgccgcctgcgttcgctcaatcgcgagcaccagaacctgaccaacgaagccgcgtacgtggtggaggaggcggccggcggctacaaggtcgtcaagctgcacggcggcgaggcctacgagtcacgccgcttcaatgccatgaccaaccgcctgcgcggctacgccatgcgcatggccgtggccggcggcctgaaccagccggtgacgcagttcctggcggcgctggcgctgtccgtcatcctggcgatcgcgatggtgcaggcgcaagccaaccagaccaccgtcggcggcttcaccggcttcgtgatggcgatgctgctgctgatctcgccgctcaagcacctgaccgacgtcaaccagccgatgcaacgcggcctgactgccgccgagttcatcttcggcctgatcgacacgccgatcgagccccaggacggcggcaagcacatcgaccgcgcgcgcggcgacctgcgcttcgagcacgtcaccttccgctacggcccggacggccgggcggcgctcgacagcatcgacctgcacgtcaaggcgggcgagatcgtcgcgctggtgggcccgtcgggcagcggcaagaccacgctggtcaacctgctgccgcgcttcttcgagccgacctcgggccgcatcgtgctcgacggcgacgcgctggccgacctgtcgctgcaggatctgcgccgccagatcgccttcgtgagccaggacgtggtgctgttcaacgataccattgccgccaacgtggcgtatggcgcgcgcgatgcctccgagatcgatatggcgcgcgtgcgtcgtgcgctggaagccgcctacctgaccgatgtggtcgacaacctgcctgatggcgtcgacaccaacatcggtgacaacggctccaagctgtccggcggccagcgccagcgcctggcgatcgcccgcgccgtctacaaggacgcgccgatcctgatcctggacgaagccacctccgcgctcgattccgagtccgagcgccaggtgcaggccgcgctggaagccctgatgcagggccgcacgacgctggtgatcgcgcaccgcctgtcgaccatcgagaatgccgaccgcatcgtcgtgctcgaacacggccagatcgtcgaggccggcacgcatcgcgagctgctcgatcgcgatgggttgtatgctggattgcatcgcatccagttcgccacgcaatag

SEQ ID NO: 7650 - protein, 592 aa, Ralstonia solanacearum
MAVTSSSSSQPPAASQPGHFKRLWAYLRPELSSFILAMVAMGVVAATEGIIPKVVKDLLDQGFGGEYAGKLWRVPAMLVGIAVVRGVAQFGATYFLSLVSNKVLLNLRMKMFERLLQAPAAFYQRNTAASLINAVIFEVNQVLQVLTGVFITLVRDSMTVLALLIFLFYTNWRLTLVVAVILPVIGFLMSRINRRLRSLNREHQNLTNEAAYVVEEAAGGYKVVKLHGGEAYESRRFNAMTNRLRGYAMRMAVAGGLNQPVTQFLAALALSVILAIAMVQAQANQTTVGGFTGFVMAMLLLISPLKHLTDVNQPMQRGLTAAEFIFGLIDTPIEPQDGGKHIDRARGDLRFEHVTFRYGPDGRAALDSIDLHVKAGEIVALVGPSGSGKTTLVNLLPRFFEPTSGRIVLDGDALADLSLQDLRRQIAFVSQDVVLFNDTIAANVAYGARDASEIDMARVRRALEAAYLTDVVDNLPDGVDTNIGDNGSKLSGGQRQRLAIARAVYKDAPILILDEATSALDSESERQVQAALEALMQGRTTLVIAHRLSTIENADRIVVLEHGQIVEAGTHRELLDRDGLYAGLHRIQFATQ

SEQ ID NO: 7651 - DNA, 1806 bp, Syntrophus aciditrophicus
  CDS (1)..(1806): transl_table=11
ttggcgggaaatcgcggctgcaagccgagaagatttgaaggaaatcaacgaatggatatctttaaacgccttttaaaactggccagacctcatgcccctcgattcgcggtggccatggtctgcatgctgatcgcgggggctttaacgtcatccctggcctttcttgtcaagccggccctggatgacatttttctcgacaggaatgcggaaatgctcaaatggattcccctggcgattatcctgatctatctggtcaaggggggatgcagttatttccaggccatactgatgagtttcatcggccagcggatcgttgccgatctgcggaaccggctctatgaacagatccagaagcagtctctgtcgttcttttcgaaaaatcccacgggcgttctcatgtcgcggatcaccaatgacgtgaattccattcagggcaccgtatccgacgcggtgacgagtctcatgaaagattcatttaccctgatctgtctggtgttcgtcatcttctaccgggactggcagctggctattatcgccatgatcgttttccccctgacgatttatcccattgccaaattcggtcagaaaatgagaagcgtcgccacccggacccaggtgaccatgggcagtctcaccaccctccttcaggagaccatttccgggacgcgcattgtcagggccttctgcatggaagcccatgaaaatcagcgctttgccagggaaaacgagaagctgatgcatctggccctgaaatctgtttcgatcaacgccctttccagtcccttcatggaatttctgggtggaatcggcattgccgccatcattttttatggaggctaccaggtcatcaaggggtcttccaccccgggtacctttttttccttcctgacggcgctgatcatgctttacgaaccggtcaagcggctgacgaacgtcaacaacacgattcagcaggggattgccggcgcccagcgggttttcagcatcatcgatcttgttcccgatattgtcgaccgggatgaagccgtggagcttccccggatatccgaaaaaatcgaaatccgcaatatctcctttgcctatgatgatacaccggtgttgcggaacatcaatctgaccatccgtgcaggcgaagtggtggcttttgtcggaatgagcggcggcggaaaaacgacgctggtcaatctgatccctcgtttttacgatgtgactgccgggcagatcctcatcgacgggcatgacatccgtgatgtctcgctgatatcgctgcgccgtcagatcgggatcgtcacgcagcagacgatcctgttcaacgatacggtgagaaacaatatcgcttacggcagccagggctgttcggaaaaggagatcatcgaggcggccagagcggccaatgcccacgatttcattgtgaatcttcctgaaggatacgatacggtcatcggcgaactgggcacaaagctttcgggaggagaacgtcaacggatttccattgcccgggcgctgctgaagaatgcccctatcctgatcctggatgaagccacctcgtctctggatacggaggcggagatggaagttcaagaggccctggaacgtctcatgaaggggaggacgaccctggtgatcgcccatcgtctgtccacgatccgcaatgccgaccggatcgtcgtgctggtcaagggcgaaattgtggaagaaggcgcccatgaaacgctgctggcccggagaggggaatattacaaactccatcagttgcaattcaaggaagacaaggtcggggaagaggttgggcggaacgattcctga

SEQ ID NO: 7652 - protein, 601 aa, Syntrophus aciditrophicus
MAGNRGCKPRRFEGNQRMDIFKRLLKLARPHAPRFAVAMVCMLIAGALTSSLAFLVKPALDDIFLDRNAEMLKWIPLAIILIYLVKGGCSYFQAILMSFIGQRIVADLRNRLYEQIQKQSLSFFSKNPTGVLMSRITNDVNSIQGTVSDAVTSLMKDSFTLICLVFVIFYRDWQLAIIAMIVFPLTIYPIAKFGQKMRSVATRTQVTMGSLTTLLQETISGTRIVRAFCMEAHENQRFARENEKLMHLALKSVSINALSSPFMEFLGGIGIAAIIFYGGYQVIKGSSTPGTFFSFLTALIMLYEPVKRLTNVNNTIQQGIAGAQRVFSIIDLVPDIVDRDEAVELPRISEKIEIRNISFAYDDTPVLRNINLTIRAGEVVAFVGMSGGGKTTLVNLIPRFYDVTAGQILIDGHDIRDVSLISLRRQIGIVTQQTILFNDTVRNNIAYGSQGCSEKEIIEAARAANAHDFIVNLPEGYDTVIGELGTKLSGGERQRISIARALLKNAPILILDEATSSLDTEAEMEVQEALERLMKGRTTLVIAHRLSTIRNADRIVVLVKGEIVEEGAHETLLARRGEYYKLHQLQFKEDKVGEEVGRNDS

SEQ ID NO: 7653 - DNA, 1737 bp, Staphylococcus aureus
  CDS (1)..(1737): transl_table=11
atgattaaacgatatttgcaatttgttaagccatataaatatcgtatttttgcaacgattattgttgggataattaagtttggtataccaatgcttataccacttttaattaaatatgcaatagatggcgtgattaataaccacgcactaacgactgatgaaaaagttcatcatttaactattgccattggtatcgcattatttatttttgtaatagtgagaccaccaattgaatttatacgtcaatatttggcgcaatggacaagtaataaaatattgtatgatatacgtaaaaagttatataaccatttacaagctttaagtgcgagattttatgctaataatcaagtaggtcaagtaatatctagagtgattaatgatgttgaacaaacaaaagatttcattttaaccgggttaatgaatatttggttagattgtataacaattattattgcactatccataatgttctttttagatgtgaaattgactttagcagcactgtttatcttcccattttacattttaacggtgtacgttttctttggaagattaagaaaattgacgcgtgagagatcgcaagcattagctgaggttcaaggattcttgcatgaacgtgttcaaggtatttcagtcgttaaaagttttgcgattgaagacaatgaagcgaaaaactttgataaaaagaatactaatttcttaacacgtgcgttgaaacatacaagatggaatgcctattcctttgccgcaattaatacagttacagatattggaccaattattgtcatcggtgttggtgcatatcttgctatttctggatcaatcacagtaggtacacttgcagcatttgttggatacttagagttattgttcgggcctttacgtcgtttagtcgcatcatttacaactttaacgcaaagttttgcttcaatggaccgtgtattccaattaattgacgaagattatgacattaaaaatggtgttggtgctcaacctattgaaattaaacaaggtcgtattgatattgatcatgttagttttcaatataacgataacgaagctccaattttaaaagatattaatttgagtattgaaaaaggagaaacagttgctttcgtaggtatgagtggtggtggtaaatcaacattaattaacttaataccgagattttacgatgtaacttctgggcaaattttaatagatggtcacaatattaaagattttttaacgggaagtttaagaaatcaaataggattggtgcaacaggataatattttattctctgatacagttaaggaaaatattttacttggtcgtccaacagcaacagatgaagaagtagttgaagcggcgaaaatggctaatgcacatgactttattatgaacttgccacagggatatgacactgaagtaggtgaacgaggtgttaaattatcaggtggtcaaaaacaaagattatcgattgctagaatatttttaaataatccgccaattcttatcttggatgaagcaacaagtgcacttgatttagaaagtgaatccattattcaagaagcattagatgtgttgagtaaagatcgaacgacacttatcgtagcgcatcgcttgtccactattacacatgctgacaaaattgtcgtaattgaaaatggacatattgttgaaacaggtacgcatcgtgaattgattgcaaaacaaggtgcttacgagcatttatatagcattcaaaacttataa

SEQ ID NO: 7654 - protein, 578 aa, Staphylococcus aureus
MIKRYLQFVKPYKYRIFATIIVGIIKFGIPMLIPLLIKYAIDGVINNHALTTDEKVHHLTIAIGIALFIFVIVRPPIEFIRQYLAQWTSNKILYDIRKKLYNHLQALSARFYANNQVGQVISRVINDVEQTKDFILTGLMNIWLDCITIIIALSIMFFLDVKLTLAALFIFPFYILTVYVFFGRLRKLTRERSQALAEVQGFLHERVQGISVVKSFAIEDNEAKNFDKKNTNFLTRALKHTRWNAYSFAAINTVTDIGPIIVIGVGAYLAISGSITVGTLAAFVGYLELLFGPLRRLVASFTTLTQSFASMDRVFQLIDEDYDIKNGVGAQPIEIKQGRIDIDHVSFQYNDNEAPILKDINLSIEKGETVAFVGMSGGGKSTLINLIPRFYDVTSGQILIDGHNIKDFLTGSLRNQIGLVQQDNILFSDTVKENILLGRPTATDEEVVEAAKMANAHDFIMNLPQGYDTEVGERGVKLSGGQKQRLSIARIFLNNPPILILDEATSALDLESESIIQEALDVLSKDRTTLIVAHRLSTITHADKIVVIENGHIVETGTHRELIAKQGAYEHLYSIQNL

SEQ ID NO: 7655 - DNA, 1815 bp, Bacillus subtilis
  CDS (1)..(1815): transl_table=11
atgctaaaagacatccgcaagcctttccaatatcccaaactgccaattgacaaaaaagaaggcgcgaaaaagcgggcgaaagcaaaggatacaaagggcacactgagacgaatctggtcttacttggctgaaagaaaaggactgctcatacttgtcatgctaatggttgtcatcagcgccatattcggactccttggtccctttgtgatcggaaaggccatcgaccattttatcgtcgggaaaacggtcagcggcttgattcctgttttgcttcttctgctcgctatctatatcattcagtccctgtcgctttggtttcaaaactattggatgattacgatctcgcagggcacggttttcagaatgagaagcgaattgttcacccatctgcatgagctgccgattccattttttgataaacagcggcacggcgagctgatgagccgggtgacgaatgacatcgaaaatgtcagttctaccttaaacacgtcagtcattcaaattttgtcaagtgtgatcacctttgtcgggacgattgcggtgatgctgtacatgagcccgctccttactttgattacgctgaccattattccggtgatggcagcgagcctgaaatggatcaccaaccgaacgggaaagctgtttaaagaacagcagaaaaaccttggtgatctgaatgggtatattgaggaatctgtttcaggcgcaaaggtcatcaaagcatattcacgtgagaagcagattactgctgaattcctcgaaaaaaacgctgcactcaagacgtcgggcttttgggcgcagacgatttccgggtttattccgaaggtcatgaactctttgaataacttaagctttacaatgattgcggcaatcggcggtttgtttgcgctgaaaggctggatctcgatcggctccatcgttgtctttgccgagtattcaagacaatttacacgccctttaaacgatctggccaaccagtttaatacgatgctgtccgcaatcgccggcgctgaacgggtgtttgacgtgcttgatgaaaaagaagagcgcgaggatgaaaagaacgccgtgcatcagcccatccaaacaggcagcattgaattccgggatgtgtccttcggttacgataaagggcagcagacactgaagcatttacagtttaccgtgcctgcggggcagtccatcgcgtttgtaggaccgacgggggcggggaagacaaccgtcactaaccttctcgcccgtttttacgagcctaacgatggaaaaattttaatcgatggtacagatattaaaacccttactagagcaagcctaagaaaaaacatggggtttgttcttcaggattctttcttatttcagggaacgatcagagaaaacattcgctacggcaggcttgatgcttctgatcaggaagtcgaagccgctgcaaaaacagcgaatgcccatagttttattgaaaggctgccaaaagggtatgacaccgtactgacgcaaaacggttcgggcatcagtcaagggcagaagcagttgatttctatagcgagggcggtgcttgccgatccggttcttctcattttggatgaagcgacaagcaacattgataccgttacagaagtcaacattcaagaagcgctcgcccgtttaatggaaggaagaacaagcgtcatcattgcccacaggctgaacaccattcaaagagcggaccagattgtggtgctaaaaaacggtgaaatgattgaaaaaggcagccatgacgagctgattcggcaaaaaggattttacagtgacttatatgaaagccaatttgagaaatag

SEQ ID NO: 7656 - protein, 604 aa, Bacillus subtilis
MLKDIRKPFQYPKLPIDKKEGAKKRAKAKDTKGTLRRIWSYLAERKGLLILVMLMVVISAIFGLLGPFVIGKAIDHFIVGKTVSGLIPVLLLLLAIYIIQSLSLWFQNYWMITISQGTVFRMRSELFTHLHELPIPFFDKQRHGELMSRVTNDIENVSSTLNTSVIQILSSVITFVGTIAVMLYMSPLLTLITLTIIPVMAASLKWITNRTGKLFKEQQKNLGDLNGYIEESVSGAKVIKAYSREKQITAEFLEKNAALKTSGFWAQTISGFIPKVMNSLNNLSFTMIAAIGGLFALKGWISIGSIVVFAEYSRQFTRPLNDLANQFNTMLSAIAGAERVFDVLDEKEEREDEKNAVHQPIQTGSIEFRDVSFGYDKGQQTLKHLQFTVPAGQSIAFVGPTGAGKTTVTNLLARFYEPNDGKILIDGTDIKTLTRASLRKNMGFVLQDSFLFQGTIRENIRYGRLDASDQEVEAAAKTANAHSFIERLPKGYDTVLTQNGSGISQGQKQLISIARAVLADPVLLILDEATSNIDTVTEVNIQEALARLMEGRTSVIIAHRLNTIQRADQIVVLKNGEMIEKGSHDELIRQKGFYSDLYESQFEK

SEQ ID NO: 7657 - DNA, 1728 bp, Bacillus subtilis
  CDS (1)..(1728): transl_table=11
gtgctgcggcaatttttttcatattataaaccatataaaacgttgttctttctcgactttttctcagcgatcgcgggaggtttaatggagctgagttttcctttgatcgtcaattattttattgataccttgctgccgggcagggactggggactgatcatcgcgacctcaatcgggttatttgcggtgtacgcgctcagctcggctcttcagtatatcgtgacctactggggacacatgcttggtatcaatattgagactgatatgagaaagtcgctttttgaccatttgcaaaagctctcgttcaaattttacgacaacaacaagacgggaacgctgatgtcgaagctcacgaacgatttaatgtatatcggtgaagtcgcccatcacggaccggaagacttattcattgcggtcatgaccattctcggggcgttcggagtgatgctgtttattaactggcagcttgctttattaacgtttatcattatgccgatcgtcatttggctagcgctttatttcaacaaaaaaatgaccaaagcatttaccacgctgaacaaggatatcggagacttcagcgcgcgtgtagaaaataacatcggcggcatccggcttgtgcaggcgttcggaaatgaagcatttgaaaaagaacgcttcgccgtcaacaaccagcgttttcgtgtcacaaagctttcttcctacaaaatcatggcgaaaaacggttcaatcagctatatgctgacccggtttgtcacgctgtttgtccttttgtgcgggacgtggtttgtcattcgcggctccttatcgtacggggaatttgtggcgtttgtactcttgacgaatgtgctgttcaggcctattgacaaaattaatgccattatcgaaatgtatccgagggggatcgcgggtttcaaaagctatatggagctcatggagacagagccggatattcaggactcacctgattcgaaagatgtttccggcctgaagggcaatatccgctataaacatgtttcgtttggctatgatgaccatcacaatgtcctcaatgacatcaacctatccattcaagcgggggaaacggtggcgttcgtcggtccgtcaggtgctgggaaatcaacgctttgcagtctgcttccgcgtttttatgaagcatcggagggcgacattacgattgacggcatcagtataaaagacatgacgctttcttcgttgcgcgggcagattggcgtcgtgcagcaggacgttttcttattctcgggcacgcttagagaaaatatcgcctacggccgactaggcgcatcagaagaagacatttggcaagctgtgaagcaggcgcatctggaagagctcgtccataacatgcccgatgggttggatactatgattggcgaacgcggcgtgaagctttccggcgggcaaaaacagcgtctgtcaattgcaaggatgttcttgaaaaatccgtcgatcttgattctcgacgaagccacctcagcccttgatacagagacggaagcggcgatccaaaaggcgcttcaagagttgtctgaggggcgcacgacgcttgtcatcgcccacaggctggcaacaatcaaagacgcggacagaattgtagtcgtcacaaacaacggtattgaagaacaaggccgtcatcaagacctgatcgaagccggaggcctatacagcaggctgcatcaagcgcaattcgggcaaatggtgcatcgatag

SEQ ID NO: 7658 - protein, 575 aa, Bacillus subtilis
MLRQFFSYYKPYKTLFFLDFFSAIAGGLMELSFPLIVNYFIDTLLPGRDWGLIIATSIGLFAVYALSSALQYIVTYWGHMLGINIETDMRKSLFDHLQKLSFKFYDNNKTGTLMSKLTNDLMYIGEVAHHGPEDLFIAVMTILGAFGVMLFINWQLALLTFIIMPIVIWLALYFNKKMTKAFTTLNKDIGDFSARVENNIGGIRLVQAFGNEAFEKERFAVNNQRFRVTKLSSYKIMAKNGSISYMLTRFVTLFVLLCGTWFVIRGSLSYGEFVAFVLLTNVLFRPIDKINAIIEMYPRGIAGFKSYMELMETEPDIQDSPDSKDVSGLKGNIRYKHVSFGYDDHHNVLNDINLSIQAGETVAFVGPSGAGKSTLCSLLPRFYEASEGDITIDGISIKDMTLSSLRGQIGVVQQDVFLFSGTLRENIAYGRLGASEEDIWQAVKQAHLEELVHNMPDGLDTMIGERGVKLSGGQKQRLSIARMFLKNPSILILDEATSALDTETEAAIQKALQELSEGRTTLVIAHRLATIKDADRIVVVTNNGIEEQGRHQDLIEAGGLYSRLHQAQFGQMVHR

SEQ ID NO: 7659 - DNA, 3738 bp, Oryza sativa
  CDS (1)..(3738)
atgggaggcggcgacggcggcgccggcaaggcgaaggcgaggccggtgttctcgtcgttcatgacagtgttcatgcacgcggacgcggcggacgtggcgctgatggtgcttgggcttctgggcgccatgggcgacggcatctcgacgccggtgatgctgctcatcaccagccgcatcttcaacgacctcggcagtggcgccgacatcgtcaaggagttcagctccaaggtcaacgtgaacgccaggaacctcgtcttcttggccgccgcctcttgggtgatggcgttcctagaggggtattgctgggcgaggacggcggagcggcaggcatcgcggatgcgggcacggtaccttcgggcggtgctccggcaagacgtggagtacttcgacctgaagaaggggtcgacggcggaggtgatcaccagcgtgtccaacgacagcctcgtggtgcaggacgtgctgagcgagaaggtgcccaacttcgtcatgaacgccgccatgttcgccggcagctacgccgtcgggttcgcgctgctgtggcggctgacgctggtggcgctgccgtcggtggtgctgctcatcatcccggggttcatgtacggccgcatcctcgtcggcctcgcccgccggatcagggagcagtacacccgccccggcgccatcgccgagcaggccgtgtcgtcggcgcgcacggtgtactcgttcgtggcggagcggaccaccatggctcagttctcggcagcgctcgaggagtcggcgcggctcgggctcaagcaggggctcgccaagggcatcgccgtcggcagcaacggcatcaccttcgccatctgggccttcaacgtctggtacggcagccgcctcgtcatgtaccatggataccagggcggcaccgtcttcgccgtctccgccgccattgtcgtcggtggcctagcgctggggtcggggctgtccaacgtgaagtacttctcggaggcgagctcggcggcggagaggatcctggaggtgatccggcgggtgccgaagatcgactccgagagcgacaccggtgaggagctggccaacgtcaccggcgaggtggagttccggaacgtggagttctgctacccgtcgcggccagagagccccatcttcgtcagcttcaacctccgcgtgccggcggggcgcaccgtggcgctggtcggcggtagcgggtccggcaagtcgacggtgatcgcgctgctggagcggttctacgacccgtcggccggcgaggtgatggtcgacggcgtggacatccggaggctccggctaaagtggctgcgagcgcagatggggctggtgagccaggagccggcgctgttcgccaccagcatcagggagaacatcctgttcggaaaggaggaggccacggcggaggaggtggtcgccgccgccaaggcggccaacgcacacaacttcatctcccagctgcctcagggctacgacacacaggtgggcgagcgtggtgtccaaatgtctggggggcagaagcagagaattgctattgcgagagcaatcctgaaatcacccaagatcctcctccttgatgaagccactagtgcattggacactgagtcagagcgcgttgtacaggaggcccttgacctggcatctatgggccggactactattgtgattgcacatcgcctatccactatccgcaatgctgacataattgctgtcatgcagtccggtgaggttaaggagctgggaccccatgatgagctcattgccaatgataatggcctctattcatctcttgtgcgccttcaacagaccagagattcaaatgagattgatgagattggtgtaactggtagtacatccgctgtagggcagtccagcagccacagcatgagcaggaggttctctgcagctagcaggtcaagctcagcaaggtcattgggtgatgcaagagatgatgacaacactgagaagccaaagcttccagtgccatccttcagaaggctacttatgcttaatgcaccagagtggaagcaagcactaatggggagttttagcgcagttgtgtttggaggcatccagccagcatatgcatatgccatgggaagcatgatctcagtctacttcttgacagatcatgcggagatcaaggacaaaacaaggacctacgcactcatcttcgtaggtctagcagtgctctcatttttgataaatattggtcagcattacaactttggtgcaatgggggaatacctcaccaagagaatcagggagcagatgcttgcaaagatcctcaccttcgaaattgggtggtttgaccgtgacgagaactccagtggtgccatatgctcacagctagctaaggacgccaacgttgtgaggtctctcgtgggtgatcgaatggctctggtgatccagactatttcagcagtgcttattgcatgcaccatgggtctggtcattgcctggcgtttggcccttgttatgatagcagtgcagcctctgatcattgtttgcttttatgctcgccgtgtcttactcaagagcatgtccaagaaatcaatacatgcacaagctgaaagtagcaagctagctgctgaggcagtctccaatcttcgtacaattacagccttctcatcccaagagcgcatcttacgcctttttgaacaatcacaagatggaccacgcaaggaaagcatccggcaatcatggtttgcagggctcggactcggcacctccatgagccttatgacatgcacatgggcccttgacttttggtatggtggcaggcttatggctgagcaccacattagtgctaaggagctcttccaaaccttcatgattctagtaagcacaggtcgtgtgattgcagatgcaggaagcatgacaacagacctagctaagggtgcagatgcagttgcttcagtatttgctgttcttgaccgggaaacagaaattgatcctgacaaccctcagggatacaagccagagaagctcaaaggcgaggtggacatcagaggagtcgattttgcatacccatcaaggccagatgttataatcttcaaagggttcacattgagcatccaaccaggcaagtcaacagccctggttgggcaaagtggctctggcaagtcaaccatcattgggctcatagagaggttctacgacccaattagggggtcggtgaagatagatggaagggatatcaaagcatataatcttcgagccctgcggcggcacattggactggtcagccaagagccaacactatttgcaggtacaatcagagaaaacattgtgtatggcacagaaacggctagtgaggcggaaattgaggatgcagcaagatctgctaatgcacatgacttcatcagcaacctgaaggatggatatgacacgtggtgtggtgagagaggagttcagttatcaggagggcagaaacaacgcattgcaattgcccgtgccatcctgaagaacccagctatcctacttctggatgaggctacaagtgcgctagacagccagtctgagaaagtggtacaagaggcactggatcgggtgatgattggcagaacaagtgtggtggtcgcacacaggctcagcactatacaaaactgcgaccttatcactgtgctcgaaaaagggacagttgtggagaagggcacacacgcatccctcatggccaagggcctctctggaacatattttagcttggttaatttgcaacaaggaggcaatcagcaggtccagcactga

SEQ ID NO: 7660 - protein, 1245 aa, Oryza sativa
MGGGDGGAGKAKARPVFSSFMTVFMHADAADVALMVLGLLGAMGDGISTPVMLLITSRIFNDLGSGADIVKEFSSKVNVNARNLVFLAAASWVMAFLEGYCWARTAERQASRMRARYLRAVLRQDVEYFDLKKGSTAEVITSVSNDSLVVQDVLSEKVPNFVMNAAMFAGSYAVGFALLWRLTLVALPSVVLLIIPGFMYGRILVGLARRIREQYTRPGAIAEQAVSSARTVYSFVAERTTMAQFSAALEESARLGLKQGLAKGIAVGSNGITFAIWAFNVWYGSRLVMYHGYQGGTVFAVSAAIVVGGLALGSGLSNVKYFSEASSAAERILEVIRRVPKIDSESDTGEELANVTGEVEFRNVEFCYPSRPESPIFVSFNLRVPAGRTVALVGGSGSGKSTVIALLERFYDPSAGEVMVDGVDIRRLRLKWLRAQMGLVSQEPALFATSIRENILFGKEEATAEEVVAAAKAANAHNFISQLPQGYDTQVGERGVQMSGGQKQRIAIARAILKSPKILLLDEATSALDTESERVVQEALDLASMGRTTIVIAHRLSTIRNADIIAVMQSGEVKELGPHDELIANDNGLYSSLVRLQQTRDSNEIDEIGVTGSTSAVGQSSSHSMSRRFSAASRSSSARSLGDARDDDNTEKPKLPVPSFRRLLMLNAPEWKQALMGSFSAVVFGGIQPAYAYAMGSMISVYFLTDHAEIKDKTRTYALIFVGLAVLSFLINIGQHYNFGAMGEYLTKRIREQMLAKILTFEIGWFDRDENSSGAICSQLAKDANVVRSLVGDRMALVIQTISAVLIACTMGLVIAWRLALVMIAVQPLIIVCFYARRVLLKSMSKKSIHAQAESSKLAAEAVSNLRTITAFSSQERILRLFEQSQDGPRKESIRQSWFAGLGLGTSMSLMTCTWALDFWYGGRLMAEHHISAKELFQTFMILVSTGRVIADAGSMTTDLAKGADAVASVFAVLDRETEIDPDNPQGYKPEKLKGEVDIRGVDFAYPSRPDVIIFKGFTLSIQPGKSTALVGQSGSGKSTIIGLIERFYDPIRGSVKIDGRDIKAYNLRALRRHIGLVSQEPTLFAGTIRENIVYGTETASEAEIEDAARSANAHDFISNLKDGYDTWCGERGVQLSGGQKQRIAIARAILKNPAILLLDEATSALDSQSEKVVQEALDRVMIGRTSVVVAHRLSTIQNCDLITVLEKGTVVEKGTHASLMAKGLSGTYFSLVNLQQGGNQQVQH

SEQ ID NO: 7661 - DNA, 2367 bp, Oryza sativa
  CDS (1)..(2367)
atggttggtgagcatggcacacagctatctggtggacagaaacaaagaattgcaattgcaagagcaattttgaaggaccctaggatactacttcttgatgaagctacaagcgcccttgatgctgaatctgagcatgtagttcaggatgcactcaataatatcatggttaacaggaccaccataattgtagcccatcgcctgagcacagtgagaaatgctgatacaatatctgtgctacatcgtggacaacttgtggaacaaggacctcatgctgagttgataaaatattccaatggagcatactatcaacttttacagcttcaagaggtaaacgcgagaaggaatggaacttatgaacttgaccccaataggctatctgatgttgcaaacagactatctgatgttgcaaacagactatctgatgctgcgaacagactatctgatgctggaaattttgtaagtcgacatagcattagaaagctatcctttgagagatctatgagcagacattcgtcactgggtggaagcagaaggaattcacagacatatgcattgactgaagatgaaatcgaagggtgtgatgacacgaagtctggcaagaatgtacttaggcgcttactacaccttcataagcctgaaactgcaatccttctgttaggatgcattgccgcctccgccaatggagctatacttccagtgtttggcctgttgctttcaagtgccatcaacgcattctatgaaccaccacacaaactgcgaaaagattcagtgttctgggcagaaatatacgtgatcttgggtgttgtatccatctttatcataccagtgcaacacactttgttcaacatggcaggtgggaagcttatcgagcgtatacgtgccttatcatttagtcgggttgtttaccaggatattggatggtttgatgaccctctgaacagcagtggcgcaataggtgctaggctatccgcagatgccgcatccgtcaaaagcattgctggagatgttttatcattgatcgttcaaagtataagcactgctcttgtcggcattgtaatagctatgattgcaaactggaagctagcattcatagtcttgtgcttcgttccctgtgtatttgcgcagagttatgctcaatcaaggttaatgaggggatttggtgctgatgcaaaggaaatgtatgaacaagcgagcacaattgctagtgatgccatcagtaacattagaactgtcacttcattctgtgtaggagagaagataattgaaagctaccgaaataaatgcaaaggtcctgtgaagaaaggagtccgtcagggagctataagtggtgtgggttatggattctcatttgccttgctcttctgcttttatgctgtatcgttttatgtcggagcacgctttgtacacaatggaacagctgacgttggggaagtttttaaggtcttctttgctttaacaatgatggctgttggagtttcacaatcgagttctcttgctcgggattttagcaaagtgcaagatgcggcagcctccatttttaagattatagataggaaatccaagatagatgcaagctcagatgatggaatggctccagagaaaattgaggggaatatagagtttcagcatgtgagcttcaagtatccagctcgaactgacgtgcagatcttcacaaatttgtgcttgaggatcccatctggcaaggtacatgtggttctcatgactgttgcgcttgttggtgaaagcggaagcggtaaatcaacagtggtagccttgctagagaggttctatgaccctgactctggcgccatctttctagacggcatggaccttaagaccctcaagctcacctggctcaggcagcagatagggctagtgggccaagaaccggttctcttcaacggcaccatcagagcaaacatcgcctacggcaagcaggatcaggtgtccgaggaggagatcgtcgctgtcgccgaggccgccaacgcccaccgcttcatctcctcgctcccgcacgggtacgacaccagcgtcggcgagcgtggcgtgcagctctccggcgggcagaagcagcggatcgccatcgcgcgggcgatcctcaaggaccccaaggtgttgctcctggacgaggcgacgagcgcgctggactctgagtcggagcgcatcgtgcaggaggctctggacagggtgatggtcgggcggacaacggtgatcgtggcgcaccggctgtcgaccatcaccggcgccgacaagatcgccgtcatcaagaacggcgtcgttgccgaggaaggccggcacgggcggctgctgcgcttgcccggtggagcttatgcgtcccttgttgccttgcagtctagcagttcgtga

SEQ ID NO: 7662 - protein, 788 aa, Oryza sativa
MVGEHGTQLSGGQKQRIAIARAILKDPRILLLDEATSALDAESEHVVQDALNNIMVNRTTIIVAHRLSTVRNADTISVLHRGQLVEQGPHAELIKYSNGAYYQLLQLQEVNARRNGTYELDPNRLSDVANRLSDVANRLSDAANRLSDAGNFVSRHSIRKLSFERSMSRHSSLGGSRRNSQTYALTEDEIEGCDDTKSGKNVLRRLLHLHKPETAILLLGCIAASANGAILPVFGLLLSSAINAFYEPPHKLRKDSVFWAEIYVILGVVSIFIIPVQHTLFNMAGGKLIERIRALSFSRVVYQDIGWFDDPLNSSGAIGARLSADAASVKSIAGDVLSLIVQSISTALVGIVIAMIANWKLAFIVLCFVPCVFAQSYAQSRLMRGFGADAKEMYEQASTIASDAISNIRTVTSFCVGEKIIESYRNKCKGPVKKGVRQGAISGVGYGFSFALLFCFYAVSFYVGARFVHNGTADVGEVFKVFFALTMMAVGVSQSSSLARDFSKVQDAAASIFKIIDRKSKIDASSDDGMAPEKIEGNIEFQHVSFKYPARTDVQIFTNLCLRIPSGKVHVVLMTVALVGESGSGKSTVVALLERFYDPDSGAIFLDGMDLKTLKLTWLRQQIGLVGQEPVLFNGTIRANIAYGKQDQVSEEEIVAVAEAANAHRFISSLPHGYDTSVGERGVQLSGGQKQRIAIARAILKDPKVLLLDEATSALDSESERIVQEALDRVMVGRTTVIVAHRLSTITGADKIAVIKNGVVAEEGRHGRLLRLPGGAYASLVALQSSSS

SEQ ID NO: 7663 - DNA, 3909 bp, Oryza sativa
  CDS (1)..(3909)
atggccgcgcgaggcagcgagggaggggaggaggcggaggtggaggggaaggcggggctgcaccggctgttcaggtacgcggacggggtggacgcgctgctcatggcggccggcgcggcaggggcggccgcgagcggcgctgcgcagccgctcatgaacctcgtcttcggcgaggtcgtcgacgccttcggctccggctcccgcgacgacgtcctccaccgcgtctccaaggcaccagcagaagtttggtttctacgacgcgcggccacgtcgcggccgattgatgcgtggaagtgctggaattcggccttagctaatctgacagtgttgtttcaggtgtgcctgaagttcttctatttggctattggatcatggtttgcttgcttcctccaggttgcatgttggatgattactggtgaaagacaagctgcccgcatacgagggctatatcttgaagctgtattgaggcaagatattgcattttttgaaaaggagatgacaactggacaagtagttgagaggatgtctggagatacaatactcatccaggatgcaattggtgaaaaggttgggaagtttatacaactcactgctacatttgtggggggtttcgtagtttctttcgctaaaggatggcttttatcatgtgtcatgctctcaagtattcctcctataataatcgctggagcaactatgtcatggactatatcaaagctgtcaactcatggtcaatccaagtataatgaagcagggaatgttgttgaacagacgattggagctatcagaacggttgcttcattcaatggtgagaaccgagccattgcactatacaacaaatacattcacagtgcatatgtctctgctgttcaagaaagcactgcaactggcctgggctttggttttattatgtttatgctgttttgcacgtatggtctagcagcatggtatggggcgaaattgattatcgataaaggatatgaaggagggcaagttgtcactgtctggatggcattcatgactggtgcaatgtcactgggtgaggcaacgccgtgtatgtctgcttttgcttctgggcaggctgctggttatagaatgatgcaaacaatcgaacgaatgccaacaattaattctagtggaacagatggtgccgtattagagaacatcaaaggtgacatagagctgaggaatgtgtacttcagctatccatccaggcctgaccagttgatatttgatgggttttcgttacatgtcttgaatggcataactatggctatagtaggggagagtggcagcggaaagtcaacggtgattaatcttgtcgagagattctatgatccacaggctggtgaagttttgattgatggtgttaacataaagactctgaggcttaggtggattagggaaaagatcggccttgtcagtcaggaaccactgctgtttgccactagtatccgagagaacattgtctacggaagagaagatgcaacgactgaggagataatggctgcaacagagcttgctaatgcagcgaagttcattgagaatctacctaatggcctggacacaatggttggtgaacatggagctcagctatctggagggcaaaagcaaagaattgctatcgcaagagcgatccttaaaaatcccaaaatcttgctgcttgatgaagcaactagtgcactagacatggaatctgagcgagtggttcaagaggcccttaatagaattatgcaagacaagaccacgattgtagtagctcatcggctgagcaccataaaagatgctgacattatatcagtcgtgcagcatggaagagtagttgaacaaggcacgcatactgaactactcaaggacccaagtggtgcatattctcaacttatacaactgcagggtgcaactgaagaactgcataaatctggtgtcggttatcaaaggtctatttcaactgtccgaagtgtcatgtccattagcaaatctagaggccgcaatgcatcatttaagagatcattaagtcgaggaacttcatttgggagtactagtgtgcatttaaccacagcagctggtatgatagtccctgagagcatgcatactgaggtaccatccaaggtattagatgacaatgaagagcacaagaaggtgcccctctgtcgacttatatctcttaacaaaccagagataccagttcttctattaggtacagctgctgcagttgtagcaggtgttctcttcccaatgttaggtttgctgatctccagttccataaaatcgttctatgagccaccacatcaacttaagaaagatgcacggttctggacattgatgtatgtagcagctggaattgtttcccttgtttccttgccaatggaaaatttcctatttggagtggctggtgggaaattggtggagcgcattcgttctttatcttttaaaagaattgttcatcaagaagtcagttggtttgataatccctcaaatgcaagtggaacaattggtgcgaggctatctgttgatgcttcaaatattcggcgtcttgtaggagactcgttagcgttgattgttcgaagctctgttacaattattgctggatttatcattgcaatggttgcaaactggaggcttgcccttgttgccacggttgtgcttcctttgggaggtctccaggggttcttccagataaagtttttggagggattcagtgcagatgctaaggtaaagtatgaagaagcaactcaagtagcacatgatgctgtcagtagcatacggactgtcgcttcgttctgtgcggagaataggataatgaaggcttactacaaaaaatgtgaagctccggtgcgacaggggatacgtcaagggattgtcagtggcttgggtttcggcatatcattctttgtgctctattctacatatgccctttgtttctatgtaggagccaagttcatgcttgatggcaaggccacattcactgaaatattcagggtgttctttgctttgctcatggcaaccataggagtttcccagacaagtgcgatgggttcagattctgccaaggccaaggcgtcggcatcctcaatatttgccatgattgaccgtgaatcgaagatcgactcgagcagtgatgacggcatggtcttagctaatgtggctggtgagctcgaactccaccacgtctgtttctcatacccatcacgcccagacatacaaatattcagaaatctgtcactgagaataccatcaggaaagatggttgcccttgtcggagagagcggctgtggcaaatcaaccgtgatagcactactggaaagattttacgaccctgattcaggaacagtgacactagacggcgtcgacatcaagaacctcaaagtcgggtttctgcggcagcagatggggctggtgagccaagagcccgtcctgttcaacgacacggtccgcgccaacatcgcctacggcaaggaaggcgacgccacggaggaggagatcgtcgccgccgcgagggccgcgaacgcgcaccagttcatctcggcgctgcccgggggctacgacacctgcgccggcgagaggggcgtccagctctccggcgggcagaagcagcgcgtggccatcgcgagggccatcctcaaggaccccaggatcctcctcctcgacgaggcgacgagcgcgctggacgccgagtcggagcgcgccgtccaggcggcgctggagtcggtgatggtcggccggacgacggtcgtggtggctcaccggctgtcgacgatcaggggcgccgacgtgatcgccgtcctcagggacggcgaggtcgtggccacggggaggcacgtggagctgatggcgaagaaggatggcgtgtacgcttcgttggtggagctccgcatgagctccgaacgcgccggtgactccaagccctcgtga

SEQ ID NO: 7664 - protein, 1302 aa, Oryza sativa
MAARGSEGGEEAEVEGKAGLHRLFRYADGVDALLMAAGAAGAAASGAAQPLMNLVFGEVVDAFGSGSRDDVLHRVSKAPAEVWFLRRAATSRPIDAWKCWNSALANLTVLFQVCLKFFYLAIGSWFACFLQVACWMITGERQAARIRGLYLEAVLRQDIAFFEKEMTTGQVVERMSGDTILIQDAIGEKVGKFIQLTATFVGGFVVSFAKGWLLSCVMLSSIPPIIIAGATMSWTISKLSTHGQSKYNEAGNVVEQTIGAIRTVASFNGENRAIALYNKYIHSAYVSAVQESTATGLGFGFIMFMLFCTYGLAAWYGAKLIIDKGYEGGQVVTVWMAFMTGAMSLGEATPCMSAFASGQAAGYRMMQTIERMPTINSSGTDGAVLENIKGDIELRNVYFSYPSRPDQLIFDGFSLHVLNGITMAIVGESGSGKSTVINLVERFYDPQAGEVLIDGVNIKTLRLRWIREKIGLVSQEPLLFATSIRENIVYGREDATTEEIMAATELANAAKFIENLPNGLDTMVGEHGAQLSGGQKQRIAIARAILKNPKILLLDEATSALDMESERVVQEALNRIMQDKTTIVVAHRLSTIKDADIISVVQHGRVVEQGTHTELLKDPSGAYSQLIQLQGATEELHKSGVGYQRSISTVRSVMSISKSRGRNASFKRSLSRGTSFGSTSVHLTTAAGMIVPESMHTEVPSKVLDDNEEHKKVPLCRLISLNKPEIPVLLLGTAAAVVAGVLFPMLGLLISSSIKSFYEPPHQLKKDARFWTLMYVAAGIVSLVSLPMENFLFGVAGGKLVERIRSLSFKRIVHQEVSWFDNPSNASGTIGARLSVDASNIRRLVGDSLALIVRSSVTIIAGFIIAMVANWRLALVATVVLPLGGLQGFFQIKFLEGFSADAKVKYEEATQVAHDAVSSIRTVASFCAENRIMKAYYKKCEAPVRQGIRQGIVSGLGFGISFFVLYSTYALCFYVGAKFMLDGKATFTEIFRVFFALLMATIGVSQTSAMGSDSAKAKASASSIFAMIDRESKIDSSSDDGMVLANVAGELELHHVCFSYPSRPDIQIFRNLSLRIPSGKMVALVGESGCGKSTVIALLERFYDPDSGTVTLDGVDIKNLKVGFLRQQMGLVSQEPVLFNDTVRANIAYGKEGDATEEEIVAAARAANAHQFISALPGGYDTCAGERGVQLSGGQKQRVAIARAILKDPRILLLDEATSALDAESERAVQAALESVMVGRTTVVVAHRLSTIRGADVIAVLRDGEVVATGRHVELMAKKDGVYASLVELRMSSERAGDSKPS

SEQ ID NO: 7665 - DNA, 1902 bp, Glycine max
  CDS (1)..(1902)
atgaacggcttaagaagtgaaagagcccctctcttggaggctgagcgtgctggaagaggaaagagggatggtgcctcggaaggtcaagcctcagaccttgaacatggtgatgcagtgccggcggaaaatgtgggattctgtagagtgctttcacttgcaaaacctgaggctggaaaattaatgatcggtacagtggctctgttgattgcagccacatcaagtatattagttcaaaaatttggtgggaagataattgacattgtctcaagggaaatgaaaactccagaggagaaagatgaagctttgaatgctgttaagaacaccatactagaaatctttctgatcgttgtcttcggttcaatttgcactgcacttcgagcttggcttttttatactgctagtgaaagggttgttgcacgactgagaaagaatttgttcagtcatcttgtaaaccaggagatagccttctttgatgttactcgaactggggagcttttaagtaggctatctgaagatacacagatcataaagaatgctgcaactaccaatctttctgaggccctgagaaacttttcaactgcattaattggtctgagcttcatgtttgcaacatcatggaagttaacattgttggctttggctgttgtacctgttctttctgttgctgttcgcaagtttggccgttacctgcgtgaactttctcataaaactcaagctgcagctgcagttgcttcatcaatagctgaggaatcctttggtgcaataagaacagtaagatcatttgcccaagaagattatgaagtaacacgctactcagagaaagttaatgaaacacttaatcttggtcttaaacaagctaaaattgttggactcttttctggaggccttaatgctgcatctacactttcagtcattatagttgatatatatggagctaatttgacaataaagggttacatgtcctcgggtgatcttacatctttcattctttatagtctctcagtgggttcttctatatccggtctgtcaggattgtatacagtagttatgaaagctgcaggtgctagcagaagggtatttcaacttttggatcgtacctcatccatgcctaagtcaggagataaatgtccacttggtgatcaagatggggaagtagaactagatgatgtgtggtttgcctatccatcacgccctagtcatccggtgctcaagggcattacattgaagctgcatccaggatcaaaggttgctcttgtcggtccaagtggtggtggaaagagtacaattgcaaacttaattgaaagattttatgacccaaccaaggggaagattctactgaatggggttcctttggtagaaatatcacacaagcatttacacagaaagatcagtatagtgagtcaggagcctacactcttcaactgttccatagaggagaacatagcttatggatttgatggcaaagtgaacgatgttgatatagaaaatgctgctaaaatggccaatgcacatgaatttatatcaaaattcccagaaaaataccagacctttgttggagagcgtggggtaaggctttcaggagggcagaaacagagaatagcaattgctagagccctgcttatggacccaaaaattctcctcttggatgaagccaccagtgccctagatgctgaaagcgaatacctagtgcaggatgccatggagtctctcatgaaaggaagaacagttctagtcattgctcacaggttatccacagttaaaactgctgatactgttgcagttatatctgatggccaagtagttgagagaggcaaccatgaagagcttctcagcaagaacggtgtctatactgcattggtcaagagacaactgcaaacaacaaaagccgaaatctcggtttag

SEQ ID NO: 7666 - protein, 633 aa, Glycine max
MNGLRSERAPLLEAERAGRGKRDGASEGQASDLEHGDAVPAENVGFCRVLSLAKPEAGKLMIGTVALLIAATSSILVQKFGGKIIDIVSREMKTPEEKDEALNAVKNTILEIFLIVVFGSICTALRAWLFYTASERVVARLRKNLFSHLVNQEIAFFDVTRTGELLSRLSEDTQIIKNAATTNLSEALRNFSTALIGLSFMFATSWKLTLLALAVVPVLSVAVRKFGRYLRELSHKTQAAAAVASSIAEESFGAIRTVRSFAQEDYEVTRYSEKVNETLNLGLKQAKIVGLFSGGLNAASTLSVIIVDIYGANLTIKGYMSSGDLTSFILYSLSVGSSISGLSGLYTVVMKAAGASRRVFQLLDRTSSMPKSGDKCPLGDQDGEVELDDVWFAYPSRPSHPVLKGITLKLHPGSKVALVGPSGGGKSTIANLIERFYDPTKGKILLNGVPLVEISHKHLHRKISIVSQEPTLFNCSIEENIAYGFDGKVNDVDIENAAKMANAHEFISKFPEKYQTFVGERGVRLSGGQKQRIAIARALLMDPKILLLDEATSALDAESEYLVQDAMESLMKGRTVLVIAHRLSTVKTADTVAVISDGQVVERGNHEELLSKNGVYTALVKRQLQTTKAEISV

SEQ ID NO: 7667 - DNA, 3867 bp, Glycine max
  CDS (1)..(3867)
atggcacctgtggcttccaccaccgggaaggagatggagacggtggaggggaattgttctaatggcgagaaggaactatggaacaaggtgttcaagaggtcgagaattttgaggcatagaaatcccacctgggatatgggaagcaaagatggatttttccgttatgcagatggctttgacaaattgctattactctttgggactttgggttgcattggaggtggcctacaaacccctatgacaatgcttgttcttggcagtttgatagatgattatgctggtggatctggacatgctgtgtccaaccatgttattgacaagtacgctctaaggctgctgggtgttgctattggggttgctctatcctcctttatagaaggggtatgttggacaagaacagcagaaagacaaacttcccgcatgagaactgaatatcttaaatcagtcctaaggcaagaagttggtttcttcgacaagcaaactgactcttcctcaacttttcaagttattgccaccataacttctgatgctcaaacaatacaagataccatggctgataaggtgcccaattgtcttggtcacctctcagcatttttctctagctttgtagtggcactcttcctttcatggagacttgcactagctgcttttccattttcaatcataatgatcatgccagctatcatatttgggaagaccatgaaagagctgggaaataaaatgaaggatgcatatggagttgctggtagcatagctgaacaaacaatctcatcaattcgaactgtttattcatatgtaggtgagaagcagacactagaagcgttcaactcaggtcttcagaaaagtatggagattggcataaaactaggtcaaaccaagggagtgattattggtagctttgggttgctatatgctacttgggcattccaatcttgggttggtagtgttctggtcaggacaaaaggagaaagtggtggccctgtgttttgtgctgaaatatgcatcatttggggaggactgtctctgatgagtgcactcccaaatcttggtttcatattagaggcaacaacagctactacccgaatttttgagatgattgaccgagtgccaaccataaattcttataaagaaaaaggaaagctcttaacacatacaagaggagagatcacatttaacgaggttgagtttagttacccatcaaggccagatgcaccggttctccaaggactcaatctgaaagtacaggcaggtaaaacagtaggcctagttggagggagtggttctggcaaatctactatcatctctttgcttgaaagattttatgatcctgtatatggtgagatattgcttgatggatatgatatacagacactccacattaagtggttaaggtcccagatgggactggtaaatcaggaaccaattctctttgcaacatccataagggagaacattctatttggcaaggaaggagcttcaatggaagctgttataagcgcagcaaaggcagcaaatgcacatgatttcattgttaaacttcctaatggatatgaaactcaagtaggacaattcggagctcaattgtctggagggcaaaaacaaaggattgccattgcaagggctttaataagagagccaaaaattctcctactagatgaagccacaagtgcattggattcacaatccgaaagactagtgcaagatgcccttgataaggcttccagaggcagaacaacaatcatcatagcgcatcggctatccacaattcgtaaagctgattcaatagtagttattcaatctggaagagtggttgaatctggttcccatgatgaactactccaactgaacaatgggcaaggagggacttacagcaaaatgctacaactgcaacaggcaataagtcaagacgaaaatgcattgcatcaaataaacaagagccctttagctatggtaaatcaaacaagtccaatttttagcaggcaaagtagcccaattcatcatgcatttagctcaacgcaaccgtttagtcccatatattcaatcagtattccagggtccagctttgatgactacagcagcgaaaactgggagaaatcttcaaatgcaagcttctctcaatggcgtttacttaaaatgaatgccccagagtggaaacatgcattgcttgggtgtttaggggccattggctctggaatatgtcagccaatttactcctattgcttgggaattgttgcatctgtctactttataaaggacaactctctcatcaaatcagaaatcaggttgtactcgtccatcttctgctgcatagctgttgtcaacttcctttcaggcctcattcaacattacaatttcaccattatggcagaacgcttgctaaaaagggtgcgagaaaacttgctagagaaggtgctgacttttgagatgggatggtttgaccaagaggataacagcagtgcggcaatttgtgctcgtttggcaactgaagccaacttggttagatcccttgttgcagaacgaatgtcattgttagttaacgtttctgttatggctttcttggcttttgtactaagtttaattgtcacatggagggtggctcttgttatgaccgcaatgcagccgttgatcattgtatgcttctactcaaaaaacattctcatgaaaagtatggcaggcaaagcaagaaaggctcaaagagagggtagtcaattagcaatggaagctactaccaatcataggactattgctgcattctcatctgagaaaaggattttaaatttgttcagaatggcgatggaaggccccaagaaagaaagcatcaagcaatcatggatttcaggttccatattgtcagcctcatattttgtaacaacagcatctataactttgactttttggtatggaggccggttattgaatcaagggctggtggaatcaaaacctcttttgcaagctttcctcattttgatgggcactggtagacaaattgcagagacagcaagcacaacttctgacatagctaaaagtggaagagccattagttcagtatttgcgatactggataggaaaagtgagattgaaccagaagatcctagacatagaaagttcaaaaatactatgaagggccatataaaactgagagatgtctttttctcataccccgcaaggccagatcaaatgattctcaagggcctcagtcttgatattgaagctggcaaaacagttgcattagtgggacaaagtggctcgggaaaatccaccatcattggcttaattgaaagattttatgaccccatgaagggatctatatccatagacaattgtgacatcagggaatttaacttgagaagtttgagatcacatattgccttggtgagtcaggagccaaccctttttgcaggaactatacgtgacaatattgtgtatgggaaaaaggatgcatcagaagatgaaataagaaaggcagcacgtctttcaaatgctcatgagtttataagttcaatgaaagatggttatgacacttactgtggagaaagaggagtgcagctctcaggaggacagaagcagaggatagcaattgctcgagcagtgcttaaggacccttcagtccttctgttagatgaagcaacaagtgctctagacagtgtatcagagaatcgggttcaggaggcacttgagaaaatgatggttggaagaacgtgtatagttatagctcaccgtttgtcaacaatacaaagtgtagattccatagctgtgataaaaaatgggaaggtggtggaacaagggtcacactcagagttattgagcatgggatcaaatgaagcttattactccttgattaggctacaacatggccactcaacttga

SEQ ID NO: 7668 - protein, 1288 aa, Glycine max
MAPVASTTGKEMETVEGNCSNGEKELWNKVFKRSRILRHRNPTWDMGSKDGFFRYADGFDKLLLLFGTLGCIGGGLQTPMTMLVLGSLIDDYAGGSGHAVSNHVIDKYALRLLGVAIGVALSSFIEGVCWTRTAERQTSRMRTEYLKSVLRQEVGFFDKQTDSSSTFQVIATITSDAQTIQDTMADKVPNCLGHLSAFFSSFVVALFLSWRLALAAFPFSIIMIMPAIIFGKTMKELGNKMKDAYGVAGSIAEQTISSIRTVYSYVGEKQTLEAFNSGLQKSMEIGIKLGQTKGVIIGSFGLLYATWAFQSWVGSVLVRTKGESGGPVFCAEICIIWGGLSLMSALPNLGFILEATTATTRIFEMIDRVPTINSYKEKGKLLTHTRGEITFNEVEFSYPSRPDAPVLQGLNLKVQAGKTVGLVGGSGSGKSTIISLLERFYDPVYGEILLDGYDIQTLHIKWLRSQMGLVNQEPILFATSIRENILFGKEGASMEAVISAAKAANAHDFIVKLPNGYETQVGQFGAQLSGGQKQRIAIARALIREPKILLLDEATSALDSQSERLVQDALDKASRGRTTIIIAHRLSTIRKADSIVVIQSGRVVESGSHDELLQLNNGQGGTYSKMLQLQQAISQDENALHQINKSPLAMVNQTSPIFSRQSSPIHHAFSSTQPFSPIYSISIPGSSFDDYSSENWEKSSNASFSQWRLLKMNAPEWKHALLGCLGAIGSGICQPIYSYCLGIVASVYFIKDNSLIKSEIRLYSSIFCCIAVVNFLSGLIQHYNFTIMAERLLKRVRENLLEKVLTFEMGWFDQEDNSSAAICARLATEANLVRSLVAERMSLLVNVSVMAFLAFVLSLIVTWRVALVMTAMQPLIIVCFYSKNILMKSMAGKARKAQREGSQLAMEATTNHRTIAAFSSEKRILNLFRMAMEGPKKESIKQSWISGSILSASYFVTTASITLTFWYGGRLLNQGLVESKPLLQAFLILMGTGRQIAETASTTSDIAKSGRAISSVFAILDRKSEIEPEDPRHRKFKNTMKGHIKLRDVFFSYPARPDQMILKGLSLDIEAGKTVALVGQSGSGKSTIIGLIERFYDPMKGSISIDNCDIREFNLRSLRSHIALVSQEPTLFAGTIRDNIVYGKKDASEDEIRKAARLSNAHEFISSMKDGYDTYCGERGVQLSGGQKQRIAIARAVLKDPSVLLLDEATSALDSVSENRVQEALEKMMVGRTCIVIAHRLSTIQSVDSIAVIKNGKVVEQGSHSELLSMGSNEAYYSLIRLQHGHST

SEQ ID NO: 7669 - DNA, 4140 bp, Zea mays
  CDS (1)..(4140)
atgtctagcagcgacccggaggagatcagggcgcgcgtcgtcgttctcggttcgccccatgccgacggcggcgacgagtgggcccggcccgagctcgaggccttccatctgccgtctcccgcccaccagcctcctggcttcctagccgggcaaccggaagcagcagagcaacccacgctccctgctcctgctggccgcagcagcagcagcagcaacacgcctactacatctgccggtggcggcgctgctcctcctcctccttcttcgcctccccctccgccggcttctctggagaccgagcagccgcccaatgccaggccagcctccgccggcgccaatgacagcaagaagcccaccccgcccgccgccctgcgcgacctcttccgcttcgccgacggcctcgactgcgcgctcatgctcatcggcaccctcggcgcgctcgtccacgggtgctcgctccccgtcttcctccgcttcttcgccgacctcgtcgactccttcggctcccacgccgacgacccggacaccatggtccgcctcgtcgtcaagtacgccttctacttcctcgtcgtcggagcggcaatctgggcatcctcgtgggcagagatctcttgctggatgtggaccggcgagcggcagtcgacgcggatgcggatccggtacctggacgcggcgctgcggcaggacgtgtccttcttcgacaccgacgtgcgggcctcggacgtgatctacgccatcaacgcggacgccgtggtggtgcaggacgccatcagcgagaagctgggcaacctcatccactacatggccaccttcgtggccggcttcgtcgtggggttcacggccgcgtggcagctggcgctggtcacgctggccgtggtgccgctcatcgccgtcatcggcgggctgagcgccgccgcgctcgccaagctctcgtcccgcagccaggacgcgctctcgggcgccagcggcatcgcggagcaggcgctcgcgcagatacggatcgtgcaggcgttcgttggcgaggagcgcgagatgcgggcctactcggcggcgctggccgtggcgcagaggatcggctaccgcagcggcttcgccaaggggctcggcctcggcggcacctacttcaccgtcttctgctgctacgggctcctgctctggtacggcggccacctcgtgcgcgcccagcacaccaacggcgggctcgccatcgccaccatgttctccgtcatgatcggcggactggccctcgggcagtcggcgccgagcatggccgcgttcgccaaggcgcgtgtggcggctgccaagatcttccgcatcatcgaccacaggccgggcatctcctcgcgcgacggcgcggagccagagtcggtgacggggcgggtggagatgcggggcgtggacttcgcgtacccgtcgcggccggacgtccccatcctgcgcggcttctcgctgagcgtgcccgccgggaagaccatcgcgctggtgggcagctccggctccgggaagagcacggtggtgtcgctcatcgagagattctacgaccccagcgcagggcaaatcctgctggacgggcacgacctcaggtcgctggagctgcggtggctgcggcggcagatcgggctggtgagccaggagccggcgctgttcgcgacgagcatcagggagaacctgctgctggggcgggacagccagagcgcgacgctggcggagatggaggaggcggccagggtggccaacgcccactccttcatcatcaaactccccgacggctacgacacgcaggttggggagcgcggcctgcagctctccggtgggcagaagcagcgcatcgccatcgcccgcgccatgctcaagaaccccgccatcctgctgctggacgaggccaccagcgcgctggactccgagtctgagaagctcgtgcaggaggcgctggaccgcttcatgatcgggcgcaccaccctggtgatcgcgcacaggctgtccaccatccgcaaggccgacgtggtggccgtgctgcagggcggcgccgtctccgagatgggcgcgcacgacgagctgatggccaagggcgagaacggcacctacgccaagctcatccgcatgcaggagcaggcgcacgaggcggcgctcgtcaacgcccgccgcagcagcgccaggccctccagcgcccgcaactccgtcagctcgcccatcatgacgcgcaactcctcctacggccgctccccctactcccgccgcctctccgacttctccacctccgacttcaccctctccatccacgacccgcaccaccaccaccggaccatggcggacaagcagccggcgttccgcgccggcgccagctccttcctgcgcctcgccaggatgaactcgcccgagtgggcctacgcgctcgccggctccatcggctccatggtctgcggctccttcagcgccatcttcgcctacatcctcagcgccgtgctcagcgtctactacgcgccggacccgcggtacatgaagcgcgagatcgcaaaatactgctacctgctcatcggcatgtcctccgcggcgctgctgttcaacacggtgcagcacgtgttctgggacacggtgggcgagaacctgaccaagcgggtgcgcgagaagatgttcgccgccgtgctccgcaacgagatcgcctggttcgacgcggacgagaacgccagcgcgcgcgtggccgccaggctagcgctggacgcccagaacgtgcgctccgccatcggggaccgcatctccgtcatcgtccagaactcggcgctgatgctggtggcctgcaccgcggggttcgtcctccagtggcgcctcgcgctcgtgctcctcgccgtgttcccgctcgtcgtgggcgccaccgtgctgcagaagatgttcatgaagggcttctcgggggacctggaggccgcgcacgccagggccacgcagatcgcgggcgaggccgtggccaacctgcgcaccgtggccgcgttcaacgcggagcgcaagatcacggggctgttcgaggccaacctgcgcggcccgctccggcgctgcttctggaaggggcagatcgccggcagcggctacggcgtggcgcagttcctgctgtacgcgtcctacgcgctggggctgtggtacgcggcgtggctggtgaagcacggcgtgtccgacttctcgcgcaccatccgcgtgttcatggtgctgatggtgtccgcgaacggcgccgccgagacgctgacgctggcgccggacttcatcaagggcgggcgcgcgatgcggtcggtgttcgagacgatcgaccgcaagacggaggtggagcccgacgacgtggacgcggcgccggtgccggagcggccgaggggcgaggtggagctgaagcacgtggacttctcgtacccgtcgcggccggacatccaggtgttccgcgacctgagcctccgtgcgcgcgccgggaagacgctggcgctggtggggccgagcgggtgcggcaagagctcggtgctggctctggtgcagcggttctacgagcccacgtccgggcgcgtgctcctggacggcaaggacgtgcgcaagtacaacctgcgggcgctgcggcgcgtggtggcggtggtaccgcaggagccgttcctgttcgcggcgagcatccacgagaacatcgcgtacgggcgcgagggcgcgacggaggcggaggtggtggaggcggcggcgcaggcgaacgcgcaccggttcatcgcggcgctgccggaggggtaccggacgcaggtgggcgagcgcggggtgcagctgtcgggggggcagcggcagcggatcgcgatcgcgcgcgcgctggtgaagcaggcggccatcgtgctgctggacgaggcgaccagcgcgctggacgccgagtcggagcggtgcgtgcaggaggcgctggagcgcgcggggtccgggcgcaccaccatcgtggtggcgcaccggctggccacggtgcgcggcgcgcacaccatcgcggtcatcgacgacggcaaggtggcggagcaggggtcgcactcgcacctgctcaagcaccatcccgacgggtgctacgcgcggatgctgcagctgcagcggctgacgggcgcggcggccgggcccgggccgtcgtcctcgtgcaacggggccgcgtag

SEQ ID NO: 7670 - protein, 1379 aa, Zea mays
MSSSDPEEIRARVVVLGSPHADGGDEWARPELEAFHLPSPAHQPPGFLAGQPEAAEQPTLPAPAGRSSSSSNTPTTSAGGGAAPPPPSSPPPPPASLETEQPPNARPASAGANDSKKPTPPAALRDLFRFADGLDCALMLIGTLGALVHGCSLPVFLRFFADLVDSFGSHADDPDTMVRLVVKYAFYFLVVGAAIWASSWAEISCWMWTGERQSTRMRIRYLDAALRQDVSFFDTDVRASDVIYAINADAVVVQDAISEKLGNLIHYMATFVAGFVVGFTAAWQLALVTLAVVPLIAVIGGLSAAALAKLSSRSQDALSGASGIAEQALAQIRIVQAFVGEEREMRAYSAALAVAQRIGYRSGFAKGLGLGGTYFTVFCCYGLLLWYGGHLVRAQHTNGGLAIATMFSVMIGGLALGQSAPSMAAFAKARVAAAKIFRIIDHRPGISSRDGAEPESVTGRVEMRGVDFAYPSRPDVPILRGFSLSVPAGKTIALVGSSGSGKSTVVSLIERFYDPSAGQILLDGHDLRSLELRWLRRQIGLVSQEPALFATSIRENLLLGRDSQSATLAEMEEAARVANAHSFIIKLPDGYDTQVGERGLQLSGGQKQRIAIARAMLKNPAILLLDEATSALDSESEKLVQEALDRFMIGRTTLVIAHRLSTIRKADVVAVLQGGAVSEMGAHDELMAKGENGTYAKLIRMQEQAHEAALVNARRSSARPSSARNSVSSPIMTRNSSYGRSPYSRRLSDFSTSDFTLSIHDPHHHHRTMADKQPAFRAGASSFLRLARMNSPEWAYALAGSIGSMVCGSFSAIFAYILSAVLSVYYAPDPRYMKREIAKYCYLLIGMSSAALLFNTVQHVFWDTVGENLTKRVREKMFAAVLRNEIAWFDADENASARVAARLALDAQNVRSAIGDRISVIVQNSALMLVACTAGFVLQWRLALVLLAVFPLVVGATVLQKMFMKGFSGDLEAAHARATQIAGEAVANLRTVAAFNAERKITGLFEANLRGPLRRCFWKGQIAGSGYGVAQFLLYASYALGLWYAAWLVKHGVSDFSRTIRVFMVLMVSANGAAETLTLAPDFIKGGRAMRSVFETIDRKTEVEPDDVDAAPVPERPRGEVELKHVDFSYPSRPDIQVFRDLSLRARAGKTLALVGPSGCGKSSVLALVQRFYEPTSGRVLLDGKDVRKYNLRALRRVVAVVPQEPFLFAASIHENIAYGREGATEAEVVEAAAQANAHRFIAALPEGYRTQVGERGVQLSGGQRQRIAIARALVKQAAIVLLDEATSALDAESERCVQEALERAGSGRTTIVVAHRLATVRGAHTIAVIDDGKVAEQGSHSHLLKHHPDGCYARMLQLQRLTGAAAGPGPSSSCNGAA

SEQ ID NO: 7671 - DNA, 4329 bp, Zea mays
  CDS (1)..(4329)
atgtggtcctgttcatcgcgtacgtctgcacgctggctgccgcctgcgtcaggcggcggcagcgctctgcagatgcgagcagcgggaggagcggcgctcctagtaggtgggtgctgctcgtcgtctccacgtgctgcgtggcagctgccgtggcctactgtgtcacggctctccaagacgcctacgacatcaagacggcggttccttacttcgtcaggggcctggtctggatcgcgctggcggcctcgctgcacgcccagccgacgaggccggcgaggggtcgtggccgtgctctggtgggtgctcttgtcgctgctggccaccgcgtacaattcggagatccttgccggggggcacagcctggacctcgcggagatgattgcgtggccggtgagcctcctcctgctgctctgcgccctcggctccctgctgccgcggggcgacgggcaccactaccgggacgcctccaacggcagcagcggcttgtcggagcctctgatcggcaatgacagaaccgtgccaacctcggagttgtaccgcgctggcctgttcggccagcttgccttctcgtggttgaaccctctgctccgtgtcggccgctccaaggcgctggacctcggcgacatcccgctcatcgccaccgacgacaccgcgcaccacacgtcgcagcagttcacggaggcctggagccgccacgtgagcgacaaagccaggagccgccggggcgtgggcagcaacagcctcgccctcgtcttgggcaagtgcttcctcagcgagatcctgctcaccggcttctacgccttcctgagaatgctgtccatagcagttgcccccctgctgctcttcgggttcgtgtggtacagcaaccaggaggaacgagacctccgggtcggcctgtcccttgtcggctgcctgctgctcgccaagctcgtggagtcgctgtcgcagcggcattggttcttcagctcgaggaggaccgggatgcgtatccggtcagcgctgatggcggtcatcttccagaagcagctcaggctgtccattcaggggaggaacaaccactccactggcgagattgtcaactacattgcggttgatgcgtaccggcttggcgacgccatcagctggctgcacatggggtggacctcgccacttcagctcgtctttgcagttgccacgctcttctgggcactcaagcttggggctcttcctggtctagtcccgctagtcatctttggtttcctcaacgtgccattcgcgaaaatgctgcaggggtaccaggccaagttcatggttgcacaggacgagaggctccggtccacgtcggagatactcaacagcatgaagatcatcaagctgcagtcgtgggaagacaagttccgcagcacgatcgagtcgctcagggacggcgagttcaaatggctgaggcagacccagatgaagaaggcctatggtgcagtcatgtactggatgtccccgacggtcgtctctgctgtcatgtacacagcaacggccatcatggggagtgctcccctgaatgctagcacgctcttcacggtcttggccaccctgagggtaatgtctgagccagtgaggatgcttccggaggtcctcacaatgatgatccagtacaaggtggcattagatcgaattgagaagttccttctcgaagacgagatcagagaggacgatgtgaaaagggtaccttcagatgactctggtgtcagagttcgagtccaagccggaaatttcagctggaaggcaagcggagctgatctgtcactgaggaatgttaaccttcgcgtgaaccgaggagagaaggtggccgtatgcggcccagttggctcagggaaatcttcactcctgtatgcattacttggggagataccaagattatcaggatcagttgaagtttttggttcagtagcatacgtttcacagagctcgtggatacagagtgggactgttcgtgacaacatactctttgggaagcctttcaacaaggaactgtatgataaggcgatcaaatcttgtgctctggacaaggatatcgaaaattttgaccatggagacctcacagagatcggtcagagaggactgaacatgagtggaggccagaagcaaaggattcagctggctcgagccgtctacagtgatgcagatgtttatctactggatgacccattcagtgcagttgatgcgcataccgctgcagtccttttctatgaatgtgtgatgacagcacttgcagagaagactgtcgtccttgtgacccaccaggttgaatttctgactgaaaccgataggattctggtaatggaaggtggtcaagttagtcaacaagggaaatattcagaactcctgggatctgggacagcatttgagaaactggtgtctgctcaccagtcttcgatcacagcattggataccagtgctagccaacagaaccaagttcaagggcaacaagagtctgatgaatacatagtgccaagtgcgcttcaggttataaggcaggccagcgacatcgacgtgaccgcaaagggcccttcagcagcaatacagcttacagaagaggaagagaagggcattggcgacctgggatggaagccatacaaagaatacataaatgtatccaagggggctttccaattctctggcatgtgtattgctcaagtgctcttcacgtgcttccagatcgcatccacatattggttggcagtggctgttcagatgggtaacgtcagtgctgcacttcttgttggggcatattctggactctctatcttcagctgcttctttgcctactttagaagctgttttgcggctattctgggtctcaaggcctccaaagcattctttggcgggctaatggactccgtattcaaggctcccatgtcattttttgactcaacaccagtgggaagaattttaacgagggcatcttcagatttgagcattctagacttcgacataccttactccatggcttttgtggcgacgggcggcattgaggttgttaccacagtactggtcatgggtactgtaacttggcaagtcctggttgtagcgatcccagttgctgtcaccatgatatatgttcagaggcactacgtttcctcagctagggagctagtaagactcaacggaacaacaaaggcacctgtaatgaactatgcatcagaatcaattctcggtgtggtgacgatcagggcatttgcagcaactgagaggtttatctacagcaacatgcagctcatcgacactgatgccacactgttcttccataccattgccgcacaagagtgggtactcataagagtagaggcactgcagtccttgacaataatcacagcagcattgttccttgttctggttcctccaggagcaatttctccgggctttgcaggactttgtctctcctatgctttgactttaacttcagcacaaatattcttgacaaggttctattcgtacttggaaaactacatcatctcggttgaacgaatcaagcagtatatgcacctcccagtggagccacctgccattataccagatagtagacctccaacttcgtggccgcaggagggaaggatagacctgcaagatttgaagataagataccgtccaaatgcgccgcttgtcctcaaaggaatcacttgcacttttgctgctgggaacaagattggggttgtagggaggacaggaagtggaaaatcaacacttatcagctcattgttccgtctcgttgatccggcgggtgggaggatacttattgacaagttggatatttgctccattggccttaaggatctaagaactaaactaagtattatccctcaagaacctacacttttcaggggaaccgtgcgcaacaatttggatccccttggccagcattctgatgaagagatatgggaggccttggagaagtgtcaactgaagacagcaatcagcaccacctctgctcttctggatacagttgtgagtgatgatggcgataactggagtgctggacagcgtcagctcttctgtcttggcagagttctcctacgcaggaacaaaattctagttctagacgaggcaacagcatccatcgactctgcaacagatgcaatcctgcagaaagtaatcaggcagcagttctcaagttgcacggttataaccatagctcacagggtaccaactgtgacagacagtgacaaggtcatggtcctgtcctacgggaagcttctagaatatgaaacaccagccaagctgttggaagacaaacaatcagcatttgctaaacttgtggctgagtattgggctaataccaagagaaattcaacatga

SEQ ID NO: 7672 - protein, 1442 aa, Zea mays
MWSCSSRTSARWLPPASGGGSALQMRAAGGAALLVGGCCSSSPRAAWQLPWPTVSRLSKTPTTSRRRFLTSSGAWSGSRWRPRCTPSRRGRRGVVAVLWWVLLSLLATAYNSEILAGGHSLDLAEMIAWPVSLLLLLCALGSLLPRGDGHHYRDASNGSSGLSEPLIGNDRTVPTSELYRAGLFGQLAFSWLNPLLRVGRSKALDLGDIPLIATDDTAHHTSQQFTEAWSRHVSDKARSRRGVGSNSLALVLGKCFLSEILLTGFYAFLRMLSIAVAPLLLFGFVWYSNQEERDLRVGLSLVGCLLLAKLVESLSQRHWFFSSRRTGMRIRSALMAVIFQKQLRLSIQGRNNHSTGEIVNYIAVDAYRLGDAISWLHMGWTSPLQLVFAVATLFWALKLGALPGLVPLVIFGFLNVPFAKMLQGYQAKFMVAQDERLRSTSEILNSMKIIKLQSWEDKFRSTIESLRDGEFKWLRQTQMKKAYGAVMYWMSPTVVSAVMYTATAIMGSAPLNASTLFTVLATLRVMSEPVRMLPEVLTMMIQYKVALDRIEKFLLEDEIREDDVKRVPSDDSGVRVRVQAGNFSWKASGADLSLRNVNLRVNRGEKVAVCGPVGSGKSSLLYALLGEIPRLSGSVEVFGSVAYVSQSSWIQSGTVRDNILFGKPFNKELYDKAIKSCALDKDIENFDHGDLTEIGQRGLNMSGGQKQRIQLARAVYSDADVYLLDDPFSAVDAHTAAVLFYECVMTALAEKTVVLVTHQVEFLTETDRILVMEGGQVSQQGKYSELLGSGTAFEKLVSAHQSSITALDTSASQQNQVQGQQESDEYIVPSALQVIRQASDIDVTAKGPSAAIQLTEEEEKGIGDLGWKPYKEYINVSKGAFQFSGMCIAQVLFTCFQIASTYWLAVAVQMGNVSAALLVGAYSGLSIFSCFFAYFRSCFAAILGLKASKAFFGGLMDSVFKAPMSFFDSTPVGRILTRASSDLSILDFDIPYSMAFVATGGIEVVTTVLVMGTVTWQVLVVAIPVAVTMIYVQRHYVSSARELVRLNGTTKAPVMNYASESILGVVTIRAFAATERFIYSNMQLIDTDATLFFHTIAAQEWVLIRVEALQSLTIITAALFLVLVPPGAISPGFAGLCLSYALTLTSAQIFLTRFYSYLENYIISVERIKQYMHLPVEPPAIIPDSRPPTSWPQEGRIDLQDLKIRYRPNAPLVLKGITCTFAAGNKIGVVGRTGSGKSTLISSLFRLVDPAGGRILIDKLDICSIGLKDLRTKLSIIPQEPTLFRGTVRNNLDPLGQHSDEEIWEALEKCQLKTAISTTSALLDTVVSDDGDNWSAGQRQLFCLGRVLLRRNKILVLDEATASIDSATDAILQKVIRQQFSSCTVITIAHRVPTVTDSDKVMVLSYGKLLEYETPAKLLEDKQSAFAKLVAEYWANTKRNST

SEQ ID NO: 7673 - DNA, 1947 bp, Zea mays
  CDS (1)..(1947)
atggggaagaatatgcgcatcaagacggcgcccaaggcgaaccgtgtccccctcctcggcgacggggagacgtcaagggcgctctcggacctggaagagggcagcgacgtccagccagcgaacgtcgggttctgtcgggtcatcaaacttgcgaagcatgacgccggaaagctggtcctcgccaccgcggcgctgctcgtcgcctccctcagtaaccttctcgttcccaaatatggtggcaagataattgacattgtgtcaagagatgttcggcgcccagaagataaggcgcaagccctggaggatgtcaagggcacaattttgtacattgtgacaatcgtcttagtcggttcagtttgcacggctcttcgggcatggctattcaattctgctagtgagagagtagtcgctcgactaaggaaagacttgttcagccatctcataaaccaggaaatagcgttttttgatgtgactagaacaggagagctcttaagcaggctttctgaagatacacaaataataaagaatgctgctacaaccaacctatcagaggcactgcgcaatgtaactactacagctattggtcttggtttcatgttttcaacttcatggaagttaacattgctggcacttgtaattgtcccggttatatcagttgctgtgcgtagatttggacgttttcttcgtgagctttcacatcaaacacaagctgctgcagctgtagcttcatccatagctgaggaatctttcggtgccatccgcacagtaagatcctttgctcaggaatatcatgagatttcacgctatggtgaaaaagtagaggagacacttaaacttggtctcaaacaagctaaagttgttggcttgttttctggagggcttaatgctgcatcaaccatgtctgtggttattgttgttatttatggcgccaacttaaccatcaatggttacatgacaactggctctcttacatcattcatcttatacagccttacagttggttcgtcagtatctgccttgtcaggactatacacaactgtaatgaaagcctctggtgcaagccgtagggtttttcaacttttggaccgtgtttcgtcaatgacaaactctggggacaaatgtccaataaatgaaaaggatggggaagttgagcttgatgatgtctggtttgcatatccttctcgcccatctcatatgattcttaagggaataactctgaagctagcaccaggttcaaaggttgcacttgttgggccaagtggtggtggtaaaaccacaatagcaaatttgattgagcggttttatgaccctctaaagggaaggatcttgcttaatggagtaccgctggcagaaatttcacatcaatatcttcacagcaaggtaagcattgtcagccaggagcctacgctcttcaactgcaccatcgaagagaatattgcttatggactagagggcacaacgaactttgctgacgttgagagtgcagctaaaatggcgaatgcacacaacttcatatgcggctttcccgaccaatataagactgtcgtcggcgagcgggggatcaggttatccggcgggcagaagcagaggatcgccattgcgagagctttgcttatgaacccacgagtgcttctcctggacgaagccaccagtgccctggatgctgaaagcgaatatcttgtacaggatgcaatggactccttgatgaaagggaggactgtccttgtgatagcccaccggctctcgaccgtcaagagcgccgacaccgtcgccgtcatctccgacggcctaatcgtggagagcggcacgcacgacgaactcctggaccgcgacggcatatacacggccttggtgaagaggcagctgcaggggccgaagtttgaggccaccagcagcatcagcgaggcctccgaaattgaagcggaacccagcagtaatgggcaatag

SEQ ID NO: 7674 - protein, 648 aa, Zea mays
MGKNMRIKTAPKANRVPLLGDGETSRALSDLEEGSDVQPANVGFCRVIKLAKHDAGKLVLATAALLVASLSNLLVPKYGGKIIDIVSRDVRRPEDKAQALEDVKGTILYIVTIVLVGSVCTALRAWLFNSASERVVARLRKDLFSHLINQEIAFFDVTRTGELLSRLSEDTQIIKNAATTNLSEALRNVTTTAIGLGFMFSTSWKLTLLALVIVPVISVAVRRFGRFLRELSHQTQAAAAVASSIAEESFGAIRTVRSFAQEYHEISRYGEKVEETLKLGLKQAKVVGLFSGGLNAASTMSVVIVVIYGANLTINGYMTTGSLTSFILYSLTVGSSVSALSGLYTTVMKASGASRRVFQLLDRVSSMTNSGDKCPINEKDGEVELDDVWFAYPSRPSHMILKGITLKLAPGSKVALVGPSGGGKTTIANLIERFYDPLKGRILLNGVPLAEISHQYLHSKVSIVSQEPTLFNCTIEENIAYGLEGTTNFADVESAAKMANAHNFICGFPDQYKTVVGERGIRLSGGQKQRIAIARALLMNPRVLLLDEATSALDAESEYLVQDAMDSLMKGRTVLVIAHRLSTVKSADTVAVISDGLIVESGTHDELLDRDGIYTALVKRQLQGPKFEATSSISEASEIEAEPSSNGQ

SEQ ID NO: 7675 - DNA, 2214 bp, Zea mays
  CDS (1)..(2214)
atgcggccttgctaccgcatactcacggcgcgtcacttcgtccgcggctcccggttcgatccctcccagactacctcccccgctgccggatttcgtcggctgaccagagccaacaggccgttcgtgccgaaacccctctttggcactctcctcggaggcttcagatcgaactgtggcgtactgcctgggaaaggggcccccttgggcagcctcggcagcttttggccggactctgcctaccagctgcacggcgcgcggcttcaacgagatacgagaggtaatgcattctccacatccgccaatgctgtgacagttaagaagccagttggtgacaaggtccagaaagatgcatcaaaaaaggatattgatgaagagattgctgattctcagatattgaaaaaccttgggaagtacttattgttgaatgacagccctgacttccgctttagggttgccttgtcgttggtcctgttagttggtgcaaaggttataaatgttcaagtgcctttcttgtttaagctagctatcgactggcttgcatcccttggtggtgctgaagcttccctggcatcattcactgaaactaatgccaccctattggctctatttgcaagcccagcagctgttctgataggatatggaatcgcacgatcaggagtatcagcctgtacagaactgcgaaacgctgtattttctaaagtgactttgagagcaatccgttcagtatccagaaaggtgtcttctcacttgcatgagcttgatcttcgatatcatctaagccggcaaactggtgctataaatcgcgtaattgatcgaggaagccgtgcaataaattacatcctcacagtcatggtgtttaatgtcgtgcccacgatactagagattggtatggtgtcaagcatacttgcctacaaatttggttcaacttttgcttggatcacttcagtttcagttgctacttatattgctttcactttggctgtcacacagtggcggactaagttcaggatggccatgaataaagctgataatgcttctagtacggtggcagttgactctcttctcaattatgagactgtgaaatacttcaacaatgaacaatttgaagttgagaagtacgacaaatatttaaggaattatgaggatgctgcattgaagacccaaagtagtcttgcctacctgaactttggccaaaatgttatctttagctcggctttatctacggcaatggttttgagctcatatggaataatgagtggtgctctgactgtgggtgatttggtcatggttaatggacttttattccagctttcattacctctgaacttccttgggagtgtgtatcgagaatctagacaaagcctcattgacatgaagtcgatgtttcagttgcttgaggaaaaacctgcaataaaggatgagcctcacgcacaacctttgcagttcaagggagggtgcattgaattccagaatgttcattttgggtatgtaccagaaaggaagattcttgatggtgccactttcaccgtacctgcaggaaagagtgtggccattgttggaactagcggaagcgggaaatcaactattcttagacttcttttcagattctttgattcgacttcaggatctatactaattgacgggcaagatatccgaggagtgacactggagagccttcgaaaatgtctaggtgtggtacctcaggacacagtactttttaatgacacgattaagcataatatacagtatgggcggttatcagcaaaagatgaggaggtctttgatgctgcccgacgtgctgctattcatgatacaattatgaacttcccagacaagtatgacaccatagtaggagaacgaggattgaagttaagcggcggggagaaacaacgagtgtcaatagcccgtgtattcttgaaggagccttccattctgttatgtgatgaagcaactagtgctcttgacagcactactgaagcatcaattttgaattctctgaaatccttatcttccgatcgaacatcaatctttattgctcatcgactcacaactgcaatgcagtgtgatcagataattgttttggaggatgggaaggtagtagaacaaggaccacatgattttcttctgtcacagggtgggcgatacgcagaattgtggtatcagcagaacagcactgacgccatggattctgctgcagctagcgtagaggtttga

SEQ ID NO: 7676 - protein, 737 aa, Zea mays
MRPCYRILTARHFVRGSRFDPSQTTSPAAGFRRLTRANRPFVPKPLFGTLLGGFRSNCGVLPGKGAPLGSLGSFWPDSAYQLHGARLQRDTRGNAFSTSANAVTVKKPVGDKVQKDASKKDIDEEIADSQILKNLGKYLLLNDSPDFRFRVALSLVLLVGAKVINVQVPFLFKLAIDWLASLGGAEASLASFTETNATLLALFASPAAVLIGYGIARSGVSACTELRNAVFSKVTLRAIRSVSRKVSSHLHELDLRYHLSRQTGAINRVIDRGSRAINYILTVMVFNVVPTILEIGMVSSILAYKFGSTFAWITSVSVATYIAFTLAVTQWRTKFRMAMNKADNASSTVAVDSLLNYETVKYFNNEQFEVEKYDKYLRNYEDAALKTQSSLAYLNFGQNVIFSSALSTAMVLSSYGIMSGALTVGDLVMVNGLLFQLSLPLNFLGSVYRESRQSLIDMKSMFQLLEEKPAIKDEPHAQPLQFKGGCIEFQNVHFGYVPERKILDGATFTVPAGKSVAIVGTSGSGKSTILRLLFRFFDSTSGSILIDGQDIRGVTLESLRKCLGVVPQDTVLFNDTIKHNIQYGRLSAKDEEVFDAARRAAIHDTIMNFPDKYDTIVGERGLKLSGGEKQRVSIARVFLKEPSILLCDEATSALDSTTEASILNSLKSLSSDRTSIFIAHRLTTAMQCDQIIVLEDGKVVEQGPHDFLLSQGGRYAELWYQQNSTDAMDSAAASVEV

SEQ ID NO: 7677 - DNA, 1947 bp, Zea mays
  CDS (1)..(1947)
atggggaagaatatgcgcatcaagacggcgcccaaggcgaaccgtgtccccctcctcggcgacggggagacgtcaagggcgctctcggacctggaagagggcagcgacgtccagccagcgaacgtcggcttctgtcgggtcatcaaacttgcgaaacatgacgccggaaagctggtcctcgccacagcggctctgctcgtcgcctccctcagtaaccttctcgttcccaaatatggtggcaagataattgacattgtgtcaagagatgttcggcgcccagaagataaggcgcaagccctggaggatgtgaagggcacaattttgtacattgtgacaatcgtcttagtcggttcagtttgcacggctcttcgggcatggttattcaattctgctagtgagagagtagtcgctcgactaaggaaagacttgttcagccatctcataaaccaggaaatagcgttttttgatgtgactagaacaggagagctcttaagcaggctttctgaagatacacaaataataaagaatgctgctacaaccaacctatcagaggcactgcgcaatgttactactacagctattggtcttggtttcatgttttcaacttcatggaagttaacattgctggcacttgtaattgtcccggttatatcagttgctgtgcgtagatttggacgttttcttcgtgagctttcacatcaaacacaagctgctgctgctgtagcttcatccatagctgaggaatctttcggtgccatccgcacagtaagatcctttgctcaggaatatcatgagatttcacgctatggtgaaaaagtagaggagacacttaaacttggtctcaaacaagctaaagttgttggcttgttttctggagggcttaacgctgcatcaaccatgtctgtggttattgttgttatttatggcgccaacttaaccatcaatggttacatgacaactggctctcttacatcattcatcttatacagccttacagttggttcgtcagtatctgccttgtcaggactatacacaactgtaatgaaagcctctggtgcaagccgtagggtttttcaacttttggaccgtgtttcgtcaatgacaaactctggggacaaatgtccaataaatgaaaaggatggggaagttgagcttgatgatgtctggtttgcatatccttctcgcccatctcatatgattcttaagggaataactctgaagctagcaccaggttcaaaggttgcacttgttgggccaagtggtggtggtaaaaccacaatagcaaatttgattgagcggttttatgaccctctaaagggaaggatcttgcttaatggagtaccgctggtagaaatttcacatcaatatcttcacagcaaggtaagcattgtcagccaggagcctacgctcttcaactgcaccatcgaagagaatattgcttatggactagagggcacaacgaactttgctgacgttgagagtgcagctaaaatggcgaatgcacacaacttcatatgcggctttcccgaccaatataagactgtcgtcggcgagcgggggatcaggttatccggcgggcagaagcagaggatcgccattgcgagagctttgcttatgaacccacgagtgcttctcctggacgaagccaccagtgccctggatgctgaaagcgaatatcttgtacaggatgcaatggactccttgatgaaagggaggactgtccttgtgatagcccaccggctctcgaccgtcaagagcgccgacaccgtcgccgtcatctccgacggcctaatcgtggagagcggcacgcacgacgaactcctggaccgcgacggcatatacacggccttggtgaagaggcagctgcaggggccgaagtttgaggccaccagcagcatcagcgaggcctccgaaattgaagcggaacccagcagtaatgggcaatag

SEQ ID NO: 7678 - protein, 648 aa, Zea mays
MGKNMRIKTAPKANRVPLLGDGETSRALSDLEEGSDVQPANVGFCRVIKLAKHDAGKLVLATAALLVASLSNLLVPKYGGKIIDIVSRDVRRPEDKAQALEDVKGTILYIVTIVLVGSVCTALRAWLFNSASERVVARLRKDLFSHLINQEIAFFDVTRTGELLSRLSEDTQIIKNAATTNLSEALRNVTTTAIGLGFMFSTSWKLTLLALVIVPVISVAVRRFGRFLRELSHQTQAAAAVASSIAEESFGAIRTVRSFAQEYHEISRYGEKVEETLKLGLKQAKVVGLFSGGLNAASTMSVVIVVIYGANLTINGYMTTGSLTSFILYSLTVGSSVSALSGLYTTVMKASGASRRVFQLLDRVSSMTNSGDKCPINEKDGEVELDDVWFAYPSRPSHMILKGITLKLAPGSKVALVGPSGGGKTTIANLIERFYDPLKGRILLNGVPLVEISHQYLHSKVSIVSQEPTLFNCTIEENIAYGLEGTTNFADVESAAKMANAHNFICGFPDQYKTVVGERGIRLSGGQKQRIAIARALLMNPRVLLLDEATSALDAESEYLVQDAMDSLMKGRTVLVIAHRLSTVKSADTVAVISDGLIVESGTHDELLDRDGIYTALVKRQLQGPKFEATSSISEASEIEAEPSSNGQ

SEQ ID NO: 7679 - DNA, 24 bp, Artificial sequence
  primer
atgcgtagttttagccaactgtgg

SEQ ID NO: 7680 - DNA, 25 bp, Artificial sequence
  primer
ttaggcgctcaatgattcctcttca

SEQ ID NO: 7681 - protein, 621 aa, Artificial sequence
  consensus sequence
  Variant (2)..(21): Xaa in position 2 to 21 is any amino acid
  Variant (22)..(23): Xaa in position 22 to 23 is any or no amino acid
  Variant (25)..(28): Xaa in position 25 to 28 is any amino acid
  Variant (30)..(32): Xaa in position 30 to 32 is any amino acid
  Variant (34)..(108): Xaa in position 34 to 108 is any amino acid
  Variant (109)..(111): Xaa in position 109 to 111 is any or no amino acid
  Variant (113)..(122): Xaa in position 113 to 122 is any amino acid
  Variant (123)..(124): Xaa in position 123 to 124 is any or no amino acid
  Variant (126)..(184): Xaa in position 126 to 184 is any amino acid
  Variant (185)..(206): Xaa in position 185 to 206 is any or no amino acid
  Variant (208)..(270): Xaa in position 208 to 270 is any amino acid
  Variant (271)..(319): Xaa in position 271 to 319 is any or no amino acid
  Variant (321)..(321): Xaa in position 321 is any amino acid
  Variant (323)..(323): Xaa in position 323 is any amino acid
  Variant (325)..(329): Xaa in position 325 to 329 is any amino acid
  Variant (330)..(340): Xaa in position 330 to 340 is any or no amino acid
  Variant (342)..(350): Xaa in position 342 to 350 is any amino acid
  Variant (352)..(354): Xaa in position 352 to 354 is any amino acid
  Variant (355)..(360): Xaa in position 355 to 360 is any or no amino acid
  Variant (362)..(362): Xaa in position 362 is any amino acid
  Variant (365)..(366): Xaa in position 365 to 366 is any amino acid
  Variant (368)..(368): Xaa in position 368 is any amino acid
  Variant (371)..(371): Xaa in position 371 is any amino acid
  Variant (373)..(375): Xaa in position 373 to 375 is any amino acid
  Variant (377)..(378): Xaa in position 377 to 378 is any amino acid
  Variant (380)..(380): Xaa in position 380 is any amino acid
  Variant (382)..(385): Xaa in position 382 to 385 is any amino acid
  Variant (387)..(390): Xaa in position 387 to 390 is any amino acid
  Variant (391)..(395): Xaa in position 391 to 395 is any or no amino acid
  Variant (398)..(406): Xaa in position 398 to 406 is any amino acid
  Variant (407)..(407): Xaa in position 407 is any or no amino acid
  Variant (410)..(414): Xaa in position 410 to 414 is any amino acid
  Variant (415)..(415): Xaa in position 415 is any or no amino acid
  Variant (417)..(417): Xaa in position 417 is any amino acid
  Variant (419)..(421): Xaa in position 419 to 421 is any amino acid
  Variant (424)..(429): Xaa in position 424 to 429 is any amino acid
  Variant (431)..(444): Xaa in position 431 to 444 is any amino acid
  Variant (445)..(488): Xaa in position 445 to 488 is any or no amino acid
  Variant (490)..(498): Xaa in position 490 to 498 is any amino acid
  Variant (499)..(503): Xaa in position 499 to 503 is any or no amino acid
  Variant (505)..(505): Xaa in position 505 is any amino acid
  Variant (507)..(514): Xaa in position 507 to 514 is any amino acid
  Variant (516)..(518): Xaa in position 516 to 518 is any amino acid
  Variant (520)..(520): Xaa in position 520 is any amino acid
  Variant (522)..(523): Xaa in position 522 to 523 is any amino acid
  Variant (525)..(528): Xaa in position 525 to 528 is any amino acid
  Variant (531)..(535): Xaa in position 531 to 535 is any amino acid
  Variant (537)..(538): Xaa in position 537 to 538 is any amino acid
  Variant (539)..(539): Xaa in position 539 is any or no amino acid
  Variant (541)..(541): Xaa in position 541 is any amino acid
  Variant (547)..(549): Xaa in position 547 to 549 is any amino acid
  Variant (551)..(553): Xaa in position 551 to 553 is any amino acid
  Variant (555)..(557): Xaa in position 555 to 557 is any amino acid
  Variant (559)..(560): Xaa in position 559 to 560 is any amino acid
  Variant (562)..(568): Xaa in position 562 to 568 is any amino acid
  Variant (569)..(570): Xaa in position 569 to 570 is any or no amino acid
  Variant (572)..(574): Xaa in position 572 to 574 is any amino acid
  Variant (582)..(584): Xaa in position 582 to 584 is any amino acid
  Variant (587)..(587): Xaa in position 587 is any amino acid
  Variant (589)..(589): Xaa in position 589 is any amino acid
  Variant (591)..(593): Xaa in position 591 to 593 is any amino acid
  Variant (595)..(597): Xaa in position 595 to 597 is any amino acid
  Variant (599)..(599): Xaa in position 599 is any amino acid
  Variant (601)..(601): Xaa in position 601 is any amino acid
  Variant (603)..(604): Xaa in position 603 to 604 is any amino acid
  Variant (606)..(609): Xaa in position 606 to 609 is any amino acid
  Variant (610)..(611): Xaa in position 610 to 611 is any or no amino acid
  Variant (613)..(613): Xaa in position 613 is any amino acid
  Variant (615)..(620): Xaa in position 615 to 620 is any amino acid
RXXXXXXXXXXXXXXXXXXXXXXGXXXXRXXXDXXXXXXXXXXXXXXXXXXXXXXXXXXXXXXXXXXXXXXXXXXXXXXXXXXXXXXXXXXXXXXXXXXXXXXXXXXXXXXEXXXXXXXXXXXXFXXXXXXXXXXXXXXXXXXXXXXXXXXXXXXXXXXXXXXXXXXXXXXXXXXXXXXXXXXXXXXXXXXXXXXXXXXXXXXXXXGXXXXXXXXXXXXXXXXXXXXXXXXXXXXXXXXXXXXXXXXXXXXXXXXXXXXXXXXXXXXXXXXXXXXXXXXXXXXXXXXXXXXXXXXXXXXXXXXXXXXXXXXXXXXXXXXVXFXYXXXXXXXXXXXXXXXXLXXXXXXXXXGXXXXXXXXXAXVGXXGXGKXTXXXLXXRXYXXXXGXXXXXXXXXDGXXXXXXXXXXLRXXXXXXVXQXXXLFXXXXXXNXXXXXXXXXXXXXXXXXXXXXXXXXXXXXXXXXXXXXXXXXXXXXXXXXXXXXXXXXXAXXXXXXXXXXXXXXPXGXXXXXXXXGXXXSXGXXQXXXXARXXXXXPXXXLXLDEATXXXDXXXEXXXQXXLXXXXXXXXXTXXXIAHRLSTXXXADXIXVXXXGXXXEXGXHXXLXXXXXXGXYXXXXXXQ

SEQ ID NO: 7682 - protein, 27 aa, Artificial sequence
  protein pattern
  Variant (2)..(4): Xaa in position 2 to 4 is any amino acid
  Variant (5)..(5): Xaa in position 5 is any or no amino acid
  Variant (7)..(7): Xaa in position 7 is any or no amino acid
  Variant (9)..(9): Xaa in position 9 is Glu or Gln
  Variant (10)..(10): Xaa in position 10 is Lys or Arg
  Variant (12)..(12): Xaa in position 12 is any amino acid
  Variant (13)..(13): Xaa in position 13 is Ile, Leu or Val
  Variant (14)..(14): Xaa in position 14 is Ala or Ser
  Variant (15)..(15): Xaa in position 15 is Phe, Ile, Leu or Met
  Variant (18)..(22): Xaa in position 18 to 22 is any amino acid
  Variant (23)..(23): Xaa in position 23 is any or no amino acid
  Variant (25)..(25): Xaa in position 25 is any amino acid
  Variant (26)..(27): Xaa in position 26 to 27 is Ile, Leu or Val
GXXXXSXGXXQXXXXARXXXXXXPXXX

SEQ ID NO: 7683 - protein, 36 aa, Artificial sequence
  protein pattern
  Variant (2)..(3): Xaa in position 2 to 3 is any amino acid
  Variant (4)..(4): Xaa in position 4 is any or no amino acid
  Variant (6)..(6): Xaa in position 6 is any or no amino acid
  Variant (12)..(12): Xaa in position 12 is Ala or Thr
  Variant (13)..(13): Xaa in position 13 is Ile or Val
  Variant (14)..(15): Xaa in position 14 to 15 is any amino acid
  Variant (16)..(16): Xaa in position 16 is Ala, Cys, Ser or Val
  Variant (17)..(18): Xaa in position 17 to 18 is any amino acid
  Variant (19)..(19): Xaa in position 19 is Ile or Val
  Variant (20)..(20): Xaa in position 20 is any amino acid
  Variant (22)..(22): Xaa in position 22 is Phe, Ile, Leu, Met or Val
  Variant (23)..(24): Xaa in position 23 to 24 is any amino acid
  Variant (26)..(28): Xaa in position 26 to 28 is any amino acid
  Variant (29)..(29): Xaa in position 29 is Ala, Glu or Gln
  Variant (30)..(30): Xaa in position 30 is any amino acid
  Variant (32)..(35): Xaa in position 32 to 35 is any amino acid
TXXXIXAHRLSXXXXXXXXXVXXXGXXXXXGXXXXL

SEQ ID NO: 7684 - protein, 24 aa, Artificial sequence
  protein pattern
  Variant (2)..(2): Xaa in position 2 is any amino acid
  Variant (3)..(5): Xaa in position 3 to 5 is any or no amino acid
  Variant (8)..(8): Xaa in position 8 is any amino acid
  Variant (9)..(9): Xaa in position 9 is Ser or Thr
  Variant (11)..(11): Xaa in position 11 is Ala, Gly or Ser
  Variant (14)..(15): Xaa in position 14 to 15 is Ser or Thr
  Variant (16)..(18): Xaa in position 16 to 18 is any amino acid
  Variant (20)..(20): Xaa in position 20 is Ile, Leu, Met or Val
  Variant (21)..(23): Xaa in position 21 to 23 is any amino acid
AXXXXVGXXGXGKXXXXXLXXXXY

SEQ ID NO: 7685 - protein, 17 aa, Artificial sequence
  protein pattern
  Variant (6)..(6): Xaa in position 6 is Ala or Ser
  Variant (7)..(7): Xaa in position 7 is any amino acid
  Variant (8)..(8): Xaa in position 8 is Ile, Leu or Val
  Variant (10)..(11): Xaa in position 10 to 11 is any amino acid
  Variant (12)..(12): Xaa in position 12 is Ala, Gly, Ser or Thr
  Variant (14)..(16): Xaa in position 14 to 16 is any or no amino acid
LDEATXXXDXXXEXXXQ

SEQ ID NO: 7686 - DNA, 1293 bp, Escherichia coli
  CDS (1)..(1293)
atgatgaacacggaaggtaataacggtaacaaacctctcggtctatggaacgtcgtttccatcggcattggggcaatggtgggggcggggatcttcgcgctgctggggcaggctgcattgctaatggaagcctcgacctgggtcgcctttgcttttggcggtattgtggcgatgttttccggttatgcctatgcgcgtctgggggcgagctatcccagcaatggcggcattatcgacttctttcgtcgcggattaggcaacggcgtcttttcgctggcgctctcgttactgtacctgttgacgctggcggtgagcatcgccatggtcgcccgtgcttttggcgcttatgccgtgcagtttttgcatgaaggcagccaggaggagcaccttattttgctctacgcgttggggatcattgcggtgatgacgcttttcaactccttaagcaaccatgcggtagggcggctggaagtgatcctcgtcggcattaaaatgatgatcctgttattgctgattattgccggtgtctggtcgctgcaaccggcgcatatttccgtctctgcgccccccagctccggtgcgttcttctcctgtattgggataactttccttgcctatgcgggctttggcatgatggcgaacgcggcggataaagtgaaagatccgcaggtcattatgccacgggcgtttctggtggcgattggcgttaccacgttgctttatatctcgctggcactggttttgcttagcgatgtatcggcattagagttagaaaaatatgccgataccgccgtagcgcaggctgcttctccgctgctcgggcatgtgggttatgtgatcgtcgtcatcggcgctttactggcgacggcttcagccattaacgcgaacctgttcgccgtgtttaacatcatggacaacatgggcagcgaacgcgaactgccgaagctaatgaataaatccctgtggcggcagagtacctggggcaacattattgtcgtggtgttgattatgctgatgacggcggcactgaatttaggctcactcgccagcgttgccagcgccacctttttgatttgctacctggcggtgtttgtggtggcgatccgcctgcgtcatgatattcacgcctcgttgccgattcttatcgttggtacgttggtgatgttgttggtgatcgttggctttatctacagtctgtggtcccagggtagccgtgcgttgatatggattattggctcactcttactcagccttattgtggcaatggtcatgaagcgcaataaaaccgtataa

SEQ ID NO: 7687 - protein, 430 aa, Escherichia coli
MMNTEGNNGNKPLGLWNVVSIGIGAMVGAGIFALLGQAALLMEASTWVAFAFGGIVAMFSGYAYARLGASYPSNGGIIDFFRRGLGNGVFSLALSLLYLLTLAVSIAMVARAFGAYAVQFLHEGSQEEHLILLYALGIIAVMTLFNSLSNHAVGRLEVILVGIKMMILLLLIIAGVWSLQPAHISVSAPPSSGAFFSCIGITFLAYAGFGMMANAADKVKDPQVIMPRAFLVAIGVTTLLYISLALVLLSDVSALELEKYADTAVAQAASPLLGHVGYVIVVIGALLATASAINANLFAVFNIMDNMGSERELPKLMNKSLWRQSTWGNIIVVVLIMLMTAALNLGSLASVASATFLICYLAVFVVAIRLRHDIHASLPILIVGTLVMLLVIVGFIYSLWSQGSRALIWIIGSLLLSLIVAMVMKRNKTV

SEQ ID NO: 7688 - DNA, 1596 bp, Archaeoglobus fulgidus DSM 4304
  CDS (1)..(1596): transl_table=11
gtgcgggagaaaatcggcttctgggaagctgtcagcatcggcattggcggcatgattgggggaggaatttttgccgttctcggcctgagcgttcagcttgcgaagggctctgcccctatagcctttctcattgccggaattgttgcgctttttaccgcctactcctacgcaaagctcagcctgaggtttccgagcgagggcgggacgatagagttcctgatcaaggcttacggaacgggtttgcttgctggtgggttaaacatccttctcctcgttagctatgttgtcatgatagctctctactcctacgcctttggcagttacgccgccaacgccctcggaacccctattttgaagagcttccttatcgcattcgttgtaatcttttttacagttttaaactccctcggagcagttgtgagcggaagagcagaggatctgctcgttgcgttcaagcttgcggtgcttgttatcgttgccgcagcggggcttgccttcgtgaatcctgagaggctcatgccgtccaactgggctgatgcagtgagcataattgcaggcgggatgattatcttcctcgcctacgagggatttgagctgattgccaatgcgggcggagatgttgagcatccgaaggttcttgagaaggccttctacgtttcagttgttgtcgttatagcggtttacgttctaattgccataataactgtcggaacgctgccctacgagaagattatggaggccagagattacgctcttgccattgctgccgagccagcactcggacagcttggcttctggttcgtcacctttgcagccctcgcatcaacaagctcggcaatcaacgccactctgtacggaaccgcaagagcaagctacatggttgccaagtttggagagcttcccgagtttgttggaaagaagctgtggaggcaggcttacgaggggctggttgtgattcccattctctccataattctttccatcaccaccaaccttgaaacgatagccacagcaggcagcgggggattcctgcttatatttgctgctgtaaacctcgctgcggtaaagctcaggaggaaggttaaggtcaatccgctaatctcctcagctggggcgattatggccctcgcagccttcacaattcttgcattgagaatggcggaggaaaatctctacgctttggctgtgatgctttcccttatagcagcttccttcctctttgagtggacttacaggtggtatacaggaagggagattggaagatacgttgacaggaagctgatagagagggagaaaaacctcagaaactgggaggagtggattcctgcggttgtggatgagctaaggagaagatatagcgacagcgaggtttaccttgtcggcagccttgcaagaggtgaggctgagaaggcgggtgatgttgacctgctggttctgacggatgcggttgaaaatggagaaaaggaagggataacgagggacatcaagaaaaagcttgaattgggcccccagcactgccttgaccttcacttcgagaagaagagtttaagggatgaggcgttgaaaagggccgtgagttacaggaggttaaagtga

SEQ ID NO: 7689 - protein, 531 aa, Archaeoglobus fulgidus DSM 4304
MREKIGFWEAVSIGIGGMIGGGIFAVLGLSVQLAKGSAPIAFLIAGIVALFTAYSYAKLSLRFPSEGGTIEFLIKAYGTGLLAGGLNILLLVSYVVMIALYSYAFGSYAANALGTPILKSFLIAFVVIFFTVLNSLGAVVSGRAEDLLVAFKLAVLVIVAAAGLAFVNPERLMPSNWADAVSIIAGGMIIFLAYEGFELIANAGGDVEHPKVLEKAFYVSVVVVIAVYVLIAIITVGTLPYEKIMEARDYALAIAAEPALGQLGFWFVTFAALASTSSAINATLYGTARASYMVAKFGELPEFVGKKLWRQAYEGLVVIPILSIILSITTNLETIATAGSGGFLLIFAAVNLAAVKLRRKVKVNPLISSAGAIMALAAFTILALRMAEENLYALAVMLSLIAASFLFEWTYRWYTGREIGRYVDRKLIEREKNLRNWEEWIPAVVDELRRRYSDSEVYLVGSLARGEAEKAGDVDLLVLTDAVENGEKEGITRDIKKKLELGPQHCLDLHFEKKSLRDEALKRAVSYRRLK

SEQ ID NO: 7690 - DNA, 1608 bp, Aeropyrum pernix K1
  CDS (1)..(1608): transl_table=11
ttgtcggcgagaaaaggtaccgagaaacttggtttctgggaggtcttcagtattggagtcggcggtatgattggagggggcatattcgcaaccctgggtctaagccttgaacttgctggagctgccgcacctctggctttcttactcgcaggttctgtagctctaataacctcttactcgtatgctaagctaagctctaggtatccaagcgagggaggcactatagaattcatagttagagcctacggtgacaacgttatcagcggaggattaaacatcatgctgctcgcatcctacattgtcatgatttcgctttatgcccacgctttcggcagctacggcgccagcatgattaactgctgtccgagggaggcttacattgccctcgtagtattcgttatagcagggcttacagtagttaacatgctgggtgctatcatgagcgggagagtcgagttaggactggtcatattcaaacttctcgttctcatactcgtagccgtcgtaagcatgccgctcgtagactggaacaggttgggagtgagagagtggccatcgatcctaagtatagttgcgggtggcatgataatatttcttgcatatgaaggttttgaactagtggcaaacactgcaaaggacgttagggacactacgacgttgagaaaagggctctacgcgagtgttgtcacagtcatcattgtatacgttttgatagctatagtagctgcaggcacgttagacccagatactgttcgaatcgccagagactatgccctagcagtactagtagaacccgtgttaggtaagataggcttcacactggttgtggctgccgccttggcttcgacaagcagcgcgattaacgcaaccttatacggctccgcacgcgtaagctatatcatagctaagtacggtgaggcaccccagctcctaggaaggcatatctggcgaggcgcctacgagggcctccttgttataagcatattgggccttctactagccctatatgcaagtctagagcagattagcacagcaggtagcggagggttcttaattatattcgcagcagtcaacctggcagcgtacaagctccgcagggagacgggtgcaaaccccctaatatcccttgttggttttatcctcaaccttacttctctagctatactagtttatcagatggcctctatgaacccgggtgaactagctatattagccgttctcatagctggtagcatggcagctgaagccctctataggagaattaaaggcaggaggctaccacaagtaatagacccctctctaaaggtcagggagtcactgattagtgggtggagaaacctgacggctagagcagcagaaattataaaaagagagataatgaatgcagaagtctacataacagggagtatagcgagaggagagtacgagaagtcgggtgatattgatctaattgtttccaccacaaagccactctcaccccatgaggtcaagtttatagaggagaggctagtgaaagaactgaacctaccaccttcccaccccttacatattcacacggtcactcgtgataagctagaaaactttaaacacaaggttaaaatagattag

SEQ ID NO: 7691 - protein, 535 aa, Aeropyrum pernix K1
MSARKGTEKLGFWEVFSIGVGGMIGGGIFATLGLSLELAGAAAPLAFLLAGSVALITSYSYAKLSSRYPSEGGTIEFIVRAYGDNVISGGLNIMLLASYIVMISLYAHAFGSYGASMINCCPREAYIALVVFVIAGLTVVNMLGAIMSGRVELGLVIFKLLVLILVAVVSMPLVDWNRLGVREWPSILSIVAGGMIIFLAYEGFELVANTAKDVRDTTTLRKGLYASVVTVIIVYVLIAIVAAGTLDPDTVRIARDYALAVLVEPVLGKIGFTLVVAAALASTSSAINATLYGSARVSYIIAKYGEAPQLLGRHIWRGAYEGLLVISILGLLLALYASLEQISTAGSGGFLIIFAAVNLAAYKLRRETGANPLISLVGFILNLTSLAILVYQMASMNPGELAILAVLIAGSMAAEALYRRIKGRRLPQVIDPSLKVRESLISGWRNLTARAAEIIKREIMNAEVYITGSIARGEYEKSGDIDLIVSTTKPLSPHEVKFIEERLVKELNLPPSHPLHIHTVTRDKLENFKHKVKID

SEQ ID NO: 7692 - DNA, 1710 bp, Arabidopsis thaliana
  CDS (1)..(1710)
atgggaggccacgaaggtttcagcaaccaacgcctctcctccgccacatggttctctcatttccgtgcttcagctctccgatctaaatcactgccccctccgtcctcgcagactgccgttcgctccacctctggcgactctctggttcgtcgcctcggccttttcgacctcatactgttgggcgtcggcgcttccatcggcgccggtgtcttcgtcgtcaccggaaccgtcgctcgcgatgctggacctggagtcacaatcagcttcttgctagctggagcatcgtgtgtgttgaacgctctctgttatgctgaactttcatctcgtttccctgctgttgttggtggagcttacatgtactcttactcagctttcaatgagatcacagcttttcttgttttcgttcaactcatgcttgactatcatattggcgccgctagtatctcccgtagcttggccagctatgctgttgctcttcttgagctttttccagccctcaagggctctattcctctctggatgggaagcggcaaagagctcttgggagggcttctctctttgaatattttggctcccattttacttgctctcttgacccttgttctatgccaaggtgtgcgagaatcttccgctgtcaactccgttatgactgctactaaggtcgtgatcgttctcgttgtgatttgtgccggtgcttttgaaattgatgtagcaaattggtctccttttgcgcctaatggttttaaagcagttctcactggagctactgttgtcttcttttcatatgttggatttgatgcagttgctaattctgctgaagaatcgaagaaccctcagcgcgatttgccaatcggaattatggggagccttctggtttgtatctcgctgtatattggcgtatgtttggtgctcaccgggatggtcccttttagcctcctcagcgaagatgctcctttagctgaagccttttcatcaaagggtatgaagttcgtctcaatcttaatcagtattggtgctgttgctggactcacaactactctgcttgttggtctttatgttcagtccaggttatatctgggacttggaagggatggtctattgccttcaatcttttccagaatacacccaactcttcatacacctcttcattctcaaatctggtgcggcattgtagctggcgttttagctggcatatttaatgtacatagtctttcccatattctgtctgttggtacattgactgggtattcagttgttgcggcttgtgttgtggcattgagactgaatgataaaaaagatagagagtcgtccaatagatggacatcaagttggcaggaaggcgtcatttgccttgttataattgcatgcagtggttttggtgctggcgtattttaccgtttcagtgcttcagttatatttattctcctctcagttggtgtggcagttgttgcttcagcagttcttcattatcgccaagcttatgctctgcctctaggttctgggtttagctgtcctggtgtacccattgtgccatccgtttgcattttcttcaacatcttcttatttgctcagttgcattatgaagcatggataagatttgttgttgtcagtgtgcttgcaactgccgtttatgccttgtatgggcagtaccacgcagatccgagcatgttggattatcagagggcacctgaaactgaaagcgacgcttag

SEQ ID NO: 7693 - protein, 569 aa, Arabidopsis thaliana
MGGHEGFSNQRLSSATWFSHFRASALRSKSLPPPSSQTAVRSTSGDSLVRRLGLFDLILLGVGASIGAGVFVVTGTVARDAGPGVTISFLLAGASCVLNALCYAELSSRFPAVVGGAYMYSYSAFNEITAFLVFVQLMLDYHIGAASISRSLASYAVALLELFPALKGSIPLWMGSGKELLGGLLSLNILAPILLALLTLVLCQGVRESSAVNSVMTATKVVIVLVVICAGAFEIDVANWSPFAPNGFKAVLTGATVVFFSYVGFDAVANSAEESKNPQRDLPIGIMGSLLVCISLYIGVCLVLTGMVPFSLLSEDAPLAEAFSSKGMKFVSILISIGAVAGLTTTLLVGLYVQSRLYLGLGRDGLLPSIFSRIHPTLHTPLHSQIWCGIVAGVLAGIFNVHSLSHILSVGTLTGYSVVAACVVALRLNDKKDRESSNRWTSSWQEGVICLVIIACSGFGAGVFYRFSASVIFILLSVGVAVVASAVLHYRQAYALPLGSGFSCPGVPIVPSVCIFFNIFLFAQLHYEAWIRFVVVSVLATAVYALYGQYHADPSMLDYQRAPETESDA

SEQ ID NO: 7694 - DNA, 1293 bp, Methanosarcina acetivorans C2A
  CDS (1)..(1293): transl_table=11
atggcagagacaaaatcaatggggttatgggcttcagcttccataggagttggagcaatggttggagccggaatcttttcaatcttcggaacggctgcccagatttccggaaacgcggtctacgtttcttttattattgcagggatgatcgcacttttaaacacctattcctatgcaaagatgggggtcaggtacccttcggcaggcggccccgtagagttcatgcttaaagggtttggagatggaattttaagcgggggactgaacctcctgctctgggtgggttatgttttcgggctcgccctctatgcaaaaggtttttcttactatgcgataacctttctccctgcaggttcggctcctgtgtggaccagtttctttgccacggctatcatccttgcctttacagccatcaatttcagaggggcaaaaaccgtggggaaatcggagctctttattgtttccataaaagttgggatcctcctgctttttgctgctgcagggatgttttatgttactccaggaaacctttcaatttcagcctggccggctcccaaaaatctctttttcggggccggaatggtttttctcgcataccagggcttcggactgataaccaatgctgcagaagacatgaaaaacccggaaaaaaaccttccaagagccctttatctgagtgtcgtgctcgtcatcatcatctatgtatccgtcagccttgctgtgataggaaacctttccgtccctgagatccaaaatgcacaggactatgcccttgcggctgctgcaaagcctttcctcggggatataggttttaaaataatggcttttgctgcccttttttcgacctcttccgcaatcaatgcctccctttacggaggtgcaaatgtaagctacattctggcaaaagatggagaattgcccgaaatttttgagaggaaagtctggcaccgaagtcccgaagggctctttatcacctcaagcctggttattctctgcgcaaactttctccagcttgaaggaataggtatgcttgccagtacttgccttctcatggtttacgtggcagttaatatttcccaccttcgcctgttaaaggaaaccggggcaaaatcctatattatctgggcttcacttttaagcagcctgaccttcttttgcgtgcttttgtactacgaattcatgcattcgaagacaactctcggactacttggatttacggttttttgttgctttgctgccgaatggacctacagaaaatactccggtaggcttataaaggaaaggacaggctga

SEQ ID NO: 7695 - protein, 430 aa, Methanosarcina acetivorans C2A
MAETKSMGLWASASIGVGAMVGAGIFSIFGTAAQISGNAVYVSFIIAGMIALLNTYSYAKMGVRYPSAGGPVEFMLKGFGDGILSGGLNLLLWVGYVFGLALYAKGFSYYAITFLPAGSAPVWTSFFATAIILAFTAINFRGAKTVGKSELFIVSIKVGILLLFAAAGMFYVTPGNLSISAWPAPKNLFFGAGMVFLAYQGFGLITNAAEDMKNPEKNLPRALYLSVVLVIIIYVSVSLAVIGNLSVPEIQNAQDYALAAAAKPFLGDIGFKIMAFAALFSTSSAINASLYGGANVSYILAKDGELPEIFERKVWHRSPEGLFITSSLVILCANFLQLEGIGMLASTCLLMVYVAVNISHLRLLKETGAKSYIIWASLLSSLTFFCVLLYYEFMHSKTTLGLLGFTVFCCFAAEWTYRKYSGRLIKERTG

SEQ ID NO: 7696 - DNA, 1293 bp, Shigella flexneri 2a str. 301
  CDS (1)..(1293): transl_table=11
atgatgaacacggaaggtaataacggtaacaaacccctcggtctatggaacgtcgtttccatcggtattggggcaatggtgggggcggggatcttcgcgctgctggggcaggctgcgttgctaatggaagcctcgacctggggcgcctttgcttttggcggtattgtggctatgttttccggttatgcctatgcgcgtctgggggcgagctatcccagcaatggcggtattatcgacttttttcgtcgcggattaggcaacggcgtcttttcgctagcgctctcgttgctatacctgttgacgctggcggtgagcatcgccatggttgcccgtgcttttggcgcttatgccgtgcagtttttgcatgaaggcagccaggaggagcaccttattttgctctacgcgttggggatcattgcggtgatgacgcttttcaactccttaagcaaccatgcggtagggcggctggaagtgatcctcgtcggcattaaaatgatgatcctgttattgctgattattgccggtgtctggtcgctgcaaccggcgcatatttccgtctctgcgccccccagctccggtgcgttcttctcctgtattgggataaccttccttgcctatgcgggctttggcatgatggcgaacgcggcggataaagtgaaagatccgcaggtcattatgccacgggcgtttctggtggcgattggcgttaccacgttgctttatatctcgctggcgctggttttgcttagcgatgtatcggcattagagttagaaaaatatgctgataccgccgtagcgcaggctgcttctccgctgctcgggcatgtgggttatgtgatcgtcgtcatcggcgctttactggcgacggcttcaggcattaacgcgaacctgttcgccgtgtttaacatcatggacaacatgggcagcgaacgcgaactgccgaagctaatgaataaatccctgtggcggcagagtacctggggcaatatcatcgtcgtggtgttgataatgctgatgacggcggcgctaaatttagactcactcgccagcgttgccagcgccacctttttgatctgctatctggcggtgtttgtggtggcgatccgcctgcgtcatgatattcacgcctcgttgccgattcttatcgttggtacgttggtgatgttgttggtgatcgttggctttatctacagcctgtggtcccagggcagccgtgcgttgatatggattattggtgcaatcttactcagccttattgtggcaatggtcatgaagcgtaataaaaccgtataa

SEQ ID NO: 7697 - protein, 430 aa, Shigella flexneri 2a str. 301
MMNTEGNNGNKPLGLWNVVSIGIGAMVGAGIFALLGQAALLMEASTWGAFAFGGIVAMFSGYAYARLGASYPSNGGIIDFFRRGLGNGVFSLALSLLYLLTLAVSIAMVARAFGAYAVQFLHEGSQEEHLILLYALGIIAVMTLFNSLSNHAVGRLEVILVGIKMMILLLLIIAGVWSLQPAHISVSAPPSSGAFFSCIGITFLAYAGFGMMANAADKVKDPQVIMPRAFLVAIGVTTLLYISLALVLLSDVSALELEKYADTAVAQAASPLLGHVGYVIVVIGALLATASGINANLFAVFNIMDNMGSERELPKLMNKSLWRQSTWGNIIVVVLIMLMTAALNLDSLASVASATFLICYLAVFVVAIRLRHDIHASLPILIVGTLVMLLVIVGFIYSLWSQGSRALIWIIGAILLSLIVAMVMKRNKTV
